United States Patent Application Publication US 2026/0092266 A1 - sequence listing, part 3

SEQ ID NO: 469 - DNA, 24461 bp, synthetic construct
  misc_feature 1..24461: note = Synthetic
  source 1..24461: mol_type = other DNA
cccaataaagataataaaaataaggtgacaatttgtccaatccacaaaaagttcgtacttttgcagttcaattatattacaacatcgagaattaacaaataaaatatttttagcactaagaaatggataagaatacagtaactgggttcctactcatcgcagtgattatcattgctttcggctggtgcaacagaccttcagaggaagatgttaaagcacagcaagaacaacaagcaagaatcagacaagaacaaaaaaaggctgctgaacagaagcagaaagaagcagaacaacgtgaagccaataagtcagacagcacggcactcttcttctccgcgctcaatggcaccgccagtgatgtgatattgaagaacgacaaattggaacttaccctgagtacaaagggtggtacaccgaaaaaagccgttatcaagggtttcaaggacaaggatggaaatccagacatcactcttttcagcgatagtctcaagaacaagaacggcttaccttaccaccagttggaattccttcttgaggggaaagagcagaatttctccacacaggatttttatttcactcccacggaacagaccgacagcacggtgactatggtagccgctgatggtagtcgcaagattgagatgaaatacctcttaggcaaggactacatggtgcacttcagtttcttggccactggtatggaaggtcttttctccaccagtaccaagaccatgaacatcgagtggcacgacatgtgcaagcagcaggagaaaggccattctttcgaaaactatcgttcatcgctcacttacaaagagaagggctctggcactgactacctaagtgaaacatccgacaagaaagagaccatcgaagaggctttggactgggtggccttcaaaaaccagttctttagcgctgtgatgatagccaaggacgagttctccgagaatgctgaattgcgcagcaccccatgggacaagagcactggctatctgaaggaatacaatgccagtctgaaaaccactttcgaccccaagggcaaaactgccacagaattggaattctactatggtcccaacgacttcaacctgctgaaacaggtggagaaggaaagcacattcgagaaagacctgaagatggagcgccttgtatatcttggctggcctctcttccgcatcatcaaccgctggttcacgctgtatgtgtttgactggctcaccaagtggggtctcaacatgggtatcgtgctgatacttatcacccttctcttaaaggtcatcacctatccattggtgaaaaagacttacatgaactctgccaagatgcgtgtgctgaagccaaaactcgaagaggccaccaagcaatacgacaaacctgaagaccagatgcagaagcagcaggcgatgatgcagctgtactcacagtatggcgtgagcccattgagtggctgtctgccgatgctcattcagatgcctatctggattgccatgttcaactttgttcctaatgccatccagttgcgtggcgagagtttcctctggattaacgacctctcgacctacgaccccattctccaatggagtagtgacctttggctcatcggcgaccacctgtcgctcacctgtatcctcttctgcgtgtccaacgtactctacacactgatgaccatgcgccagcagcgcgaccagatggtaggtcagcaggccagtcagatgaaagtaatgcaatggatgatgttcctcatgccagtgatgttcttcttcatgttcaacaactactctgccggtctgaacttctactacttcatctccctgttctgtagtgccgcaattatgttcatcctgcgcaagactaccaacgacgataaacttctcgccatcctcgaggcaaaatataaggaaaataagaacaagcccaagaaaaccagcggactggccgcacgtctggaagctatgcaaaaacagcagcaggaaatgcaacgccgccgcgaggaactggagcgtaaaaagaaaggactcaaataatgaacaaatcgataattgtagcggcagccattgcctgtgtatgctgcttgccctcagtagcccaaaacaaagtgaacatcggtaaaagtaaaattaccctgaagagcgacctactctccccagaggggctgtgggccatggggcgcatcgccagttatgccccctcgtccgacggtagccagattatctatcaggtggggtactatagtgttgaggaaaataaaagccatcacgtgctatgcaccatcaatgccgatggtactggccaacgccaattgactcaagatgccgaaaacgagaccgaccctgcctgggtgggtggccgcatcgcctttatccgtggcggtgagatatggacaatgaatgccgacggcagcgaccgtcgccaactgagcaagaccgatggcagcgtagaaggattcaaattctctcctgatggcacccgtgtcatcatcctcaagtcgatgccattccatgagattatcaaggagaatcccaaggacctgcccaaggctaccggccgcttggtcaccgacctgatgtatcgccactgggaccactatgtggagagcatccaacatcctttcgtggccgatgtcactgccgatggtatcagcgagggcattgacattctggaaggcgagccatacgagtgcccaatggaaccatttggtggcatcgagcagttggactggagccccgactccaaaaccatcgcctatacctgtcgcaagaagacaggccgtctctactccatctccaccgactccgacatctatatatataatgtggagcagaaaaccacccgcaacctgtgtaagcccgagggttaccaagacccagaggtagatgtcacgaaaaccctccgcgaccaggcagtaaacgctcccgagaacctgcagaataaccctggctacgaccagaatccacaattctcacccgacggcaagtatattgcatggcagagcatggcccgcgacggctatgaggccgaccgcaaccgcctttgtgtctatgaattggctacaggcaagaaacagtatatgagtgaggcgtttgactctgatgtcgatggtttctgctggagcgacaacaaggatgctatgatttatttcaccggtgtatggcatggcacctacaacatctattctattagcaagaaaggtgaattgaaacaactcaccgatatagtggccgacttcggttcgttgcagatgctgggcgacggcaagcgtatcattgccgagcgccacgactacacagcccctgccgacctttatatcgtcacccccaactccaaatcacctcaaaagacagctatccaacaacttacctatgagaataagcacatcctcgaccagttggcaaaacccaccgttggaaaacgttgggtaaaaaccaccgacaataaggatatgctctactgggtaatactaccaccacactttgatgcctcaaagaaatatcccaccctgctcttctgcgagggaggtccacaaagccccgtgtcgcaattctggagctatcgttggaatttcatgattatggcttcacagggttatgtggttgtcgcccccaaccgccacggccttcctggttttggctctgagtggtgtgaggaaatcagcggcgactggacaggccagtgcatgagtgactatcttgtggccatcgacgatgccgcaaagaatctaccctacgtagaccgcgaccacttaggtgccgtgggtgcctcgtttggtggtttcagcgtctattatctcgccggtcaccatgacaagcgcttcaagtgcttcattgcccacgacggtgccttcaacctcgaggccatgtacaccgagaccgaggagaactggttcagcaactgggaatacgacgatgcctactggaacaaagaccagacagccaacgcccgtaagacctacgagaactccccccatcgctttgtagataaatgggacacccccatcctctgcatccatggcgagaaagactaccgcatcaatgccacccagggtatgagtgctttcaatgccgcacgcatgaagggcatcgaggccgagctgctcatcttccccgacgagaaccactgggtattgaaaccccagaacggtattctctggcagcgcacctacttcaactggctcgaccgctggctaaaataggggtaagtggtgagaggtaagagattacctatactgctcacagccatcaaaaatcatagtaacgtcactatagttactatagtcactatagaaacaataaaaaaaacaaaaaaacaatagcaatgactaccaactccattcaaaaaacactacgcgactctgccgccatgcgctggacagcgcttttgctgctggcactcgccatgttctgctcgtatatcttcatggatatactgtcgcctatcaaaaacttgatggaatcaacccgcggatgggactccagtgcatttggcaccatgcaaggctctgaggtgttcctcaacgtgtttgtattcttcctgattttcgcaggtatcatcctcgataaaatgggtgtccgcttcacagcagtactctcaggagctgtgatgctcgtaggcgccattatcaaatggtatgctgtgagcgaatcgtttatgggcagcggactggagacctggtttaccaacaaccttaactacatccctggcttcgacgaactgggtgtctcgcccttctacgagggcatgcccgcctcagcgaaatttgccgcctgtggctttatgattttcggttgtggttgcgagatggctggtatcaccgttagccgcggtatcgtgaaatggttcaagggccgcgagatggctcttgccatgggtagcgagatggcccttgcccgtctgggtgttgccacctgtatgattttctcacccttcttcgctaaattgggtggtcaggtaagtgtttctcgttcagtggcttttggtgtagtgctcatgtgcatcgccctgattatgtttatcgtgtatttcttcatggacaagaaactcgatgcccaaactggcgaggcagaagagaaagacgaccccttcaaaatcagcgacattggcaagattctctccgacagtggtttctggctcgtggccttgctctgtgtgctgtattactcggccatcttcccgttccagaaatatgccgtcaacatgcttcagtgcaacctcacgctggtagaacctgataagaattcattctgggcaagtcagtcagtgaccatctatcaatacatcatcatgcttgttgtggctattgctggttttgcctccaatttccaaaagaaagccaatctgaaatatggtcttttaggagtctccatcatcgctcttatcgcatactgctacatgggttatatgcgtcagtcggcagagagcgtcttcgccgtattcccattattggccgtgctgattactcctattttgggtagttatgttgatcataagggcaaggctgcttcgatgctggtgttaggttcgttgctacttattggttgccacctcacatttgctttcatactgcctgtcttcaagggtaatgccgtcggcggcattatcatagcctatatcaccattctggtgttgggttcctccttctcattggtacctgcatcattatggccaagtgtacccaaacttgtggattccaaggtgattggttctgcttacgcactgattttctggattcagaatatcggcctgtggctttttccactgctcattggcaaggtgctcgacaagacgaatccaggtgtggaagacccaacacaatacgactacacatggcctctggtgatgcttgcctgcttaggtgtggcagccctcattctgggattggcactcaaagtcgtggacaagaagaaaggcatcggcctggaagagcctaatatcaaggagtaagtttctaggatttccgaatactcggaatacccggaatactccgagtactccgatcactctgagtactccgattactccgattatttaagcaataatccatgcaaaagtccatgaacacccctttgcgtcgctggaccgtgcttgtcatcgctgcattggtcatgatgatggggtatgtattctgggatattgtctctccgctatcgactaccctgaaagccacccccgaggagggaggtatggggtggacggcagcggagtatggcttttatgccggcagctatagcatcttcaacatcttcctgctgatgcttttctttggcggcatcatcctcgacaaatgtggcatccgttttacgggattattggccacggggatgatgttaggtggttctgtcatcaactacctcgctgtgactgtcatcccttgcgacagttatgccgacctcagtttcacattgtttggactgattccctcacacatcaaagtacaagtgctgatagctgcattaggctttggcatgtttggtgtaggttgcgatatcacgggtatcaccgtctcgaagattgtcaccaaatggttcactggacgtgagttagccaccgccatgggcgttcaagtggccatggcacgtttaggaactgccagcgccatcagcatgagtcccgttattgccaatgcctatggtctctccgcccctattctggtgggtgccaccctgttgctgttaggatttgtccttttcatcgtctatatcctaatggacaagcgcatcgatcgggagcagcgtgcatcggtgaaagcatcagagggctcagattcatcggaatcttcggagtactccgagtattcagagcactcagaagatgctgcaaataaaaatgatgacaaattcacctttcgcgacttcctcacggtgcttcgcaatcccggcttctggctgattgccctgctgtgtgtggcattctactccagtctgcggccattcctgaaattcgccaccgatgtgcttgtcaacaattacggtatggacaaggagacggctggttgggtaacctccatcctcccctatggcaccatcgtgctcactcctttgtttggtgttctctacgaccgcttagggcgagggtctctgctcatgctgataggttgtgtgattgtcacgctctgtcacgtatgcttagcattgccattacttgagcatacgtggatggtgatggtcatcatggtgctctatggcgtgtctttttccttggtgccaagtgccatgtggccaagtgtccctaaaattgttccactgaaacaattaggcactgcctacagtattatttattatgtgcaaaacatcggtctgatgctggtacctatgctggtgggaaacatcatcgatgccaataccgacaccactggccacgtagattacaccctcccgatggtggtgtttgcactgcttggtattgccgccatcattctttcccttctacttatggtctccgacaagcgccaccattatggcctttgggagaggaacatacaataaaactatgactgaggataagggtaataatcacgttgagataaagcatagcacagaaaaagaaagttctctgccatacattatcttttacatcatagtagctatcatttcccatttggtgagaccatggaatgagcacccggaaatggctattacaatcattatccttgcagtcattctaattcctattgtaataatgagagtcatggctcacaatgaaaatgtcggtaaagatatcacagtcattaccatcgacgatggcattctgacctacgatgggaagtctattgacttaagagatgtgacaggtatctccacagactacgaatacgatttggtggaattactctacccaggaaaaaggtttggctctcgaacttttagcatcaaatatacagaaactgacctttctgaagaagaacttattgccatcattcgacatcagatgatactcgtaggcaacactcattgattagttgttaagtttttatgagttatttgtatataggaagaaggtgccatacagtttttgtggttatgagcagaaaaaacatgctattatttcaatatttgtataaaaatttgcaaatatcgtgactatttccgatatttgcatgatgtttcgcaagatacgaactaagcagcatgaaatctcaaatctaaaaaactcataactaaaaaactcataaactatgttttcaaatcatccaaaaggactgattcccgccgccttgagtaacatgggcgagcgattcggctactacatcatgaacgcagtgttgctgctgtttctatgttcaaaatttggccttagtgacggaacgagtggtgtcatctactcagtattctatgctggcatctatgtgctgagtcttgtgggtggtatcattgccgaccgcacacaaaactacaagggtaccatccgcacaggtctaatcatcatggcattaggctatgtacttatggccattcccatcatggcgaccaaagacaattccacatggctgctggcattcacctgtttcgccttgttcctgattgccttcggtaatggtttgttcaagggcaacctgcaggccattgttggacagatgtacgacaactttgaggtcgaagccgccaagaaaggtcccgatgcattggctgccgtacaaggaaagcgcgacagtggtttccagattttctatgttttcatcaacatcggtggtctgattgcccccttcattgctccctatctgcgctcatggtggcttggtgagaatggcttgacctataatgctgagttaccagctctctgccatcaatttatcgacggtgctagtgcaatgactgccgaggcaatgaacaacctcaacctcttggccagtcaggtgagcaatggtgctcctattgccgatatgggcgacttctgcagcaattatctgaatgtcttcaacactggcgtacactattcgtttatcgcctctgtctgcgccatgctgatttcgcttgccattttcatgttctatcagaagatattcccaactcctgccaagaaagaggctgccgctgctgtgggatataccgcagaggaaaaggcatctatggccaaggaaatcaagcaacgtatgtatgctctgtttgcagtattaggaattgccatattcttctggttctccttccatcagaatggtcagtcgttgtcggtattcgctcgcgacttcgtaaagaccgactccatcgcaccagaaatctggcaggcagtgaatccattcttcgtgattgtgctcactccgattattatggcaatctttgcagcattgagccgccgtggcaaagagatttccacaccgcgcaaaattgcatacggtatgggcatcgccggtttggcatacctgttcctggtgctctattccatgatgtcgggctatccctctggcgaggaattcaaggcgatggatgtggctgccaaggaaggtttgaaagcaggtccctgggtgctcattgtcacctatttcttcctcaccgtagcagaactattcatctccccactgggtctctccttcgtctcgaaggttgctccgaagcatctgcaaggtctctgtcagggtctgtggcttggcgccaccgccgtaggcaacctgctcatctggttgggtccggtgatgtacaatgcatggccactatggatgtgctgggccgtcttcctcgccgtctgcctcatctccatgggtgtgatgttcggcatggtgaaatggctggagcgcgtcaccgaatgacaatgtaatattgaagattgacaattataacaaagccgacttccgtggtgtacgggagtcggctttgtttttgaaaaacatataaaaagggcgagtcaccccgcccatttgttttcacaacggaataatccttattgtgattagctaaattcgttgcaaatataaacatttttaattaatctacaaattatttcaagaaaaaatatatctttgcaaagaaatattgacacaaccttacacttctataataaaaccattagatttatgaaaaatatattaggattagaccttggaaccaacagtatagggtgggctcttatagatgatgaaaagaaaaaaatcatcaaatcaggcagccgaataataccgatggacgctgccaccttaggtgcttatgaagcgggtaacatggaatctgccacaaaagcaagaacaggatttcgtggtacacggaggctctacgaacgtgccattttaagacgtgaaagattacttagagttttaaacatactaaatttcttacccaaccactataaagttcaaattgatttcgataatcatcctggaaaattcatcaacgacagtgaaccgttacttccctatcgcaaagatttaaatgggaaaaatgagtttttattcatagactcatttcgggaaatgctttccgacttcagtactcatcagcctcaacttgtggccaatggcaaaaaagtaccctatgactggaccatctatttccttcggaagaaggctttaacaaaacccatcaagcgtgaagaacttgcatggataatattaaatttcaacactaaacgtggttactatcaattacgtggtgaagaaaaccaaacagacacgccaaagaatgaagaatacaagcttcttgaagtaactaatgttgtgcaaacagactctgacaaaaaacgcagtggtgtttattggtatgaaatcacctataataatggcgctgttcaacgcaaatcaggaatcgtccctcctaagagagttggtgataaagtagaaattatcgtcactactactattgataaaaaaggaaatgtagttctaaaactgagagaccccaaacccgatgactggactctcatgaagaaacgaacagaaaatgctatccaagtaagtggcaaacacgttggtgaattcatttatgacgcactactttctcagcccaatatcaaaattaaaggtaaattgattcgagtgatagagcgtcagtactatcgggatgagctatctgctatcttaaaaaaacaagcagaattcattcctgaattaaaagacaagttcctatatgaacaatgtatccatgaactgtaccgaaacaatgaagctcatattgattccattaaaaacaaatcatttgaagatttgtttatcgatgatattatcttttaccagcgcccattgaaaagcaaaaagagcgagatatccaattgcccttacgaaagttatcaatatgttaacaaggagacaggagaagtcattagaaagcccatcaaatgtattcccaaatccaatcctctctatcaagaatttaggttatggcaattcattcaaaatctcagaatatatgaacgagagctaaaaattgacggaaagcttaaattagatgaagatgttacgaatgaattcatccgtaacgaagggactattgtagaattatttgaatggttgaatcaaaaaaaggatataaaccaagaacaactgttaaaatttaagcctttcggtttgggcaaagatatttcccgttatcgttggaactacgttgaagataagtcttatccctgtaatgagacccattatgaaataaccaaacggttaggaaatgttattggttcaccgacattaacacctgaacaagaacagagtttatggcatattctatattctgttgatgacatcatagaattgcgtaaagctcttacatcttactctatttcaaataatcttgacactgagtcatttgtagataatttcattaagatggagcccttcacaaatgactatggcgcatattcagagaaagctattaagaagttgctcccattaatgcgcacaggaaaatattgggaaaagagcaatatccatcaacagaccctagagcgaatcaataacataattgacggaatagcagatgaatctatcgcccatcgtgtcagggaaaaggcaattaatttgcagactcttgatgatttcaaatatttgccactctggttgtcttgttatatagtatataaccgccactctgaatcgagcaatctggaacgatggcaatctccagaagacatagacagatatctggaaaacaacttcaagcaacactctttgcggaatcctattgtagaatctatcctcggcgagatgatgagattggctcgtgatatttggaagacatacggcaaaattaacgaagttcacgtggaaatgggacgtgatttgaaagccaatgctggagaaaggaaaaagcggtacgaaaatatagctcgtaacgaacgcaccaacttgagaataaagctactccttcaggaatttattgacccagaataccatatcgacgatgtccgtccacaatcaccttcacagcaagaaatattgaaaatatttgaagaaggagctttgaacagtggagaaaatgttcctgatgacatcctcttgattgctgacaacttgggtaatccaggtaaacatgtctctaagcaagagattctcaaatatcgcctatggttagaacaaaagtataaatcaccttatacaggtcagcccattccactatcaaaattattcacgccttcctatgagatagagcacatcattcctcaatcacgctatttcgacgactctctaagcaacaaggtgatatgcgaaagcgaagtcaacaaattaaaagaccgtatgcttggttttgagtttatatccaagcatggaggaagcatcattgaaggcaacttgggcaggcaaatcaagattttggacaaaattcaatacgaagattttgtcaaacagaactattctggcaaccgttcaaagatgcgcaaacttttaatggatgaaattcctaagagttttatcttgcgacaattgaacgacagcagatacatagcacgtaaaacaatcgaaatactatcatgtttggtaagagaggaaggtgaaacagaggccacatcaaaaaatgtcatcgccaccaatggcaatattacagacaggctaaagaaagactggggactcaaagatgtatggaatagcatcatcgctccaaggtttgaaagactaaatgagaagacaggtaccaacagctatggacaaatggtcaacaaagacggcaatgaatattttcaaattaacgtaccgttgtctatatctaaaggattcagcacaaaacgtatagaccatcgccaccatgctttagatgcaattgtcatcgcttgttctacacgcagtcatgttaattacctcaacaatgaatcagccctctcttcagaaaaagacaaacgatatgatttacagcataaattatgcgacaaaaagcgattagatcatcaaggcaattacatctggcaatttaagaagccatggggcacattcacacaagatgcaaggaatgagatacttagtattatcgtaagtttcaaacaaaacttacgagtaatcaaccgtatgagtaatttcttctggcattatgaagaaaggaagaagattctatgtaaacagatacatggtgatggatgggcaatcaggaaatcgttacataaagccactgtatcaggagcggtcagactgcagcaaataaagaaagttcgcttggttgaagcattagatgattggcaccaaatcaaagataaagaaatcaggaatgccatcaaagaagtaatctccttatacaaaaaattcgacaagaaaactatactcaaatattttaaggacaggaaatacctcatcaacggcaaagacattagtagagtggagatctattgtctaccaaaagaacctaacctctccgcttcacgtgtttccttggatgaatcattcgacaagaaaaagattgaatccatcaccgatagtggtattcgaaaaatcttattacgccatttagagattaatcacaatgaccccaaattagctttttcactagatggaatagaagagatgaacaaaaacatcaaagaattaaatgatggaaagtatcaccagccaattataaaagtaagaaaaagcgaagcttttggtttgaaattccctattggtcagagagggagaaagagcatgaaattcgttgaggcagacaaagggaccaatctattttttgctatttattccgacaaagaagggaatcgcgaatttgagagtatccctttgaatgttgctgtggaaaggctcaaaaaccacctaccaattgctcccgaatccttagaaaatgggaaaaggctattattcacgctgtcacccaacgacttagtatatatgccagagaaagatgaaaacattggcaacataaccgaacttaataaattatataagatggtttctgcaacgggtaatagaagtttctacatcccaatggctattgcctacccaatagaagacacgacggaattaggtcccaacaacaaggcagagagagataaaaatggtaatatgataaaaagccgatgcgtaaagatagaggtcaatcgtcttggtatcattacaaaaattcatcatggtctatgataaaaaagactctatattttgggaatcctgcatatctctcttattccaatggacaactcgtggtcaaactaccggaaatagagaaggcggataacgtaccagaaattatcaagtctaaatctatgcggactattcccatagaagacattggtgttgtcgtgattgaccataaacaggtgacagtcactcaatccgttattgcagcattattagacaacaatgccgcctttatcacttgtgacgacaagcgcatgccaacaggtatgctcttaccattacaaggacattctgtctataacgaacgtttcaggaatcaattggatgcgtccttacctttgagaaaacaactttggcaacaaacagtgaaagccaagattgaaaatcaaaccaaaatcctacatcgaaacaatcccgaggcatctatcggcaatatggaggcatgggcacatgatgttcggagtggagacccagacaattatgaagccagagcagctgtgtattattggaaaaatctattcaaggataacccatcttttgtcagagaccgtgaaggtacgcctcccaacaacttgctcaactatggctatgctattctacgcgctattgtagctaggtctttggtcatgagtggtttgttccctctcttgggtattcatcatcataatagatacaattcatattgcttggcagatgatattatggaaccttaccgtccttttgtagatcaaattgtaatagacatttatcataacacttccattcctaaagaactaacaacagatatcaagcaaaaattgttgggcattcctgttctagatgttgtcatcaatggcaaacgtagtccattaatgattgccgtatcacaaaccacagccagcttagctaaatgctacaatggtgaaaccagaaaaatcatatatccacaagtattatgtatgaccgattaaatgaatacagagtcatgtgggttctcgttttatatgatttgcctacagaaacgaaaaaagaaaggaaagaggcagccaaattcagaaagaacatcatgaaagatggttttaccatgtttcaattttcaatttatgttcgacattgtgcaagtatggataatgccaaagtgcatataaaaagagtcaaatccatcttaccaccaacaggcaatgttggcattatgtgtattaccgataaacaatttgccgatatagaaattttcttatgcaagaaagaggtaaagcctaatgctccataccagcagcttgaactgttttagatattagaaaatgggatttcacccagataaatgaaatcccattttaaacatcccatttttctatttcgctaaagaaagcgtaacacactgtctaaaagcaagatacaagcatctagatgtttgtgaccttacaaaggtacaaaaaatttagctaatcacaacctccctcacaaacacccttaaccatcccatgatgtttgtgaccttacaaaggtacaaaaaatttagctaatcacaaccctccgtgcttttaagtccctaacggcatgatgtttgtgaccttacaaaggtacaaaaaatttagctaatcacaacggtacgcttaagtgttgcggtctggtaacggatgtttgtgaccttacaaaggtacaaaaaatttagctaatcacaacacattttaaccgattgcgccggctcctttggatgtttgtgaccttacaaaggtacaaaaaatttagctaatcacaacgccaccaagcgcaacatctgcatctggaagatgtttgtgaccttacaaaggtacaaaaaatttagctaatcacaacatatccttttttcttccgactataattcggatgtttgtgaccttacaaaggtacaaaaaatttagctaatcacaactaagaatattaggagtacaactctcaataagatgtttgtgaccttacaaaggtacaaaaaatttagctaatcacaacaagattccttgaaggttcaaggatttgagagatgtttgtgaccttacaaaggtacaaaaaatttagctaatcacaaccttctaatacacctaagcaaggtggttcaagatgtttgtgaccttacaaaggtacaaaaaatttagctaatcacaacagcagaatggacaaagcagtatggcttcatgatgtttgtgaccttacaaaggtacaaaaaatttagctaatcacaacgtgtggcgagcttgatgtgtttgatttagagatgtttgtgaccttacaaaggtacaaaaaatttagctaatcacaacaactgacagcctgttattcaggtcttctcgatgtttgtgaccttacaaaggtacaaaaaatttagctaatcacaaccccgatgaagatagtaaaccggtaaatgcagatgtttgtgaccttacaaaggtacaaaaaatttagctaatcacaacaggttgtttgacagacggtctagatgctggatgtttgtgaccttacaaaggtacaaaaaatttagctaatcacaacggtgctggtgttcagtttgctgttactggtgatgtttgtgaccttacaaaggtacaaaaaatttagctaatcacaacagaatactatagtgatggatgagcaatttggatgtttgtgaccttacaaaggtacaaaaaatttagctaatcacaacgacagcgagggtagggcacttgtgttgcctgatgtttgtgaccttacaaaggtacaaaaaatttagctaatcacaacacgactggccgaatggggattgataaggccgatgtttgtgaccttacaaaggtacaaaaaatttagctaatcacaactaaggcaattagagtacgcttcacctgctggatgtttgtgaccttacaaaggtacaaaaaatttagctaatcacaacaaacaagaagcaaaattgcttggctcatctgatgtttgtgaccttacaaaggtacaaaaaatttagctaatcacaacacatctcgttggtaagagtaaagttagaatgatgtttgtgaccttacaaaggtacaaaaaatttagctaatcacaacagttaacttgaaggttgggaaaggttaaggatgtttgtgaccttacaaaggtacaaaaaatttagctaatcacaacacgtacatatggtatatgtgcattgtcatagatgtttgtgaccttacaaaggtacaaaaaatttagctaatcacaacagaatggtagttcgtcgtcatcctgcacgggatgtttgtgaccttacaaaggtacaaaaaatttagctaatcacaacttccgatatatatcggactattgataaacagatgtttgtgaccttacaaaggtacaaaaaatttagctaatcacaacgtatgaacgcaaagactttcacgaagaccgatgtttgtgaccttacaaaggtacaaaaaatttagctaatcacaacctttttagagggggttaaaggggggacactgatgtttgtgaccttacaaaggtacaaaaaatttagctaatcacaaccgtgacatagttccgtagccaatggggtgagatgtttgtgaccttacaaaggtacaaaaaatttagctaatcacaaccatgttcctgaattgtttttattcttgcttgatgtttgtgaacttacaaaggtacaaaaaatttagctaatcacaacgctgacgcaactcatggcggcggtgctcgggatgtttgtgaccttacaaaggtacaaaaaatttagctaatcacaacgaatggctatctcaaacgccttttgcttcggatgtttgtgaccttacaaaggtacaaaaaatttagctaatcacaacaagtatgtatagcatgacaattgctcagaagatgtttgtgaccttacaaaggtacaaaaaatttagctaatcacaacatatttataggcaataaaaaaagatagcctgatgtttgtgaccttacaaaggtacaaaaaatttagctaatcacaacaaatgcggcatcgagtgcctggcgtcctgtgatgtttgtgaccttacaaaggtacaaaaaatttagctaatcacaacaatggcactgtgtatgcaaatagtggtcgggatgtttgtgaccttacaaaggtacaaaaaatttagctaatcacaactgttttttaggagtcgtgccgtttgttttctttcttccgaatgttccagcagcctcgtatgcctttgcgcggaagaatcgtttcattcgctgtgtgacgatgatgtcccctccgtcgttgtgtatggcagcataagggaggtcggtgtagaatatgacggagttgctggttgttcggctgtgtatgctgctgcggagtcgtccagtatccgttagtatggcccttcccttgtccctgatgggcgactttcgtcgctgccatttttcggagaagaacgcctggcgttcgaagttctggtcgaactcgtctttcatgtccacggcgatgtcccggaggatgtttttgattattttttggatgttttcgggcatattgtttaaaatttgtttggaggttggatattttttcgtatctttgtatcgcagcatatctcccgaaaggtagaatggctgtgcctaaagtcaccccattattcaaacgggtggcttttttgatatacgatcttgccatcttgcatacaaattacctcatcaaaagcgacccatgagccttctgcattttccaatcctgcatatcttactaaagcggcttgaaataacgtttcatcgaattcgtcctcgtatattaatattattgcaactttgcatcctggtttctctgcacaatgtatcaatcctttttttatattgtttgtggatttcccatttttgcctgatacttccagatgtttgtgaccttacaaaggtacaaaaaatttagctaatcacaactcaagttgcgctaactccttctgattgagtgatgtttgtgaccttacaaaggtacaaaaaatttagctaatcacaacgcgaaaaggatttcaatcaacgttaaaggtgatgtttgtgacattacaaaggtacaaaaaatttagctaatcacaacttgatttgcttcgttatggaaatatacctgatgtttgtgaccttacaaaggtacaaaaaatttagctaatcacaactatcgtcaagcactctgacgtccttgtcggatgtctgtgaccttacaaaggtacgaaaaattaggttaatcacaatcagtaaaaggaatgtatgacgtaaaaaaatggtggcatcatatgttttatagaaaaatgtgttatctttgcacaatatcacaaatagtaactgattgctgtcaaaagacgcacacctgttcccggcattgctgacagaggaatatggtgggaaaaaactaaaaaaacttaataactcataaactcaataactatgtttgaaggacaaccgaaaggactttatgcattggcattggccaatacaggagagcgatttgggtattacaccatgatcgccgtgtttgcactctttctccgtgccaactatggtctttcaccaggattggcaggcacgatttacagttcgtttttgatgctggtatatttcttcccgctgattggcggtatcatggccgacaagtttggctacgggaagatggtcaccacaggcatcgtcatcatgtttgttggctatgtgctacttgccattccacttggtggtgacacttttgccctgatatttatgcttgccgccctgctgctcatcggctttggcacaggacttttcaaaggaaacttgcaggtgatggtgggtaatctctacgacgacccacgctacagcgacaagcgcgactcaggattctcgattttctacatggccatcaacatcggtgcactttttgcaccaactgccgccctcaaaatcaaggagtatgctgagaatgtctggggattttctggcaacgacgcctatcacttttcctttgcggtagcctgcgcatcactcatagtatcaatcgccatttactatctattccgtcccaccttccgccatacagaagacacaagaaacaagaagacagcgaacgccaaggaagaaaagcccgtggaagaactgtcaaaggaagacacccgtcagcgcattatcgccctttgtctggtgtttgctgtggtggtgttcttctggatggctttccatcagaacggtctctcgctgacctattttgccaatgagtttacggcacagagttcagagggtgtgcagagcatggccttcgacgtatggaaccttgtggctatcatctttatcgtctatggtttgttctcccttttccaaggcaaatcaagtcgggaacgtggcattgctgctctcgtcgtcttattagctgtggctttcctcatctggaaatacacccgactgactggtagcaccatcgtcgatgcacccatcttccagcagttcaaccccttctatgtagtggcactcacccctgtgtctatggccatcttcggtgctttggccaaaagaggaaaggagccttctgctcctcgaaagattgcctatggtatgcttgttgccgccgtggccttctgcctgatggctgtatgctcaattggattgccattgccacaaacagaaattatagatggtgaacctgtgggtaaacatgtggctgacatgacccccaacctactcatctccacctatttggtgctgacatttgctgagttgctcctctcaccgatgggcatctcgtttgtatcaaaggtggctcccccgaaatacaaaggtatgatgatgggtggctggtttgtatccaccgccattggcaaccaacttgtgatggtgggtggcctgctctggggcggtctgccactatgggcagtatggtcagtatttgtcggcctctgcgttctctccgccctcttcatgtttgccatgatgaaaagattggagaaggtgtgttagtcaggcctttgcttgtaggttttgaaaaaattgcttatctttgcagaaattttaatcaacctactaaaacaacgataaaaaatgaagaaaagcctgtttttactgatgtgtgctttggtaccattttgtgccatggcctacaatctgcgccatgtgagcgtgcatgaccccagcgtggtatgggacccaaattcccgatattactatatcttcgggtcacaccgtgcctcagcaaaatcaaaagacatgtcgagctggacaactttcactgccgcatggaagacaaccaccagcaacaatgcctcgaataccgatgcgttcaaaaccaaccaaaccaagaaggtgactatcaacggcagcgaggtgactttcggtaacttcgacgcctatgcctggtcgtcggcctacggaaatggatacaacatcgacggcaacatgtgggcacccgatgttatctacaaccctgtgttacagaaatggtgtatgtatctgagtatcaacggtccgacatggaactccagtatcattctgctcaccgccgacaaaatcgatggaccatacatgtatcagggtcctgtcatcttctcaggattcaacgtgacaagtactgccggagtgagttataaaaaaaccgacctggaattggtgctcggcgaacaggcatccctgccctcccgctacaatgtgggcaaccaatggggtaaccggtggccacattgcatcgacccatgcgtgttctacgacgagcagggcaaactgtggatgtcgtatggctcgtggagcggtggtatatggatgattgaactcgatgagaacactggattgcgcgactacaacgtgagctactctatcaaaggtagtggcaacggcgtgaccagcgacccctacttcggcaagaaaatcgccggcggctactatgtgtcgggcgaggggtcctatatcgaatacatcggtggctactatttcctcttcatttcctatggtggactggcagtaggaggtaacccaaacgactacaacaacggtggctatcagatgcgctatttccgttcagagaatcctgacggtccctataaggatgccaacaacgtggacgccatcttccccacctaccgtctgaacttcggtcacaatgccaccgacaaccgtggtgtgaatatctttggtgcctatggcgactggggcaaactgaccgtgggcgactggtcggagcgttcacaaggtcacaactccatcattgctgctgaagacgggcgcacctacctggtttatcatacccgcttccagaaccgtggtgaggcacatgaagtgcgtgtgcatcaggtgttccagaatgaagatggttggctggtagctgcaccatttgaatataccggagaggaggtaaaaagtgccgacatcgccactacacagcagattgccaccaaccgtgtccccggcaaatatcaactgctgacccataaatatcgtttgaaccacaccacaaaagaactggccaaaccggtggaaatccaactcaaccacaacggtaccatcagcggtagcgtcacagggtcctggagtattcaggaaggcacatcctacatcacccttatcatcagcggtgtaacctacaagggagtggtagtagaacagactttggaaagaactacccagacagctgtttccttcacagcagtggcaaagaacggcgtatctatctggggatacttcacagaagctctctcgggcatagaagatgtctatactgataatgatgtggcggatgatgtcatctacgaccttcaaggccggcgtatcaccactccgacacaaaaaggcatctacatccgaaacggtaggaagtttatctggaaataacgtagaatcattgatgaaggtgtgtcaaaatcaagattttcattaccgacatttataatttacggtcattaaggcggccaacaagcacatagcccagggcaacgccctgggtttttatatttggcaacaattgttgccctgaaagggcaaaagcattgattatcgacgcttttgccctttcagggcgaatttgatactctgccttatacccagggcgattgccctgggctaacagctgctggcctttcaggccgttctccttcctcacaatctataagttgtgatttcaagttttatcattttgacacacccttctttgctatttctacactcacacgaatggaaaaagaggaaaaaggcttaaaaatgaaagaaggaaaaagtgccaaatatagtttataagtttttgagttttggaattgaccagtcacttctaacttctaactcctaactcctaactaaaaaccccaccccgccctacgggcactccttccctggtaatgggaggagagcagattatgatacaaaacgaaggaggggcgcacaaacgcccctcctttgctttgtatagttacttgaactaagattcaagactcattactcgaataccatgtggcagccatcgatggtgaaggcgaaattgaggtcttccaccaccacggtgtttacaccaaggtaatactggatataggtgttgccatcggtaccctccatgatagcctgcacatcagctgtaccgttgttacagttggtgatgtaagccgtcaccttggcaccgttcatagcgctcagccatgatgcccagtcgccagggcctccactggtgaggcatgctgcataaccattaccccatccgtagttgtcggcacgaaccacagcatattctgtagcgttgtcactgctgcggagcacgataacgaagttgttccagttgttggccagactgctatagttggtgaacttcacagcgtaggtctcacctgccgggatattgatattgtcggtatgtgccgaccaccatccgccagagttgtcctctggaccgagaactgtaggattcggtgtgacaaatgtgcaattcgactgtgaaacggtcacattgatttctgctgtcttcccattctcagtcatcactgtcacagtatggattccctcctctgcgggaatttccgagaacgacagtttggcattattcaccacgcttgtgctgccattacca

SEQ ID NO: 470 - DNA, 24452 bp, synthetic construct
  source 1..24452: mol_type = other DNA
  misc_feature 1..24452: note = Synthetic
gacgaaattgggtatccgttttcgtatgtgtcataagaatactgcaggtgaatgaaactgtcgaacactttacagttatccatgatggcctttttatatacgtcggtagccaaagacaaatcttcgtactcctgcaagttttcgattcttttgcgctcgataattccttttttcaattttgtgtaatcgtaacccgcaaaatggagaaagaccaacggcacttcgcattgtgggttgtcatcagtcctgaatctcaccatgatcttgtcatctttcatgaacaattcgcgttcaaaatagttccaaggtgccatgttcattcctagattttgcatgacatagagatggtcgttgccaagtaagccgggcatccagtccatccacttctggtctgtgaaattgccggtgcttctgtctgcaaagctgttgtctttcagtctggttttccaccactccgttatgtcgtgtgtggtcttagtgttcctcattccgcagaacccaagattgaaaatgccatttacattcatggcccattccggatgttcccctttgtagatgacatgtatgcctgctatttgaggggtcagtacaacatcgtaggtttctaattttgagaatatttcatcaagtggggaaaaaacatagatgtcagggtcgaagtaaatgacagtttgatagtccgaagcaaataaatgttgaaaacatgcgggtttgatggccgtgcaaaactcagtgagattgtacttgaatgccatttctgtccattctttgtccgaataactatttgtttccttgaccttgatgacattattggggatgtcaatgttttcattgtcaaattcgtcagcaacaaaaatgaagaagtccgtatcaggatgatgggtgttcagcgactggcctagaattctggccaagccgatatagttttttgctactatcgtgaagacacattttttcattttctttctttatttaatggttttgacaatggtggcaggatttcctgcaatgacacaaaaaggtggcacatcttttgtgactacgctgttggctgctatcaccgcaccctcacaaatatgaacaccagggagtatggtgaccttgtcgccaatccaaactctgtcttcaatgatgactggccctttcgaactcagttgcctgtcggtaggtgcgatgtctttttcttctatagtgttagatccatgcgaattgtcagatatggttacccatcgtcctgtcagcaccttatttcctatggcaacatggttgatacacgtgatgtggatgtgttctcccaaatggcagttgtctcctatctcaatacttggggtataagatttgttcccataaaggttccaagcggtgattactccgtttttccctatttctgtcatttctccgatgctgatgaattcctcgcctttagtttgtaacggacgatgtatcatgacacctttcccgatactcttaaaattggggattatccaatgtgtatagaaagtatctaggaccagcgagagttttgcatttgtcttatatccataaagatggctcaacagtgcaaaaaaaactctggatatgggttcgatgtataatcgtatttttcttttaaacgtcatttagtggatgttattatatcagtttcttgtaaatattataaatattatcaacattattttcaatggaataggtgtcaatggctattgattgtgccaataaagccttttcttcatattgttcgtctgttaagcaactgacactttccatacagtcggcaagtgatgtgatgtcgttaaaaaacaagccacccgtccggtctagtatttctttggttcctccagtttctctgccgataaccaggcaaccattgtaacaggcttcggctgtcattctgccaaaaccttcataaatactccccacgatgagggcttttgcttttctcattagattcctgacatcgttgacatagccgacaaattcaacggcttcagaacattgtaattctacagccattgacttgagcttgtccatatattgggcatcgccaaaacctgcgatgatgagcttgtagtccggatggttcttgtaaaaatgtgcgaaagccgagataacgtcatgatgtccttttacgggaacgactcgtgaggcgcagagaaagtagctttctttttggcgacagtagcttgtattctctttcgggtagataccgttataaactaccgacgcgtttttgcatgcttgcaagttgaaatgttcacgtatgccttcggtaatgcagactatttcatctgacttttttatgagtttttcaaatgatttttttgaaggaaaaatcatccagtcaaaatccttgtcttggtattctctaaggtgcatgacatggggaatgccgaattttttggcaatcttaaggccttcatgaataacgcctacatttgtgtgtatgatatccggtttctcgttctttataattcgggagattgagaaaagtgacgctgttttcttcaccatcattgagcaaaatgatagtggccatcgaaaatgttgagacattgttcttggcctgtatagagcactagccgtaacgattacgccatagcttttgatgttgtaatcagataaaaaggacatgaaggcgtcgtctttctttccatgtttaggataaaggactataggctcaattcctttaggaatcaaacctttcaacatgttcatgaatgaaattgtcgctccacccatgaatgcagcactcagtatatagactatttttattctgttaagcatgttgttcctttctgttgttcgcttcagcctctatgtatgagccctttggattatagaaagccatcacataaattggtatgaaattacaataccacaagggagttcctctgacaataaaggctaagagtgcaagaagtacgcctgacaataaggctttcttgtttgtcgcagagtgaagcgatgaaaagaagaagaagaccaagaggatcattcctataactccattctcataaatatataccttatagcccgaattgccaaaattgtcctttggcatatctctgcctagcatgatatcggaggatttccaaaaattgctgtactctgcatcgaaatcttctgtaactcgattgttgccaacgatatctccatcgtcaacttccattcttatcaggatcaagtcatgaatgagattgttgccgttgttatagaaaaacgagcctacaataatcgtaacaaagataaaaacggatgctgccattttcaggaatacttttttcccttgaatccacagattcgcaaaagtaacgtaaacgatcaatacataggctgctaatgagaaagatagtattgccgttattatcatggctatgttataccatttcttccatttcccacattgtgtaaacaaaagcatcacgcaagcggttccaatctgtcctggctcaagaaaaacggaatggaaacgataaaacagcgcgagaagtgctctgtcgtcaattaaaaagaaaaaatagttagtgaatgaataaagtccatcagagaaacttgcatccctggaggggaaaggaaaaccgaatatccataatatataagcaattgttgaaacagccagcaagcctcccataaatttacacaagaaggttgcaagcttctctagtttgtcaatgtctattaggaacaggcaaagaaatataacaacatgaaacaagttgaaaataaagccgcctatccttcccccattcacaaacagctgataataggacaatgcgataaaggctgttaacggaagaataaaatcattccttgtgtatattgggcgtgaaagggttatggaaagcaaatatgatgctacaagcaaaatacctgctggaaatgcatacaaagtgccaatgggccacatgaaccatggattcaatgaccccaaatatgcaataagcatacccgaaaaaaaaagaaaaacagccaatttctctttgtttataagatataacttcttgaggtcaaacatgttttttttgtctttttatggcattcgttacatacaactgttcctctttgtcgagagtgaaaaaccaagcggataataaacccgttgcaatggctataatgatcgttgggaggaatcctaatttttcatgcatgaatatcgattggcaaatcatgcagctcatgcactcaagaaggcataaaggaatgattcttttaatcacctgatcccagaattgcttgatgcttaagcctgcttcttttttcaaaagggggattctttgtgcggctacgtaaatttcgatgagcaagtaaacccacatgatgctggccaccgagtatccgtgctttaacatcaaccaaatgacaagcagatagagcagcttgggcgtatatgtaagcagagtgtacttgcgaatgcttcctatggcctgattggcagtttgcaggccaagcgttgtttggtcgaaaatgaatgaaataagaacaaacctgcaaaaaagagctgtgtagtcaggtacttcttctagccaaattcccagtatggttggcatctcaaaaagcaaaggtatcgtgacgatggcaagcaaagaggctgagaatttgcattctttgcatgccaatgtgagcattttgttgcggtctttgcccccctctgctttcatgatttgaggatttatagcattcatgatagaggtgacgacaaacgaaatggcgccgaatacttggaatgatatgccataggctgcatttattgcagtaccgaaaaagtggttcagtatgatggctgttccttgatttcttcctgcgacagctcccatgccataagttgtccatcctgcaaaccctatcagttggaataaatatagcttgtcgatgtctttcttgtgaacatagagagagcactcctcgtatcttagaagtgaaaaggtggcaaaaacgaagaggttgagcaataggattaaagccatcataagtgaataaatcaaaagcttatcggcttgaatgtataaaaggcagatggctaaagatagttttatgacgctgtcaacaatgtcaactacagcaatgaacacgatgttctcatgtgcaatgaacagtgctttgaagggtgctgtcacaattgtgagaaatagcatgaaaatggttatggcaaaaacaatcgaggcggtgtggatgcggtcttggggaatgttaaggacgttatctatgataaagcctctcatggaaagaaggatggcggagagcacaatacctatgatgacatgaagaaagatgctgtttttgaacactttcttgactgtttccaaatctttctttccgtggtaaaaagatatatatctctgtgtggtgatgacaagcgcattggtgataaatcctagcattgcaacaacaccccccacgactgaatacactccaaagtcagagactgtaagtgctttgagaatcagtctggtggaatacagcgaaaggcaaagtgtgacaatcgccttcgtgtattgggctatcgtgttgacaatgatgcgtttggttggttccatgcgctaaagtgagtaaaaaaactggcggtttttgttattctttcatcaatggagtcaggatgtcatctttcaggatgtacccaatagtcaggataaacgccaaaaacatcattgcaaagacaaaaatcattcgcttgggaccagcaggcttgatgggtacggaggcaccttgaatgattgtaaatgcgggtgttttttcttgtaccttagccttggctgcttgcaactgggtgttcagcgcattgtatgtgttgaattttatttgcatgtcattttccaagtcatcctgcttcgctttgtagctttgaagaacaacatccacgttagcgtcggagaaattcgcatacaactggcgggcacgttcgtagtcgcgctttgcgtcaattgtcagttttgtataatagtctaaatctatgcgcgctttatttgttcggtaatcggttatgaaattttgcaggcgtgtccttatgctgtcggccagtgttgcgcaaatcagggggtcttgctcctgaacggcgattgttatgacgtcagtcttcttgtccacatcgcaactgatatggcttttcatcgtgctcaccacatcctgttggtccttgctaagcttgaaagggtcaactttatgattgcctgtcggtttcgactcttctttcgtgaataaaccgatgatggcattcttcagccaatagaaaggccgcagccaaaagtttgatttctggtgttttttgatgaatgtgtaatagtctgtgctgagtagcccgtcttctgtcgtaactttaatggggaataaactaacgatgaagtcggtggaccccatcaggtcggggtaaagcatgggtggtatggcatcggttgagcttgcagcatttagattaatgccaatggttgaagccaaagaacccaacgagccacccgatgcggtgttctccatttcgggagcaagcgtgatgttgcaattatagtatctgggtaggggcagaatataaatgcaagctaagacgaaagttatagaaagagttttcaagaacagtttctttctattccatattttcctaaaaacctttcttaggtcaatgatttcgggcgaattgttatcagtcattttctttattttagtatgttcgccaatgtcgctaccattgtggctattgacgccacgctggtgccgatggttaggatttcggccagagtgcgcccgtcgcgtttgggcttgcttggcacaatgatttcacagccgggggcgggcttggcgttgtgccccaccttggccacctttccgttcatgtagatgatgtaggtgtggctcttcttggcgcggtggccgaaaccgccagcctggtcgatgtagtaggcggctttcttgccctgcatgtaggcaaccgtgttgggatacatcacgtcgccgctgattttcaccgttccgttgtattgggggatgatcaatcggtcgccctcgcgcagcacgatgtcgtcgtcgctaccaggattgtcgagtgctttgtcgagctcaatgcccacataataggtgttgcccaaatcgagcttggtcacgtcgagcgagtcggactcaccgctttgcgacttcagcatcttcaacaccgtctgcatgcgcaggcgctcgtcgtcggtgatgcggcgctccagtcgggctcccttagagtatgcaaggtcgttcagcccgcctgcggccttgatggcatcgctcaggcgctcgtttttcttcgagagggtgtaagtgccttcaaacattacctcgccctctacgcggatgttctgcagttcgtaggtgccggggctcttgcgcacgtacacctcgtcaaagggttgcagcttgaaaccaggctctccgtcaatcacgaatccgtctttcagggcgaagctgaaggtctttgccacttcttcgccaggcacagtggctttagggtcaacgatgcggcgcgaaacatccacttttaccgtcgatgccgtctccttcaaacctccggcttgcagcacgaaatcctcaatggtttcgttggcggcatattcgtagatgcctggctgccacacctcgccatgaatggtgatggtttggttctgttgggcatcgtagagcgacggaatgaacagcacgtcgttgttctggatggggatgtcggccacgcgtccagacaagatgccatcgacatccacctgaatcacttccttcgtgcggtcttcacgttggcggtgcatcacggcgtgtgccgtaaacgcatcttcgcgcagaccgtcggcatgctggataagtgtgcgcacactgttgatctcggctcccacttcgtacatgcccggacggaacacggcacctttcacttccgccatgttcgagaaacgctgtatgatgctgtcaacgctcaccgagtcctcgtcgttcagttggaagtcgttgaatttgaactcctcaacgttgtgtatgctgaattccttgcccgtcttgcgcaccagtcgcacggcattcttgtaagcgtcgccggtgaatcctccggcatatttcaacagagttcccacactctcgttcttcttcatttcgtagaacatggggcgtttcaccttgcccgtgatgttcaccagacagtcgtagggacccaccacaatcacgtcgttgtcggccagacggatgttgcctgtcagcttgccgttgagcatgtagtcatacacgtccaccgtggtggccagtttgttgttgcgatagaccttgatgtttcgcagtgttcccaggtcgttgggtccgccagccatgtataaggcgtgaaacacgcttgcgaaggccgagagggtataggtgcccggagccttcacttcgcccatcacgttcaccatgatggtcttggtttgccccacggtgagcctcacctggctgctgctgtatcgcgcacccagctgcgagcgcaggtgggcgttggcctgagccaccgtcatgccgctcacctgcacgggcccaaagccctcgatgttgatgtcgccgtcgggcgacacggtggcggtgaaagtcttttgagaagcgccatacacatccacgatcacggcgtcgcctggccccagtcggtagttttgcggcgtggcaatgttcatgttcggttcaaacgacaggttcttcttgttgaatatgtcacgtccgaaaacctttctgacgggttcttcctcctcttcttccagcaccatcaatgtggaatcgggggcaaaggtgttcagttcctgctgaaaggccacaaagtcctcgtcggtctcatcgtatgtgcgctggtaggtcgaacgcttgctgatgcgtttggtggtgttttccttcgggtcgccgttgttcttgcgcatgcgggtttcggaatcgtcaacggccttgtcggccacttgccccagtcccttgtccttcagttgccgttcgtagcgcgccttgatacgcctgatttgcgtgatgtcaacacccctttgcatcagtttcgtaacaatctgcgcctgggaagttcccgccttttgctccttcacgacaaactgcatcacctgctcgtcggtcatcgacgattgggcgaaggtgctcaatgcaaacagtgccagcagcaatgtcagtgtatataatcttttcatcatgataaatcccttttaagctcaattatcaattgtcaattaattatataaccttttttttctcaaattgttgcaaaggtacgattttttcttcatatattcttgcattttcccgaagttatttataactttgcaccgcaaaaacgtattttcggggggaatatcccaactttcccccgttgcaccctggggttgacatggattagacggcaggatgaaatggtacgcaagcacgcggagcctcgttggctagctcctaaaacagagtgaacaaaaaattaattggcaacaacaagtatgctctcgctgcttaatcgaagcacagtagattacgagcttaattccgtcaccaggtgatggaacgagacatcgctccgaggatgttgttccgaatccaagggtcaagcggtgcaggtaaatcggaaatagcgttggtgtgcctcgccatcggcgtgaagttttagaggataaggcatcagttggtggtccaggtcttgctgctgctcgaaaactaaagtctggaataagcgtgtagaaaccgtatggtttccctgtgcggacgcgggttcaaatcccgccagctccacaagcggaaaaccgcagcaaaacattcgacaagcgaggcaagtgctattttggcatttggctcgcttgttggtttaccttaaatgctgattagctgtgagcgtctatttataaaaaaaggcgagtcaccccgcccgaaatgtattcacaacggaataatccttattgtgattagctaaatttcgttgcaaaagtacaaattatttatgaaacatccaagtttttgctgaaaaaagtataactttgtggaaaactttaaaaacttttcaaaccgaacaaatatgagaaacattcttgggcttgatattggtacaaatagtatcggatgggcattgatcgacggtgataacaatcgaatcatcaaggttggtagccgtattattccaatggatgcagccaccttgggttcattcgaggcgggcaatcttcagtctcaggcatcagtgcgaacaggtttcagaggcacccgcagactttatgaaagagcagaattgcgaagggagcggctactaagggtgctcaatgtgctcggcttcttaccagagcatttcaaaaaccaaatcgactttgtcgaacatcttgggcagtttaagaatcatgcagaacctcttttggcataccgtaagaatcaagaaggaaaaaatgagttcatctttcacgattctttctgtgaaatgctggcagatttttctgcacatcatccttcgcttgtttcaggtggcaaaaagattccttacgattggaccatctactatttacggaagaaagccctgagtaagcccatcagacgcgaagaacttgcttggatcatactcaatttcaacacgaaacgaggctattaccagttgcgtggcgaagaaaacgaattggaaacgcctgtcaacgaagagtatcgggttcttgaagtacggagcgttgaaccaacgggcgaggacaaaaaacggcatggcatctattggtttgatattacttacgacaacggagccgttcagcgtaagtcagggccagttgcccctcgcaaagttggcgacaaagtagaattgattgtcacgacatccacagataaaaaaggtaatgttactgccaaactaagagatcccaaacccgatgattggacgctcatgaagaaacgttcagaaaatgcgattctacagagtggcaagcaggtaggggagtttatctatgactctatgctctcccaaccagacaccaaggtaagagggaaactggtgcgtgtgatagaaagagatttatacaaaaaagaacttgaagccatactcaataagcaaagagagttcatacccgaactgtctaaccgaaaactgtacaacgaatgtatcagggaactctatcggagcaatgtggcccatgtgcaatctatccaagacaaagactttacgagtctctttgtggatgatatcattttctaccagcgcccccttaagagcaagaagagcgaaatagcagattgcccttatgagcactatcaatatatagacaagtcaacaggggagcatttctacaaacccattaaatgcatttccaagtcccatccgctctatcaagaattccgtttgtggcagtttgttcagaatctccgaatattccaaaaggaaaaagacgtggatggaaaactgaaattgaacgttgatgtcacacatgtttttctaaaaacagaggcagagattgttgaactttttgactggctctacgagcataaggagattagccaggagcagttgctaaaatacaaaccatttggaataggaaagtcactttccaactatcggtggaattatgtcgaagataagtcctacccttgcaatgaaacgcattactacatttgcaaatgcttgcagaaggtggaaggaacccctgtgctcgacaaacaacaagaacttgctctttggcatatcctctattccgtagatgatattgttgaacttcgtaaagccttggggtcgtttgccgaggccaatcagcttgaacccacctcttttgtagagagtttcatcaaaatgaaacccttccccagtgattacggcgcttattcggagaaagccatcaaaaaactgttggcccttatgcgcgcaggaaaatattgggatgcccaatcaatagatgctaatacttgttcacgcatagctaatatcattgatggggttgccgacgaaagcatcgccaaccgagtccgggagaaatccatcaggttgcatcagactgaagatttcagatatcttcctctttggcttgcttgttatatcgtttacaaccgccactcagaatcaaacgatgcccagcggtgggagagtcctgatgatatagacaactatttgcgcaacattttcaagcagcattccttgagaaaccccattgtagagatggtcttgagagagatgctcagagtggtgcgtgacatttggaaaacctatggaaaaatagcagaagtgcatgtcgagatggggcgcgacatgaaagccaatgccaatgaacgcaaaagacgctcggaaagcattagccgtagcgagcgcaccaaccaacgcatcagattgcttctgcaggaatttgccaatcccgaatatgcgattgaggatgtgcgcccatattcgcccagtcagcaggagattctgaaaatctatgaagaaacagcattgaacaatggagaagacgtccccgacgacattcttctcattgctgacaatttgggcaactcatccaagagtgtcagcaagtccgacatgcagcgctaccgcctttggctcgaacagaagtacaagtcaccatatacgggccagactattccgctttccaaattgttcacaccttcctatgagatagagcatgtcattcctcagtctcgctatttcgacgattcgctttctaacaaggtcatctgcgaaagtgaggtcaacaaactgaaagaccgcatgttgggctacgagttcatattgaaggaaggcggacgtatcattgatggtaatcttggtggacagatcaaaattttcacgaagagccaatacgaagaatttgtcaagcagaactatgcccataacagaccgaaaatgcagaaactcttgatggaggatattcccgacaaattcattgaacgtcagctcaatgacagccgctacatagcccgtaagaccattgaaattctttccaaaatggttcgcgaagagaatgagacagaggctacatccaaaaatgtcattgccaccaatggcagcatcaccgacaggctgaagaaagactggggactcaacgacgtatggaatgacattgttgcccctcgctttgaacggctcaaccgaataaccggcaccaacgactatggtcagtgggtcaatcagtatggcaaacgctatttccaggccaatgttcccgtcggcatggcacaaggcttcagcaagaagcgcattgaccatcgccaccatgcaatggatgccatcgtcattgcttgtgccacccgcgaccatgtaaactatctcaacaacaaatcagccctgtcttcagaaagggaaacccgttatgacttgcagcacaaactgtgcgagaaagtgaagaccgatgcctatggcaactacgtttggcagttcagcaaaccatgggatggttttacgaaagatgccaaagaccaattgctttcagtcattgtaagcttcaagcaaaatctccgtgtcgttaccaagatgaccaatcgctactggcactacgttggtggacagaaggttctggagcaacagcaagcagccgacggctgggccattcgtaagtcactccataaggcaacggtgtctggagccgtcaggttgcaacaagtcaagaaagtccgtttggcggaagctctgaaagactggcatcacataaaggacaaaggtgtacgcaaggccatccagcaagttcttgacatgtacgggcactatgatgaaaagaccattttgcgctatttcaaggacaggaagtatctcgtagatggtaaggacatcagcagggtcgaggtctattatctccctgaaaaagccgacctgtcagccacacgcgtcacccttgacatcggttttgacaagaaaaaaatagaaaaagtgaccgacagtggcattcgcaccattcttctgagacacctgcaagaatacaacggtgatccaaaaattgctttcacacccgacggaatagccgagatgaaccgaaacatccggcggctcaacaatggccatgaccacaagcctattctgaaagttcgtgtggctgaggctttcggcatgaagttccccgtgggttatacaggcaacaaagccaagaagtttgttgaagcagacaagggaacaaatcttttctttgccatctatgctgatgccgatggaaacagaacataccggagcatcccgttcaatgaggctgtcgagcgaatgaaaaaccgcatgcccgtagctcctgttgaagacgaaaatggcaacaacttgctctttaccctttcgcctggcgacttggtatatatccctgaagaaggagaacacgttgatggaataaaagacctgagccgtatatataaaatggtgtcgtcgtcaggaaatcaatgtttctttattccagcctctttagctgcaccaattgttgatacaaaagaattaggagcaaacaataaagctgaaaaagcatggacaggtagaatgattaagcaatgttgtcttaaactatccgttgacaggttgggaaccattacaaaaatctattgagttatgattaaaaagactctctactttggtaatcccgcctatctttcattagccaacaaacagttggtcatcaaaattcctgaggtcgagaatgccgatgctctgcccgaaattataaaacataaatcagtacgaacgattccgatagaagacatcggaatcgtcgtactcgatcatcagcaaatcaccatcacccaggccctcatagctgcccttctcgataataatgctgctttcatcacttgcaacgacacgaggatgccaactggactgttgctcccactgcaaggtcataccgtctataacgagaggttcagaaatcagttggaagcctcacaaccactgagaaagcaactatggcagcagactataaaagcaaagattgaaaaccaagcagctgtacttcataaaaacaatttagatgttcgcgtcaccaatatgttgtcatgggcgcgcgatgtgagaagtggcgacccagacaactatgaggcacgtgctgcagtgttctattggaagaacattttcagagaccatcccgatttcatccgtacacaaaagggcgaagtacccaacaatctgctgaactacggctatgccattctccgtgcagtagtggcgcgtgcattagtcatgagtggtctgttacctttgctgggcattcaccaccataaccgctacaatccctattgtctggctgacgacatcatggaaccctatcgcccattcgttgaccaagcggtcatcgacacgatgagaaaaatgcccatccccgacgaacttaccactgatgtcaagcgtgaattgctgtccattcctgttttggatgtttggataaatgggaagcgcagtccactcatgctggctgtttctcaaacgacagccagtcttgcaaagtgcttcaatggagaattgaggaaaatatcctatcccgttgttacatgatcagtcgtttaaatgaataccgagttatgtgggttttagtcttttatgatttgccgacagaaactaaaaaggaaagaaaaatagctgcaaaatttcgtaaagacatcatgagcgatggcttcacaatgtttcagttttccatctatgttcgccattgtgcaagtatggacaatgcccaagtgcatataaaaagagtgaaatctttgctacctgagcatggaaacgttggaattctttgcatcactgataagcaatttgccgatatgcagattttctattgtaagaaagaagtgaaacctattgctccttaccaacaacttgaattgttttaaaagatggattttgcttcaaaacaaaatccatctttttttgtgacatgttttttctttttctgtttttctccgcaaatgtctcttgttcagcattttgagaagaacgagttgtttgtcaccttgcaaaggtacgaaaaatttagctaatcacaacttgtcgccgacgaactaaggtcggaaaggagttgtttgtcaccttgcaaaggtacgaaaaatttagctaatcacaacagccgaaggggtggggggcggaccgcgggggttgtttgtcaccttgcaaaggtacgaaaaatttagctaatcacaacagaccgcccgagacgtgtcgccaccgcttggttgtttgtcaccttgcaaaggtacgaaaaatttagctaatcacaacggaaatcagcacgttatcgggcttggccgtgttgtttgtcaccttgcaaaggtacgaaaaatttagctaatcacaaccataatcgtcgttatgatgatttctgtatgttgtttgtcaccttgcaaaggtacgaaaaatttagctaatcacaacacaacgtaaagagccgtgaagacatcgagcgttgtttgtcaccttgcaaaggtacgaaaaatttagctaatcacaacttatattgggtttgacatttgttctacttggttgtttgtcaccttgcaaaggtacgaaaaatttagctaatcacaacaacggctggcgggctctgccgagcaggccagttgtttgtcaccttgcaaaggtacgaaaaatttagctaatcacaacagcggtgtggcctcgttcatcagatcggtggttgtttgtcaccttgcaaaggtacgaaaaatttagctaatcacaacatagtaatccttattatgattacccagacgttgtttgtcaccttgcaaaggtacgaaaaatttagctaatcacaaccatgtgaagccttcacttcgtccatcgttggttgtttgtcaccttgcaaaggtacgaaaaatttagctaatcacaacgacttgagggtattcctgctactgagttgggttgtttgtcaccttgcaaaggtacgaaaaatttagctaatcacaacgatgcgcttctcacggcttcgtttcacgggttgtttgtcaccttgcaaaggtacgaaaaatttagctaatcacaacttacttacgagtgcaaagatataatttaagttgtttgtcaccttgcaaaggtacgaaaaatttagctaatcacaaccgtcgatgtcggcacttataacgctttctggttgtttgtcaccttgcaaaggtacgaaaaatttagctaatcacaacagatggtaatgagaatgaaacagaagttgagttgtttgtcaccttgcaaaggtacgaaaaatttagctaatcacaacattaaacatattatccacagtagaatgcgtgttgtttgtcaccttgcaaaggtacgaaaaatttagctaatcacaaccaatgtaattattaagtcagattggaatgagttgtttgtcaccttgcaaaggtacgaaaaatttagctaatcacaacgcaagttgccttttgcctgcttgccataggttgtttgtcaccttgcaaaggtacgaaaaatttagctaatcacaacgccgcttcaggtcttgccaccatgctgagcgttgtttgtcaccttgcaaaggtacgaaaaatttagctaatcacaacgggtttcgcttgcgctggacttcacgctccgttgtttgtcaccttgcaaaggtacgaaaaatttagctaatcacaactgcttcgggcgtttcttccgatacacggcggttgtttgtcaccttgcaaaggtacgaaaaatttagctaatcacaaccaagcggccttgcaataacatgaaaaataagttgtttgtcaccttgcaaaggtacgaaaaatttagctaatcacaacataagcagatgcgcctgtactggcccaaaagttgtttgtcaccttgcaaaggtacgaaaaatttagctaatcacaaccgtaacttcttgataatgttggctgtttggttgtttgtcaccttgcaaaggtacgaaaaatttagctaatcacaacttgtaactgcctaaactggcagatttgtttgttgtttgtcaccttgcaaaggtacgaaaaatttagctaatcacaacatgaaaactccacgcgccacacgtccgcacgttgtttgtcaccttgcaaaggtacgaaaaatttagctaatcacaacgatgtggtcaaaatgccgctctttcaacagttgtttgtcaccttgcaaaggtacgaaaaatttagctaatcacaactcaatatgtttcaatttcatgtttataaagttgtttgtcaccttgcaaaggtacgaaaaatttagctaatcacaacgggtgaagtgctcatccatgatgtccttcggttgtttgtcaccttgcaaaggtacgaaaaatttagctaatcacaaccaaggtgcttttgctgatgttgaagaaactgttgtttgtcaccttgcaaaggtacgaaaaatttagctaatcacaaccgccatgtctgccttaaccttataatagtgttgtttgtcaccttgcaaaggtacgaaaaatttagctaatcacaacatccattcctgaagtcctaccgcgtgttcagttgtttgtcaccttgcaaaggtacgaaaaatttagctaatcacaaccggcaagctccttctcaccgagatagggagttgtttgtcaccttgcaaaggtacgaaaaatttagctaatcacaaccactttgatagccttgcgccgaaagcgtgggttgtttgtcaccttgcaaaggtacgaaaaatagctaatcaaaaccgccccctaagaggtttattcgttgttgaaaggatgtttcataagggaaagcgggaaagctggaaaaaccaagaaagagcgaaatggttcttctctgttttttccggcttccccgcttttgttagatgtccgcgtagctacggcggtgtgcctacaggcgtttcagctgcacagtaaagtggcgcatgaggggggcttcccactcgatggccacgccacgagtgatgctttcgcggcggtcatagacgtttttcagtgcggcggcaatcactctgatgtggttgtcggtatagacgcggcgggcgatgcagaggcgcagcaggtcgagcccgccgaaacggttttcgcgtgtcacggggtcgcggtcggccagcatgtatcctatctcgcagccgcgtatgcctgcctcgagatagagctcgcaggtgagcgtctgtgcgggaaattcctctttgggcacatgggtgagcacacggtcggcgtccacgaagatggcgtggccgccagcggggcgctgatagggaatgccatactcatcgagcaggctggccagaaaagccacctgatggatgcgtgtgtgcagcatgtcgaactcggtgttctcgtccaggccctgtgccagggcgttcaggtcgcggccgctcatgccgccgtaggtgacgtagccctcaaatgggatgcagaacaacttggcgccttcgaaccactccttgttgttggtggcaatgaatccgcccatgttcaccagtccgtccttcttggccgacatggtcatcgcatccacgtgggagtacatctcgcgggtgatttccttgatggtcttgtctgcgtagccctcttcgcgcgtcttgatgaaatatgcgttttcggcaaagcgggccgagtccatcactacgggcactccgtatttgtggcacagctcgcaggtttcgcgtatgttcttcatgctgacgggctgtccgcccacggtgttgttggtcacggtgagcaccatgaagggcacgttgcctttgttctcggtcagcactcgctccagtttctccagtcccacgttgcctttgaagggcacttccagctgggtgttgtgtgcctcgtcgcaagtaacgtcgatggctttggcttttcggctctcgatgtggcctttggtggtgtcgaagtgggcgttgccgggtatcacttggccttccttcaccaagtaggagaacagcacgttctcggcggcgcgtccctgatgggtgggaatgacatacttcatgccaaacagccgctgcaccacggcctcgaatttatagaacgaggtggctccggcgtagctctcgtcgcccagcatcatctcggcccactgacggtcgctcatggctcctgtgcccgagtcggtcagacagtcgatgtaaacctgttctgctttcagttgaaacacgttgtagtgggcttctttgagccactgttcgcgctcctcgcgcgtacttttgcggatgggttcaaccatcttgattttccacgattctgcaaatggtaattccatagtaacttttactgtattacgcttgatgattaatctgattgttggggttaataaggtttggttgttttgtggattggccacggggcgcagccacagcacattgcacaatgttcaatgcgcaatggccactgttcaacgtctgattgttgaaaaatggtcaagttccttaatgttgatgtatctgttcgatacaataggttttgcgttcattatgtttttcgtagcgattgttttcagtgtgcaaaagtaatcatattttgcgaatcaagcaaaaaaaacaaagaaaaaaacaggcggatgagactttctcagcgtctctctgcctgttttctttgtcctggtagcctgaacgttctgataatctgaataatcagaatagtcagaataatctgaataatcagacgaattgtctgtttgtcttcttctctctgtcagggattcgatacgagcacgtatgcgttcgagcagctgaatcccgtgggcagcgcgaagtcgtaggtcgtctcgccgatggtgaccgtctggcttgcggcaaacgagcctgtggtggcggtgtaggcctgcgaacccgtggaaggaaccacgttcttgcctccgatgcccaccacggtggcgccgttgatggtaaacaggaagtccgtcttgaatgtcgtggccttgggggcggccacggccacatacacctttccacccgtgatgctgatgtttccgtccgacttcattccctgcggctttgcgtcgtaggtgctgtcatatttgtatcgttcgcccatggtgacgatggtggtttttccgccactgatggttacgttgcccgtagcgttgaggccgcgcccgccgttgccgtcgttggtgagcgtcagtgtgccgtcggtcatcacgaagttgccgtcggtcttcagtgccgacgaactcgacatgtcgctcagtgcggtgtcgaacaccgatgctccgctggccttggccgtcacggtgccgccgttgatggtgatgtggctttcggccttgatggccttgcccgtggtggaggcgccgttggcgtcaacgcccgtcgagtaggcgctgatggagccgttgttcaccaccatctggccgttcagctcgtgggtcgattttgcctttttgcccacgtcgatgccgtcgccctgcgacgtgatgttgatggtgccgccgtccatctggaaaaactcgttcacgtgcatgccgtcgttcactgcgccggtgatgttcatcgttccgccctgcatcagggtgtattcgtctgagcagtaggcgtggcgcgccgtcccgctgagggtgagctgtccgtcaccgctgatgatggcgtgtccgttgatgtagaggcaggccggctgagtgccttcggcgccgtcggccagcaggctgttgcccaccagggtgaactctatctgcttgccgtcctcaatgcgtatggccgcgctgtcagggctggccagggtcaggttgtcgatcaccaccttggcgttggcttccccgtccatgtagaacgagccctgctggctgttgcccgtcagggtgtaggtgatggggtcggtgatattgctgttggctaggatgcgcacgttggctcccttgatggtgatggagaggtcggctgccaaattgccagccaccagcaccttggcctcgccgccgtcgaaactaacgttcaccgtgttgtccgcaacgttctgttcgtcgtcaacggtgatgctgctgatgtcgttgatgttgtaggtgcgccccaagatggtgagtgtctcgccggcgtcgaaggtcatctcgcccacttgggccttggcgtaggcgaacgaaatgttgcccgtgttcacgcttacggtttgtccgacggcctggcctgccagacaaaagctggccgcaagggcgcagcaaatgtttgagatgcgtttcatggtactagaactttcttcgtttcgccattcttcgttttcaccacatagacgcccttgggcagttggccgccgggctgcctcgttgcttgtccgttcagcagttgtccctgcaggttatagacggccgtgctgctgccagttgtcgcgccgtcgtcaatcgacttgatggccgtcgaggtagccgagaagtacatcgacttcagctcgctgagcaccagtgtgaccacttcgccctcggcgggcgttgctatgagttggccgtccttgaaggtgatggtcagtccgttggacagcacttcggttttctcgccggttgttttctcaaagtgcagatagcccagttcgtcggctcgcatttcgctcagggtcatgcctgccaccaaggcgacagccgccatgccccctctcttcagataattgtttcgcattgtttttggcattgtgttgtttcagttttttgtttgctcgcttggcgagaaactatttcagcacatctttaatcttcttgatgatgctgctctcctgcagactttccatgctctcgcgcaggaactctccggcgcgttcgccctgttccttcacaaactcctgagcctgctgggtggtttcgctgctgcgcaactgctccacggtgtcggtgattttttctttcatggccttcaccgtttcgttctggctgatgttgttcagcacttcctcggcagtttccttcagttcttcggctgccttcttcacattctccttgacatcgcccatggggtcggctgtctgttggtttttgttctctttttccatgtttatgttggtttttgggttagttgtctgtttctttggggtgtcatttcagtagtttccaaatcttgttctcgtcagcctgcgggagcagtgccttcaggtgcgcctgcatccgcccgagcgactcctccggcgagcggtcgcacaggcaggcctcgcggccgtagagctgttcgggtgtggtgagcagcgaccatccccagccatattcgcggttgtgcttgtccagcggatagacaaagttctcggtcacgatgcggcaccccatttgcaaacgggtgatgtaagcgtcaaacttgccccgcatcttcggtccgctgaatccgcaggccgcccgcagctcgcgggtgatgagactgccgctctcgctcagagtggccaggatggcttcttctatggagccttcgctcggggtggggtaggcccatcggcggtagttgcagaagtcgggccaccagtccatgctgacgaaacccgccttgtggtcgaagaacttgccatagacgcaatggccctcgctcacgatggtgcctttccatttccacagaggccattcccatccgccgtcgggcagcaccgtgtatcggcagtcgtccgtcaccacatcgtcggccgaaaatccctcgatgccgctatagagcagcggcaggaatccccattcggctatcagctccatcagttgcgcgtcggtatagattcctctctttctcatagccttcactccttcgctccgagagtctccttcaactccttgacaaccctgcacggattgcccacggccaccgagttcgagggaatgtccttggtcaccaccgaaccggcaccgatggtcacgttgtcgccaatggtcacaccgggcagaatggtcacgctgccgccaatccacacgctgttgccgatggttacgggcagtgcccactcccggcgcgtgttgcgttccgtggggtcagtgctgtggcaggccgtgtagatgctcacattgggccccacgaaacagtcgtcgccgatggtgacaaacgcctcgtcgagcacggtgaagttgaagttggcgaaaaaacgtttgccaaccctgatgtgcttgccatagtcacagtagaacggttggttgatgaacacccggtcgtcgcctgtgctgcccaacagcgatttcaacatcagcagccgtttctcggtttccgacggtctgagttggttgtattcgtgaatgatgtccttcacggcgttcagctcctccagcagttgcgggtcaacagccgaataaatttcgccagccagcatcttctctttctcggtcatggttcgttgtcgttattgtggacttttttttcttcttgcatttgccttctataataactaaaagaaagctattcatctgttttgcagtaggaggtgacgtgtcccacgtcacgatccttgaatttgtgacgtgagacacgtcacctcctatttggacactgcaaagatactgcaaatgcaacaaacaacaaaggaactcgggcgaaaactgaggggcttttctgtaaatttggtaaataaaacctcaaaatgtataggtggcaagccacggaatcttcgtaattttgcacacatcatttattaaagtcaaacaacaatgaaaaccataaaactgacaatggcacttgtcgccctcatggt

SEQ ID NO: 471 - DNA, 24452 bp, synthetic construct
  source 1..24452: mol_type = other DNA
  misc_feature 1..24452: note = Synthetic
ccttctcaccgacgaactcagagacaccgtttccggactgccacagcccgagccatcattcgacatcatcatcgccacacccggcaacaaaacgccatggcagcagctgtcccgcagcattgttcaagtgaaattcaacaaggactccactcgcacccacatctcaatagcccgtgatgtctacgccaagccgcagatagtcctcaccgtcacctctaaatcgccggagcagttcagcagctatatgcattcacatccaggtcagatccgcaagattctcaacgcctttgagctttcttgcgctatccgtagccttaagtccacccacaacccacaagccgaaaagactatccacgacatgttcggcatcgacattctcatccccgccgacctcacagccagcaagcgtggtcgtgacttcatctggctatccaacaacaccaacgagggtcttgagaacatctgcgtttatcgggttaaagctggcaaaggcaacaaagatataggcataatttccaatgatgctcagttcttccgccacgttcgcgacagcgtaatgaaaatcaacattcccggcgagcgttccggcatgtacatggaaacagcctcaacacccatcacccaacacccatcacccgagatgcgtggcctttgggacatgcgtggagacgctatgggcggtcctttcatcgcccgctgcatcaccgctccaccctacattatatatatagagggcttcgtttacgcccccgaatcgaagaagcgcaacaagctccgccgactggaagcgagcatcctaacgggaaaggtaaaaaggtaaaaaagtaaaaaggtaaaaaggtaaaaacacgccattagcaactctgcaatgcaagtgctatttatacattataatttattatttatacattaaaaataagatggaaaatagaaaaatacgcgtggcaataacacaaggcgacaccaacggcataggttacgaactcattttcagggctttcgcaggcactgagattctcgacctctgcacacctattatatatggttcgccaaagatcgccacatatcatgacaacgctctcgacctcaactccaagttcactatcatcaacgatgccagtgaggctcgtgacggacgggttaacctgctcaccgttttcgacgacgacgttaaggtagaactcggaacgcctaccgaggagtcgggcaacgcagggctccgtgccatcgaccgtgccctcgccgactatcagcagggactcttcgacgtgctcgtcacagcgcctatcgacaacaacgacgcattccacttcagcggtcagagccgatacatcgaggatcatatcgagtgcgacggtcagggtctttccattctcaccagcgatgacctgcgcgtggctctcgtcacccgcaacctgccgctccatcaggttgccgagagtataacgaaggagaatatcgaggctactgcaaagaagttctacgagagtctgcgccgtgacttccgcatctccaaccctcgcatcgccgtgctgtccatcaacccgaaggctggcgacaacggactgcttggcaacgaggagcaggagattatccgtcctgccatcgaggagctagccaaggaggacatcgaggctttcggaccgtacgctaccgaccgtctcttcggtaccggcgactacgattatttcgatggaatccttgccatgtactacgaccagggactggctccgttccgtgccatagctccggattcaggcgtgaactacaccgccggactgcctatcgtccgcactgcccccgaggttggcgcatcgttcgacattgccggtcgcaacgaggctgacgctactccaatgctccacgccatctatctcgccatcgacattttccgtcatcgcaaggagtacgacgaggctggcactaatcctctgccaaagctctaccacgaaaagaaggacgacagcgacaaggtgcgctatgccattcctaagaagcgtgaggaccgcattccgcatcgacacgattacaaggcaccagagaattcttaggagtattttaggggagttaaaagggagttattcgcttcgcgaagggagttagagggacaaatgttctgtaaaaagaactatactctctcaaacttcataatccacttaatccacaaaactattgtccctctaactcccccttaactcccctctaactcccgttaactcccctaaaatcagaagaagacatgaagaaaaagtaccagaacctattcttccttttcgggctcgccgtcctcatcgtgatggtcactcaacttgacttcaagcaggtgtggcagggtatcagccatgccggctactggttctttgcggtagtcgttctctggttcttcctctacatgttcaacactgcggcgtggtatataatcattaagaataccgggaaaatccaaaattcaaaatccaaaattcaaaattatgattacccatctgctaaatccccatctaatttaggtaaatcgggatctcaatctaacttaagtaatcaaaagcctccccttgggggaggtttggtggggactccgactagtggcgttcctttccactggctctacaagatcaccgtctccggtttcgccctcaactacgccactcccggcggactgatgggtggtgagccctaccgtatcatggcactggctccgaagattggcacagagcgggcgtcatcatcggtcatactctatgccatgacccacatcttcagtcatttttggttctggctgatttgctccgtgctatacattatcttccgaccaatgagcgtatttatgtggatagtcctcagtatagtaataggcttttgtctacttgccatttggtttttcatgaaaggttatcgccgtggactcgccgtcagcggaatgcggttgataagtcatattcccggactccgccgccgtgcctcacggttcatcgacagccatcgcgcccagctcgacactatcgaccatcagattgcctcgctgcataatcagaacccacggacattcatcagcgtcgtcttgctggagctcacctgccgtttcgcctcggctctggaagtattcttctgtctgctcgtcctatatccgtcggtcaactaccttaattgtatttttattgttgccttcaccacccttttcgccaacatgctcttcttcatgcctctgcagctcggtggtcgtgaaggcgggtttctcatgtccaccaccgggctcggtctcccgtccagtgccggcatcttcgttgccctcatcgtccgcatccgcgaactcatctggaccgccatcggactgcttttaataaaattggagaaaaggggtaaatagtaaaatacaggttatttgtgctctattcagttttctatctttatgcctttgatgttcttgaagtccttgatattgtccgttaccattatcaacttgttcgcaacggcagtactatttccgatattcggcaacgacttggtccaaccttcgacaacatataggaaacatcattgtttccacgtaatatttcaatacatatatttgtatccaataaatatttactcataagaataacttttcataatccttatccgtatcactcattatctcttccagttctttagctgacgggaaataatcatctttcattattccgaaaacaccatcccaagaatctgttttagccttggaaaccttcttcttttactttaccatagaagaactgagcttcgaaatcagagtcaacttcatttcgtcgtccaattttttatctcattccaaaaactttcaagaactgacggattatttattgctgtttccataattattctctttatcaacgccacaacgatactcactaattttcaaactaacaaaaaaagtctgccaattttgcagttatatcaaataaaatgtgtaattttgtcagctaaataaaaagagaagattggatgaaaggatgattggatgataatccatctcatcacgtcatctcatcatcctgtcatcccatcatcaaaatatgaacacatctgaacttcagcgcataaagcaacgttacaatattgtaggaaacagcgaaggactcaaccacgctctcgacgtagccctgcaggtcgcaccaaccgacctcagcgtactcattgtcggtgagagcggtgtgggtaaggaaatctttccacgggtcatccacgacaattcaccccgtcgccgtgagaagtatttcgccatcaactgcggttctatcccagagggaactatcgacagcgagctcttcggtcacgagaaaggtgcctacaccggcgcaatcggcgagagcgagggctacttcggtgtcgccaacaaaggaacaattttcctcgatgaggttggtgagctgccgctggctacccaggctcgtttgctccgtgtcctcgaaactggcgagtacatccgtgtcggcggtcaggaaatccgcaagaccgatgtccgcatcgtcgctgccaccaatgtcaacatgcgtaaggctgtcagcgagggtaagttccgtgaggacctatattatcgtctgaacaccattcctattcagattccgcctcttcgcgaccgtggcgacgacatcatcctcttgttccgcctcttcgccatgcagatggctgagaagtaccgcctgccgaagatcactctcaccgatgatgccaagcagatgatgcttaagtacaagtggccgggcaatgtccgccagcttaagaacatcaccgagcagatgtcagtcctcagcgagaagcgtgaaatagatgccgagactctcagcaagttcattccgcaggacggggaaagcaccgaacttgccacaatccagaacaatggcggtcgtcacagctatgagtcggagcgcgaaatactatataaaatattgtatgagctccgtggcaatgtcgccgaccttcgtcgtgacctcaacactgtccgcaagcagctcaatgaagctcgccgactggaaggtgtcgccgggttcgagcgtctgccgcaaggcgatggcaactatcctgcccctctctccgacgaatataacaattcatcatcatccaacaatcaacgctcaacacccaaccaggtcgaggacgccgttgccgaggaaatttcggagccggaaagcctcaacctcaacgacctcggtcgtcagatggttgagaaagcccttgagcgcaacaacggcaaccgcaagaaggcggctcaggagctcggtatcagcgaccgcaccctctaccgccgcatcaaacagtacggactggagaagtgaagaatgaagaacgaagagttaagaatccatttctccgccgtctcctcagcccattaagcccatcaggtctatcaagcctacaaagcccatcatgcccactatgcccataatcatcacccatcatctccatcgcctcacagcattcgtctcggttctctgccttgccttgctcgtctcctgctccgtcagctacaagctcaacggtgccagcatcgactataccaagacaaagaccattcagatagccgacttccccaaccgtgccgcttacgtctggggtcctatggctccgacattcaacaacgccctcaaggacgagtttgccagccacaccaaactccagcaggtaaagcgtaacggcgacctgaagatcgaaggtgagataacatcctacacccagcgaaacaagagcgtgtcagcagaaggttacgcagcccagaccgagctggccatgaccgtcaacgtacgcttcactaatacaaaggaccacacgcaggactttgaacggcagttcactgccacccagtcatacgagaccactcagagtctcgcatccgtccagcaagacctcgtccagcaaatgattgacgacctcgtcgaccaaatcttcaacgccaccgtagccaactggtaatcaacacagtagccaactggtaatcaacacagtagccaactggtaatcccgttgtgtacgccgttgctttgcaacggcctcaattaatataacaatgaaccttcagcaatatattcaacatccggaacaactagaccgtggaaccctctatgaactcagggctctcactgcccagtacccctattatcagccagcccgactattgttgctgaagaacctctatcttctccacgactccacattcgacgaggaactccgccgtgccgccatgtacattgccgaccgccgcaagctattcgacctcgttgaagccgcccactaccagctccgtcagaagaaggcgtcaggcgatgaaatactggctgataatggcaaccccactaaacagccaacctcacaaccatcaactctcaaccctcacccctcaactcccgacaaggaccgcaccaccaaactcatcgacgacttcctcgaccagataccacaagaggaagacagttcatcatccgatgccaagcagccagcaccccaccgcaagcctaccgttgccgatgccacaggcgactacatggcttatctcgtggcaatggagagcgaggaagagaaggaagaagaggaaaagaactcaccgcagatgaaggggcaggacctcatcgacgacttcctcaacaacgacgatggaaagatggagctcaaggatgaacccgaatacgaacctgaaatcgaagaagaggaaaatgataacgattcaggctactttaccgagactttagcacgaatttacataaaacaaggcagatattccaaggctttggaaataattcggcgtttaaatttgatttatccaaaaaaaagtcgttactttgcagaccaaatccgttttttggaaaaattgataataaacgataacaaaacaaaagatcaaaactgataataaaataataaaaaacaaagaataaaaaatgtacacactatttgtaattcttattgtcatcgcctcgctccttatgattggcattgtactcatccaggagtcaaagggcggcggtctggcatcaaacttctcatcttcaaaccagattatgggtgtccgcaagaccaccgacttcattgagaaggcaacatggggtctcgcaatcgttatggttgtttgcagcatcgtctgcgctcatgtagctccaaagtcaaccgctgacgagagtgtcatcgagaagacagccggcgacagcaacaccaatcctaacacactgcctaacttcggtgctagccagcagcagaagcagaacgcagctcagggtgctcagcaaggcgcagctcaaggtgcacagggtgctcagcaaagtgctgctcaaggcgcaaagacagctgctccagcagctccgggagcacaacagccagcagctccgacaccagcaaaataaagaaatttagaaaaaagtacggaatttgtttgcacaacacgaataaattccgtacctttgcactcgctttacggaactgactcagtttcaagactaagtcacaataccgtctagcaagacatggtgggcgtagttcagttggttagagcgtcagattgtggttctgaatgtcgtgggttcgagtcccaccccccaccctctcaattaaagcaagcttcgtaaccaataaggtttcggagctttttttgtatcaagaggtttctcttatacagaaagaattgaacaaagggaacaatattttataataaaaggaacattcttccgtttagtacatataaaggtaaaaactaacaactcatatacagagtaactcataaactagaaaaaacataaacttagaatattatgtgcggaattgttggctatattggaagtcgtaacgcttacgacattcttattaaggggctccaccgtctggagtaccgcggctacgactcagcaggagtagcacttataaacacagacgacaagttgaacgtctacaaggcaaaaggcaaggtcgccgaccttgagaatgccgcaaagaatcaagatcttactggaactatcggtattgctcacacccgttgggctacccacggagagccttctgttcgtaacgctcaccctcatgtttccgagaatggcgacattgccatcgtccataacggaatcatcgagaactatgccgagctccgcgaacagctcaaggaaaagggttaccacttcaagagcgacaccgatactgaggttctcgtacagctcatcgagtatgctatggacaagcatcacactgacctcacccagtcagtttgccacgcacttcgcaagtgtgttggagcttacgccatcgcagtcatcgaccgccgcaaccctaatcagattgttgcagcacgcaagggttctccaatggttatcggcgtcggcaaagacaactccgaattcttcgttgcctctgacgcttcaccaatcgtcgagtacacaaagaatgtcgtttatgtcgacgacgagcaggtcgttaccgccgagattggcaagcctctgcagatttggaacctcgacaagacccgtgccaacgtcaagattgacgaggtcgacatggacatcgatatgctctcaaagggtggtttcccacacttcatgcttaaggaaatcttcgaccagccgaaggttctccgcgattgtatgcgtggccgtctgttcgctaagacatctgacgagcagaagcgttcggggcgcaacaactacgtcgacgccaacggcatcgttctctcagctgtcaagaacaacaaagaccgcttgatgagtgctactcgtttcatcatcgttgcctgcggaaccagttggcatgcaggacttatcggcaagcagctcatcgagcagtactgccagatacctgtagaagtcgactacgccagtgagttccgttatcgcaatccaatcatctaccctaccgatgtcgtcatcgccatcagtcagagtggtgagactgccgatacccttgcagccatcgagctcgccaagtcgaagggtgcctgcatcttcggtattgtcaatgccgttggttcaagtatcgcccgtcagaccgatacaggtatctatatccacgtcggacctgagattggtgtcgcttctacaaaggcgttcacaggtcagctcacatgtcttacccttctggctctatgtctcggacattgtaagggtactatcagccaggaagaatacgacgcaatgattcaggagctcgccgtcatccctgataagattgagcaggttctgaaactcaacgaccgcattcagaccatcagccgcacctacacctacgccaccaacttcctctatcttggtcgtggttggaactatccggttgccctcgagggagccctcaagctaaaggaaatcagctatattcatgccgaaggttatcctgccgccgagatgaagcacggtcctattgcccttgtcgacgaccacatgcctgttctcttcgtggctactcaccacaagcagtatcagaagatcgtgtcgaacatggaggaggtcaaggctcgtggcggtcacatcatcgccattatcaccgaaggcgataccgagattccgaagattgccaacgagtgcatcgaggttccacacacccttgccccacttgctccgctgctcaccgtcatcccattgcagctcctcgcttaccatgtagccgtctgcaagggtctcaacgtcgaccagcctcgcaaccttgccaagagcgtaacagtagaataatccacatttagaatacatttccaaataacaggaaacaagacatcgaagcccccgttcatcaagttgattgatggacgggggctttgtcgtttatataccctatataaagaaaaagggtgagtcaccccacccgtaaagttttcacaacggaataatccttattgtgattagctaaaaaatatgtggcaaagataacctaaatatctgaaagacacaaataaatcattcacttttttgtaaaatacaatatttttactatttttgcatcatcattaattgtgtggaaacagtagaatcccacacatatacttaacaataaacccacaaacctaaataatatgagcaacattcttggactggacttaggaacaaacagcatcggctgggctgtcgttgataacgagcagaaaactattgtcaatgccggcagtcgaattattccgatggacgaagcaacacttgggcaatacgaaacaggcaaccttaagtcacaagcatcagtaaggactgacttccgcagcattcgccgactttatgagcgtgccaaattaaggcgcgagcggcttttgcgtgtactccatgtcatgggtttcctgccagaacatttcgataaccaaatagactttatcaatcatcttggacaattcaagagtcatagcgagccattgcttccatacaggaagaatgctgacggaaggaacgaattcattttcaacgattccttccgggaaatggttgatgaattcaacagcattcacagtaacgacaaattcacgggcaagcgcatcccgtacgattggacaatctattatctgcgacacaaagctctttccatgcccatccgtcgggaagagcttgcatggataattctgcaattcaacaccaagcgaggctattatcaattgagaggcgaagaggaagaaaccaagacttcaaagaacgagacctatgaaattcttaccgtcaagaatgtggaaaagttgaatgccgacagcaagcgccgcggaatattctggtatgagataacctacaataatggaatatcacagcgcaaatcaggtcccgttgcaccacgtaagattggcgatcaggttgaactcatcgtgacaacaacccttgacaagaacggcaatgtggcaaaggacaaagaaggcaatccaaagataaagttgcgtgatccaaagcccgacgactggactctgatgaagaaacgtaccgaaagagccatatctgacagcgggactactgttggcgactatatctacaattacttgatgaatcaccccgaagcaaaaatccgggggaagcaggtacgcaccatagagagaaagtactacaaggacgaactaaagaagattctggacaagcaggcagaattaatccctgagctaaaagacaatagtcttctggagaagtgtgtgcttgaactttatcgaaataatgaggctcatgtagcttccttacaaggcaagactttcaccgactttatcgtcgatgacataatcttctatcagcgaccattgaagagcaagaagagccttatagccaattgcccgttcgaggaatattgctggattgacaagtcgaccggcgagattcatcacgagccaataaaggtcatccctaagtctcatcctctttatcaggaattccgcattcgtcaattcttacagaatctgaaggtaatcaggaaagaaaaagaaatcgatggcaaactcaagactgacgttgacgtaacctgcgactatctcaaggatgataacgattggcaaaagctctacaattacctgtcctcaattcctagcattgacaacaagaaattctgcaaatatcttggactcagcgacaacgactacagatggaattatgtaactaacgacaagtcatacccatgtgccgagactcactgccttattaatatcaatggtgatttaaacaaaagtcaggagacagaactttggcacataatgtattctgtcagtgacccgatagagctgcggaaagctcttaccacattcgccgacaagaacggattggacgagcacgactttatagagagccacattcacatcaagccattcgacagcgacttcggagcattctcagagaaagcgcttaagaagatactcccattaatgcgccgaggcatagattggcatgaggaagatcttccatgtcaggctcgcgaacgcattcatgacattatcaatggtaatgttgacgagaaaattcgcaagcagattgtcaagagtggattagttcttaacaccatcgccgacttcaacaatctgcctttatggtttgctgaatatcttgtttacgggcagaaggacgacatcacagtatggaacacccctgacgacattgacaaatacttgcaatctgaattcaggcagcacagccttcgcaatcctattgtagagactgttctatccgaaacgcttcgtgtcgtccgagacatttggaaagcttatggcaagcctgacgagatacatattgaaatgggacgcgacctcaagcagcccaaggacaagcgtgcccgtgccacgcaacgtattctggaaaacgagcgtacgaacctacgcatccgccagttgctgcaagagtttgccgaagacagcgatgtcgagaatgtccgtcctaactcaccatcacagatggaactctttaagattttcgaaaacgatgtcctcaaccaatacgaccgtgtcgccgaccctgataacattatggacattgtcgattcgcttgccaacccgaccaaacatgtcagccacaacgatattgtaagatataaatgctggcttgaacaacgctatcagtcgccttataccggcgacattatcccattgtcaaggctgttcaccaccgactacgaaatagagcacgtcataccacagtcccgctatttcgatgattcacttaacaacaaagtaatctgtgagagcggcattaataaacttaaaggcaacaggctgggttatgagttcatcttcaaggagcacggacatattgtcgacggtcacaaagtattcgagaaagaggcttacgaacagttcgtcaaggaccactactccaataatccacgcaaggcacgcattctgctattagaggatattccggacagttttatccggcgacagctcaatgacagtcgctacatagcccggcaaacaactagcatactgtcagctgcagtccgttctaccgatgacaaaggacatgttgcagccaacgaccgtggcagtgtttcggtgaacattatagcaaccaatggctctatcaccgaccgacttaagaaggaatggggaataacgcagatatggaaccatatcattgcgccaaggtttatccgtcttaatgagaagacccattctgagcagttcggcaagtgggtagagaagaatggcgaacgatatttccaaataaacatacctttagaaatatccagcggtttctcgaagaagcgtatcgaccatcgccaccatgctatggatgctatagttatagcctgcacgacacgaagccacatcaactacctcaacaactcaacggctgcagccagccggaaagacgagcgccatgaccttcgcaacaagctttgcttcaaagacaaaaccgatagtaacggtaattattcctggcggttcatcaagccatggactacatttaccgaagacaccaaggcggctctagactctattatagtcagtttcaagcagaatctacgggttatcaataagacatctaatttctactggcattatgagaatggcaagaaagtactgaaaaagcaaaccaaaggcgacggatgggcactgcggaaatctctccacaaagccacagtctctggagctgtaaggctgcaatctcaaaagacagtaaggctcaaggacgcccttgccaactggcatctgatagtcgacaagaccataagagccggcatcaagcatgtcataaaagacatctatcatggcaagattgaccagaagactctgctaaagtattttaaggacagagactataaacttgatggtaaagacatatccaaactcaacatctggtttactcctgccgtgcctgaagccaccgcctctcgcactaaactcaatgagacattcgacaagaagaacattgagaagataacggacagcggaatccggaagattcttcttcgtcacctagagaactgcggagggaatccaaaagttgcattcagcccagatggtatagccatgatgaacgataacatcaagagcctcaacaatggcaaagaccataagcctatactgtcggtaagaaagtatgatgccataggaaataaattcagaattggagaatatggctcaaaatcaaaaggatacgttgttgctgacaagggaacgaacattttctttgcaatatacaatagcaacaaagggattcgaacctatgagtcaataccatacaatgtagaagtagaacgacaaaagcagggattaccgatcgctcccgaggaaaactcaaaaggagacaaattactattcgtactatctcccggcgatttagtttacatgccaaacgaaaacgagcatgttgacaagaatctcgataaaggaagaatatggaaattcgtgtccacatcactaggacgagcacaattcgttcctgaaagattagccgttcctattgccgacaatatggagtatgcaaagaataagacagaatttgacgactaccatcgaagcatcaaggcattctgtcgtaagatcatagttgaccgacttggacgaataactaaaatagaatagcctatgattaagaagactctttatttcggcaatccagcctatctgtcattgcgcaacgggcagcttgttatccgcttgcctgaagttgagaagtcaaacctaacagaacaattgaaggcggcaaatgtccgcacattccctatcgaggatttgggagtagtagtgctcgacaacaagcagataaccataacgcaaggtctgcttgaagcactactagccaacaactccgcagtggttacttgtgatagtaaacgcatgccgacagggctgttgcttcccttatcaggcaacactctacatcaagagcgtttccgtaaccaaatagagagttccctgcctttacgcaaacagctatggcagcagacagtacgagcaaagattcttaaccaggctttctgcctacaaaagaacactccaaaatcaaacgcctcacttcatgtcctggcaaacaacgtgaaaagtggcgacccggaaaactgcgaggctcaggcagctgtctactattggaggaacatcttcacgaagctaccttcattccaacgtgaccctgaaggcgatgttcctaacaatctattgaactatggatacgccattctcagggcaactatagccagagcactagttggaagtggactactaccggtttatggtattcatcatcacaaccgctacaatgcattctgccttgccgatgatattatggagccataccgcccattcgtcgacgatctcgttatcaagacgatggataagatgacgatacccgaggaacttaccattaagcagaagcgagagatgcttactattcccgtccttgatgtaatactcgatggtcagcgacgtccacttatgattgcagcaggactaacggctgcaagtcttgcaaagtgcttcaatggcgaaataaggaagatttcttatcctgaatttccatgaattaccgactaaaccaatatagagttatgtggatactcgtaatgttcgacttacccactgagacaaagaaggaacgaaaggctgcagcaaagttccgcaaaaacattatggctgatggatttaccatgttccagttctctatctatgtcaggaactgcgccagttttgaaaacgccaaggttcacatcaaaagggttcaatcgctattacccgaatatggtcacgttggtataatgtgcatcactgacaagcagtttgccgacataaagattttcaactgccgaaaatccatcgagccaagagccccataccaacaacttgaactattctaactaaaaaggagattctacttataaagcggaatctccttttttgcatatccattttttattttctaatttcgcatctaacgtcttatcttccaacctcttaccctattcctgatgtatatgcggttgcaaagatacgaattttttagctaatcacaacggagggtctatagtagtgtttttatagatgatgtatatgcggttgcaaagatacgaattttttagctaatcacaacgacaaagtattcgtacacgtctgagtattggatgtatatgcggttgcaaagatacgaattttttagctaatcacaactgacgcttcacagggattattaatattgcgatgtatatgcggttgcaaagatacgaattttttagctaatcacaacgcgacaaaatactcgtacacgtctgagtatgatgtatatgcggttgcaaagatacgaattttttagctaatcacaaccaaaaggcactccacaataccgactttatgatgtatatgcggttgcaaagatacgaattttttagctaatcacaaccgccaaactgattgtgacgaggttatcgaagatgtatatgcggttgcaaagatacgaattttttagctaatcacaacgataaggaggcggtcaatcattggctatctgatgtatatgcggttgcaaagatacgaattttttagctaatcacaactgcataaatcattccttcctcaaagaggtagatgtatatgcggttgcaaagatacgaattttttagctaatcacaaccgtcagcgagagtccttcgctgttggcacagatgtatatgcggttgcaaagatacgaattttttagctaatcacaactgtgaatgttgtagctgtcataacttttaagatgtatatgcggttgcaaagatacgaattttttagctaatcacaacacatcaaccgtcatatcaacggtctcaaaggatgtatatgcggttgcaaagatacgaattttttagctaatcacaacggggggcggtagccccctccactcaacgaagatgtatatgcggttgcaaagatacgaattttttagctaatcacaacatggtcgtatccttatagattgcacgatacgatgtatatgcggttgcaaagatacgaattttttagctaatcacaacgaggcatcggtgccgtatttttatgggcacgatgtatatgcggttgcaaagatacgaattttttagctaatcacaacacggaaaggattattccatcattaattacggatgtatatgcggttgcaaagatacgaattttttagctaatcacaactacagggaaaaatctcccttcattacggtgatgtatatgcggttgcaaagatacgaattttttagctaatcacaacaatatggaccattttaaccccccaaatgtgatgtatatgcggttgcaaagatacgaattttttagctaatcacaaccgctttcggagtgcatcctaacctcgtcgggatgtatatgcggttgcaaagatacgaattttttagctaatcacaacgagcgcaacgctgatatattgttacaatacgatgtatatgcggttgcaaagatacgaattttttagctaatcacaactaagaggacatccatacatcggctctgcctgatgtatatgcggttgcaaagatacgaattttttagctaatcacaacggcatagccgaaacggcttgcctgtctaagatgtatatgcggttgcaaagatacgaattttttagctaatcacaacatggaacgtcattcgtggtcaagggttcaggatgtatatgcggttgcaaagatacgaattttttagctaatcacaacatgagtgatgcatatacttataataatcaggatgtatatgcggttgcaaagatacgaattttttagctaatcacaacacacctgagtcaatattgaacgtccggcagatgtatatgcggttgcaaagatacgaattttttagctaatcacaacctgttatggctgctgatgctgccgacaaaagatgtatatgcggttgcaaagatacgaattttttagctaatcacaacagttcctgcatgatggcgagtgcgtcatccgatgtatatgcggttgcaaagatacgaattttttagctaatcacaacgacgaacaagtaggtttcatcaaagaacaggatgtatatgcggttgcaaagatacgaattttttagctaatcacaacagtaactgtaggaatgttgtcatcgttagagatgtatatgcggttgcaaagatacgaattttttagctaatcacaacgattattggcagagccgaaaaggattttaagatgtatatgcggttgcaaagatacgaattttttagctaatcacaacgatactgctcgtaatcagaaattgatttctgatgtatatgcggttgcaaagatacgaattttttagctaatcacaactaaagggagaaatctcccttcatgattgttgatgtatatgcggttgcaaagatacgaattttttagctaatcacaacaacatgcgaggaataatgttattaaaaactgatgtatatgcggttgcaaagatacgaattttttagctaatcacaaccgggctggcgatagcctgcccgccatacgcgatgtatatgcggttgcaaagatacgaattttttagctaatcacaaccggtaataaagcgggtggagcttgatgccgatgtatatgcggttgcaaagatacgaattttttagctaatcacaacaattccccatctatagtcaacgataacaagatgtatatgcggttgcaaagatacgaattttttagctaatcacaactgcaacaactatctgaacttctgtttgttggatgtatatgcggttgcaaagatacgaattttttagctaatcacaacatacgcgaatttgaaaaaatgctgcaccgcgatgtatatgcggttgcaaagatacgaattttttagctaatcacaactaacctatgcaagtaatgccgagttagtggatgtatatgcggttgcaaagatacgaattttttagctaatcacaacatagtagtgttcttgtatatggcacggtacgatgtatatgcggttgcaaagatacgaattttttagctaatcacaacaatctatcgaaaaacatatgcaattaaatggatgtatatgcggttgcaaagatacgaattttttagctaatcacaacgctgatgactgtctgatggctttcgataacgatgtatatgcggttgcaaagatacgaattttttagctaatcacaactccactaacaaaataagaatcaaaaaaacggatgtatatgcggttgcaaagatacgaattttttagctaatcacaacgcgagggggcgtggtctgcggtcttacgcgatgtatatgcggttgcaaagatacgaattttttagctaatcacaacaatggaatgcgtattacgaaagtttggcagcggttgcaaagatacgaattttttagctaatcacaacacagaagacaacttattgcctacaatggtgatgtatatgcggttgcaaagatacgaattttttagctaatcacaacttaaacgcaaactgcaaaccaccattaacagatgtatatgcggttgcaaagatacgaattttttagctaatcacaacctcctgagttacaaggaaagcaatgtcacgatgtatatgcggttgcaaagatacgaattttttagctaatcacaacttgtagatggcacggtactctatcccgctgatgtatatgcggttgcaaagatacgaattttttagctaatcacaactcaatggatacagactccctacctttactgatgtatatgcggttgcaaagatacgaattttttagctaatcacaacttcccttgtgaactcattgtttcttccttgatgtatatgcggttgcaaagatacgaattttttagctaatcacaacttttaaatctgttgacatacatctttccgggatgtatatgcggttgcaaagatacgaattttttagctaatcacaacttatgggtgatgcttatcagtataataatgatgtatatgcggttgcaaagatacgaattttttagctaatcacaactgcagtatggtaaatggaatgatactatgtgatgtatatgcggttgcaaagatacgaattttttagctaatcacaactattattaagacaaagcaagaactaaagcagatgtatatgcggttgcaaagatacgaattttttagctaatcacaaccacaaaggtattaatccgtaacgtagtgaagatgtatatgcggttgcaaagatacgaattttttagctaatcacaacctgctctaggagctggcattagtcagactagatgtatatgcggttgcaaagatacgaattttttagctaatcacaactcgtccgttaggcgagtcagcaggagcgtagatgtatatgcggttgcaaagatacgaattttttagctaatcacaactaaagcgaaaaatctcccttcattacggtgatgtatatgcggttgcaaagatacgaattttttagctaatcacaacttcagatttcccggtgccgtgtaggcatcgatgtatatgcggttgcaaagatacgaattttttagctaatcacaacacttctcagttgaacgttccttacactacggatgtatatgcggttgcaaagatacgaattttttagctaatcacaacagtagctttaagattatcaattatctgtagatgtatatgcggttgcaaagatacgaattttttagctaatcacaacagtttttgaatgagctcttgcgagtcgcctatgaactggcgctgcgggatgtgagcatgaatggaaagcttagccttctttgtcaaggcgagtgccttccacttggcagcctctggaggcagaacctttgggagcttgccctgcgaggcggcgagggagtagaccatgtgccaagcatacttacgaagctttggcgtgacagaggggtgcgtagagatgtcgcctccgtcgttgtggatggcagcgtatggtacggggtcggagattacgacctgcccgggctgtgcctggaactcgatggatcgcatgaggtggtctcgccgtgaggtaagcggcgtgtacttagcatctggagaattggagtcctgtcgacgtgtgcgctgccaaggtcggatgcccccatcgcggaagccagcgtcgcggaagttctgccggaagtggttgacggctgttatgcccacctttcgcgggagacggtcgttgacctcacgaaggatgtcgtttttagccttttcgacgaggaattgaatgttttttgcgtccatgatgaaatttttcttgttttttgttttgcgttaaagaataaagttgtatatttgcgcaaagttagagtttaagttcatttattgagctttgacaccaacctacaacagatcttaggttctgctgtaggttggagccatcaatccttttatggattttgactctaacctccgagcggggttttaccccgttttttttatttccaatattttctcatataagtataaactttatctccatgtatcacaattacgattctgtccttagatgattgcatcaagaatccctttacggtatcacttatggtgtttcttgaaatgaatgtagggatttctaatactacattatcggcttgtttcttagcagattttaatcggttcagaatatcattgtgatatttttcgctaccatcggttccatcttcgactctctttatactcatcatacttttaccatcgaacaagagccctcctatcataaagtcgggattcttgttttcatatattccaggaggaagtaatgtggcacgcaaaggtgcttgtgctgcgcttcgaggatcaagccgaggtaacatatagaccttgcgattgtatttatcagccaagaaatttgccattcttgtattttctttgatttcttccttgccatggaatggcgaggtgtaaaccattttatgatgagaaactttataagtctcaacataaggtggtgttatgttctcttttccttttatatcgtcatgggctttgctcatagctctatccattttatcacagttaaagcagtgtttcttattgtcagcattactgaagactgtctttatcctatttttaaagcctttgttaaacgggtacgagctacaaccatccgggaaatatggatgattgtcactgaaagtgtggccgtcctttccgggattgttttcgagcccacgctgtggagggtcgacgccgtcgaggtcgtcgggtcggttgacgggatcgtcggtctgttcgagggagcacttgcagttccatcggtcgccggggtgatgcttggtccagaaggggtcgtcgacgggtagtgtgagcttcttttcccagtacttccgatgggaggactcaggattgggggatgttgtcggcatccaccggaggttcggcatgacatccttgttacgcaggaatgactgccagtcggctgcgttgtgtgtccggatgactgccgtatcgtactcagtacggagccatgctccacagtgatgtgtagagatggaggagacatcattgagccactggcggaagggctttaagtggccgttggcgtcgagtagctttgctgccatgtcggatcccatctgatggaccttgaaggccgcaaagacctcgttggaatgcttcagtgcagacaggaagtcgtcggagagagaatggttgtcggactgtgtgagcccttcgacggtggcggagttgatgacacgcaggacctcacgccagatggagggctctatctgggtggaggtgtcgacgccatcgtagatctttcggaggaaggaggcaaggacgtcggcgtcgatggagatggaggctgaggcgctgccttcggagagggcgttgacaggatgattcgccgtcgcaatgcgacggcctacgggacggtagtcgctacagcaggggcaggaggtgccgtaatagagggagtcaatcagaagtcggcgtccgccccttgcggggctactgcgaaaaaacgcttcaaacgggatttgaatgatgattgagcggtgtttgaagggtggttgtttttgctgtcctggttatccttgctgtctttgctgtcgtcgtcgatgtatatgcggttgcaaagatacgaattttttagctaatcacaacgctatttcttcttagacttctgttgggggttaatggatgctcaatcagggataacttccaaagttgacttgttttgaaacaaatgaagacaagataatcacaaggaaaacaacgagcaaacaaactgtaacggaattcttttcgcttaatagaatggcgtccgttatattgtaatcgggtatcttttacaaaagaaaataaattatttttgaattgaaaataagctaaaatcaattcaaaaataatttattttcattcttgaaacggcatcttttgcgatgcgatggattatccgttactaagcaagagatgttattttacaatcactttcttggtcttctgtccgtcgttgactatgtacaagcccgcagggaggttgtcaatggactgcaagtcactaccaacgaggacaccggaagcattataaattccgactttaccagccttgctgttagcctttatgccctcaatgcctgttgtctcgctattatcacgaccagggatccacatacatgtgagagacaagcgattctgaatgcccgagattcgggtagcctttcctgtctcagtacttacctcatagagagccgtgtcatacttgccattggtcttccagtagcggtctggcagtggtccgtaagaaccataatcattataacccatgccattgttgacgaaaccattccagtacatcttacccgtagacgcatcaaagcaagctgcctgacgcttgaactgggactgaacgcctgaatggtcgaacttgtttacctctaccatctcaccattttcattctcaacagtctttgtcagaatcattcctgtcgtgcggtcgaactccacaaggttgcccgaagcggtcatggagaagatgcgtccctcaggcgaacaagccaaagtgacgaagttgtcataatatatacccggtgtaatctgagtgagagtcattttgttcaggtcgacagtggcaagagcataacccgcatcagatgtatatccttcctgaatatcctcagggtcgagttctgtatccggcaccgggagagccacgtcagtaaagtagaagagtccataaaccttgccatcgacaggattgtagctcataccacgtgactccagattagcatccttccggaatgtttcctcacgaatgagctcagctgtcgaagccacccaccagcgcactttgaactccatttttgccggatcttcgtcagattcacgtgagtaaactgttaccagagtgtcattgacataaacagagccggaattgccatacataaggttgtcgccagcctctacctcggcattcaccgtgtcggcatcgacagtgagtttccagattccctgatctacacgaaactttgcctttccggtttccgagtcccagcccaaatattcgctgacgtaagtatcgccattgtcataacgggcgttagcttttacgcctttcagttccaaggtctgcgccccggcattttcagacagacaagtcaa

SEQ ID NO: 472 - DNA, 24440 bp, synthetic construct
  misc_feature 1..24440: note = Synthetic
  source 1..24440: mol_type = other DNA
  variation 15896..17761: note = n is a, c, g, or t
tttgttgcagcaagttagcaatcggtattacattatctctgtgatgaagataaatgaatgtcgatgccacaaccgtcagaaaaaatgttatgatgaaaaatcgtctcataattgattattacttaaatatgacacagaaataacatccccgaatgatgtatatatggtgaggctattgcaaagcctcaccatacccaagtactctgtctaattctttcttaagagactgagagtatcgtattatttaaacaatacttccttaccatcaggtacaagtttgaaggtattttcaggattagattcatccgtcatcaaaatgtatgaaggatttctcgtgtcgtcggctgtaagcttaaaggtacgaggctgattgacgtagcctaatgggaaaaccatatagtcgtagttagcattcttggaataccatgaagcattgcccagacctttacctgtaaatgataatacgacttcgtcttcgctcttaatggtacagttcatcgtgtacataccataatagtatccatcttccgctgaaccactatagaagcttaaaccaaaaccttcaccataactacttgttgcaaagttaccaaagataacataatcgagtgattcggcaagatcaccagcatttttaatggcaacattaaagtattttttaccgaaactgccaatagcattataagtaagatagaatgttccatctgcaatctgatctgctaatgatggtaaaacggcaactaatttgatattagacttacctttcttctctgaccattccgtgcctttcgcatagttgaatccatctaaagaatagttgttaatggtgttgttttcatacaactcgataccattaggagtaatgatataaggcacatcaagagtctttgtcgtcccgtctgattcgtatgttactgcgaggttacgatactgagacttggcacaagctaatgtatcttcgcctaataccaactgatatttcttataattcattactgtttctacctgagcaaccttgttgatatagccagcccatgtctcatctttcgccaatggggtaagaacgattttggaaccatgctttttaccctgaaggataacactatcagcagaacactgctgtacacggaactcaaagtcacctaagtagccttctccacttttaccaacaccaccattacgcttggaagatggctcagagaaaatatgaataaggttattaaattcgtccattgacaggataacaccatcactctgttcgaacttataatgagaggtctgcaaagaatcgccaaacaactcgttaccgatggttacctggtcatccttaaatttcaaatagaggttatacccaccatatcgtgtatcagcatagtagtgtgcaacccatccgtttgaagcactctcaagtatttgttgatctgtcgtaatagcctcctgaatacgctgagctgatgatttttcaaacagatcatctacctcattggtacaagatgctgtcaacaataaagcagcaaagcttaaaagtatatatgatatttttttcataacgtatacgtctttagtttaatttggtaagatcaagggtttttacttcattgcatcgacggtttacgacagtacgcaacttgtcgatatctataccccatgagtcctgcatataggtacggatgatatccagtttcttcagaataatagcagcgccttcatcgccagccttcttgagcaatgcattccagccctcatctgaaagggtgatatatgtagaataagtttctgcaaaatcttcgttatactgatctgatgcgtaaccagtaacgaaaccctcttgacctgattcttcgtcagacacattaatccagtctgtagaatgatacttaccagctgaaatagcctggaaatcggtagtatactgcttcttctgagttaagatatgacagaactcatggtgcatggtatgaaaataccagtggtttaagtcgagtggaagcgcacctcttgagcggaaaggatcgtcctgctcgatatggatgttatgaatatccaattcgttcaggcggaataaagttaccataataccaccttctgcagtacccagcacgatactaccctgaccactaaactcaggtgaaccgataagctgaacaacacggaaggtattagctttcacaaagtcctctcctacagcctcacgataagagtcgagccacacatgcttcaaaagaatggccatcgctttagaattatccagacgagcaggaactacattatactcattatcagagagcttgtcattatagtaatactggaaatcaatattataaggtagtgtgaaattatttaatatccaggtatcaaactcggtacgtttcggagaagacgtatcaaagatagactcgttctcgataccattgtcctgacaagaagccaagacgatggtaaagaaggctataaataataatttaatatatttcattgtataatatgcttagaaaattaacgtgggttagcttcgagaccagtagataacacatcggctggaatctggatagccaaacgaagatcgcccggcttaatgtagattggattctcgtgagaaatataatgcgtataaggtataccataacgtttcaaatccatgaatcgctgtccctgccagaaagtttcgatacgacgcatctgcaacaaacagtataacaagttacgctgggtggcattgctgatggtaaagccctgaggatgcaaagtctttttcacattctgcttttttacttccacttcattgtcagccacagtatccaactgattaaagaatttattcacattgtcgaccgtcagtctttgacgggtatagctaccatgtgacgcctcacagtgggcatcgcaccagctgttcatatcggcaatagcagcttcgttctcacccaggagaatttctgactcagctctaacaagcagcgtctcgtcggtggtgaaagcagcctctacgatgtgagcaaaacctgtgttgttaatcttatccgtaacttcgaagaactctatctgcttaggaatccataccgtctggttattaccatacatcatatgagattcatagagcgtattgtcagaagaacctttgctcttggtccaaggcataagtgcccagaatgtttgtgatgaaacgacatccatattatggttatatcgtttcgtgcttgtcgcgtaagaagcacgtcccatcagagaatacgatgtcaaaagcaacagattggatggattgccactctttacataattattaccgatatcctctacaccagcaaggttggaatagctagacatctgtcggagtacagaaccaggatttgaacctactacaacagaagcatactctttagccttcttgaaattcagatagtacagattgaatcgagcagcaaaagcataagcagcactcttattaaaatggtattttgctgaagtcagatgactgtcatcaatcattggcagagctttctcaatatcttcattaatatttgcatacagctctttcagcgtaccacgctctggcactgttacacccgcctgcttcggatagggcaagcctaagtatttttcggctttgtcaggattataagccatacaaaacagattactaagacggaacatggcaaacgctctacaaagaagagcctcagcacgaagaccacgattataagcgttatcttccatcttatcgagtgcttctaacgcattattagcagttgctacagaacggtaagtatcactccaaacattatacggtgcatcgttataagatatcgtttcaacatcctgcaaacgatagatttggtcgatgtaatcgtaggtagcatactgtgtaccgttatcggttacattatctgaagagaattcctctaccaaaagcggagatttattcggataagcggtaaccaaaaggctttttactttttctacagagttgacttctgtacggttatcaggcatcttatcgagatagtcaccacatgaagtcaagctcaataaggctgcagctatatagaaatatttgtattttttcattattatactcttttaaaaaattagaggcccaaacgcaatgtacatgtaaactgacgtggcattggaactgctacaccaccagcattgaagaattcaggatcttgaccgtttaacttcttatcagaataaatcaagaagaggttagtagcctgaagtttaatacttgcattctgtatacgtaatgcttctgcgaagctcttagggaaatcgtagctcagagagatttctttcatacggataaagtcgcccttagcaatacgtgctgtactacgattgtaagcattataggcatatttcaaatagagatcattctgtatctggcgaagatctgcaatagcaggaatgtttgttgttttttcgtcaccagcctgggtccaacgattcttgaaatccttaggcattgcatcgagatctgaatatctgtagttgaatgaatctgccaagcgaactacattaccaaaagagtaagtcatgaagacatttaggtgccagttcttataggtgaagttgttaccaaatgaaccagtgactgttgggtctgaaggaccttcatatatcagataatcaagattagtagactggaagttgatatcactggtagtcaagttgccttcttcattaataaaggtagggataccatcattgttcaagcctctgaaatcaagagaatagagggcacggtatggatcacccttacgagtaaaaccgacaccaccttcaccagcaatcatgtcgatgatacggctattatcatccagttcggttactctcgtttttacatgagagaaaatgaagtctgtattccactggaatttaggagtcacgatgtttttgcttgaaatggtaagctcctcaccatgcgatttcatggcagcaacattagccaactggcgaatagcacccttggtaccattcgtagtctgataaccaatcaaatcgtagttgttacgggtataccagtcgaagactacattaagacgattgtttaagaaaccaagatctacacccacgttaaactcgtgtttcttttcgtatgtcaaatcagggtttgcgatatccttgatttcgagaccagactctttatctgaagcaaaaggacgccatacattggtacttctaataatcgcttcggcattagatacagaagggtcatcaccggtaagtgagtatgaagcacgcaaagtggcatgactgaaggctggctcaatacgttcaaaccacttctcctcatggaggttccatgcagcagaaacgttccaagtaggcaaccagcgagctgaagtagctttacccagacggttactaccttcgtaacgggctgtaaggttcaagctataacgacctttgtaagagtagtttacattaccaaagaatgccgctttacggttgtagaagtttttaaggtaatagtagatatcgttctgctcagaagcctgcttgaagtaataatagctgtaagcaccgagataacccatgtcatactgcatacctacaccattgaaatagctacggttgcgctcgatattattcacctccataccaccatagaagttgaagatatgatcttcgttccatacatcattatagttgacagaggcacggaaatcataaccattcattttatatttggtttcacgatagaaaccaccttcagggagtacagagaatttctgtgtatttacctgatcaggatcttgatataaccaagggttagaatctatcatggtagcatcatccatagcgcggaaagactgagccatgttagaatactctgtgatggtattcgcttgtgtggtagtagagtacttataggctcccatcagtgacaattctaccttagagataggcttatattttaactctgcctggaatctaagatctacgatgtcataatccatatagttgttagccaactcatgatggatgttaaacggagcatagttacgcacgtaaaaagcattaggatcaagagtacgagaagagttaatcgcataagagtaagggttgatatcgaaatcacgactaactttaccagttacagcatctacactctgagaggttgtacccggagccttctgcatacgataagaagtattggcacgaagacctaaagacagtttagagctaagtttatagtcagcattgatagctgcagtaaaacgctgcatcttgctggcttctgtccatcctgggtctgtcaaataagagaaagaggtataatattgtgccttatccgtacctgtagacatgctgatagagtgattctgcatgatagcagaactgaagagctcatcaaaccagttggtattgcggaattctgcagcctgcaaataagcagcacgggcttcaggagtattcgcaagtccgaaagtgccggtagaagcattataagtactcatcaactgatacatcttaccatagacaccgctcgattcagcacgtaaggttctactgtaagatagcaaaccagcactttccatttccttgtaaacacccatttgctcctgagagtccataatgttaaactggctgtagcttggacgaagacgcatggtaaactcaccagtatagttaatacgggtactaccctggcgacccttcttggttgtaataacgatgacaccagccatcgcacgcgcaccataaatagaagtagcactaccatccttcaatatctgaaagctctcgatatcatcagcattcaaacctgcaaccgcagatgacaaaacagtagaagcatcacccgaagaaagctgatcagcattgacctcagtaacatcttccataatgacaccatcaaccacccacaacggtttactactaccatatatagaagtagcaccacgaacacgaattttaggagcagcaccaaaggtaccagaaacattctgaacacttacaccagcagcacgaccttcgagcgaacggctgatatcagccacaccgtcaattttagctttagcagcatccaccttggtagaagcacctgagaaaagtcgcttgtcgattttgtgcataccagttaccaccacttcaccaagtgttttgtcgtcagcaacaaggctaatcttcataccttccttaggagaaaccgtaatggttttcatgccaagataactgacaaccaactttttacccgaaggtacactgagggtgaaattaccatcaatgtcggtaacagcaccagtcttcgtaccttgcacgatgatagaagcaccgataatcggttctccatctgaagctgagacaacggtacctgtaactttgttttgggcaagaacggttcctacgaaaaggaacagacttgcgaaaaacattgctagtcttttttccataaaaatctctctcataaaaattaaaaattaaacaatacttcttgagacggtggtgtaagtatcactgaaaatgcaattaatttcatcctatttactagtgatttttcacgtttggtctttccgaaagttacttatatattcacattaatagttgacatctactttcagtctattattatatagtggtatatgattctatattgaaaacgtatgcaaagatagagtatactacttgcataaccaaacatttgtatagaaaacatcaaacactttacattttttaacgctaattctgctgaatataccgtacatttggtatacaacttgctttttttgttatcaaatagttagcatttatcgattatttgtttcatactgaaaatttgcgtattaatattgacagtatattcataaaatattataaattcttactagatatttagcaattatttaagggaaataagaaaaaatgagtaactttgcaataaatatgaaaaatttcagcaaaaataattattatagagatttaattaagttaggtattcctattattatcggccagttgggtactattgttttggggtttgcagataccttgatgattggtcatcatggtacacaagacttggctgcagcaggactcgtgaataacgtattcaacctagtacttttgttttatctcggcttttcgtatggtcttattccattagtgggcaacttatatggaagaggcaaacatcaagaaatcggtcagaaagtaaagaatagtttattggctaatttcttgatcggcctattgctgatgttggtgatgacgattgtttattttaatctagagaacatggggcaaccgaaagaacttttatcactgatacgtccgtattttatcgttaatgtgataagtcttccttttatcggcctttttaatggtctcaaacaattctttgatggtatcacccatgctaaggtatctatgtgggttatgattatcgccaacctgctaaacatcctatttaacggtttactcatctatggatatgctggttttcccgaactcggactgcttggtgccggtatagccacacttgggtcgcgcgtgtttatgggcatagtactactatgcattctacttggaaatcgcaaatttgccatatacaaacaaggcctgatacaaggtatcattaatcgtaaagatatgaaagacctgaacgcactgggatggcctatagcattgcagttgggtatggagacagcagccttttcactgagttgtattatggtaggatggataggcaccactgctcttgccgctcatcaagtaatggttaccatcggacagttgttctgtctgattctttcgggtgttgccacagcagcatctatccgtatcagtgtattttatggacagaataattattcggcagttatcgagaatgccaaggattgttttcggttagaactgattatcgcaacgattattgcgataccggttattatattccgcaatcaaataggcggttgctttaccgataatacagaggttcagcatatggtgtcaatagttatcttcaccttgatagcctatcagtttggcgacggtttacagtatacctatgcaaatgcacttcgaggtattgcttgtgtgcgtccgatggtactttatgccttcatcgcatattttgtaattagtttacctttgggatatttattaggtattcatctgaagtttgacttagtaggaatttggacagccttccctatttcactttcagttgctggcatacagtattatcttcgatttaagaaggaaatgaatttgaagatacagtaaaaggttcattgtaatctagattatttaagttaaaaagaattaagcatctgtcaatatttatcatgaaaaggttagttttgtaaacgaatcattttataacatcaacaaaaagaccaacatgaaaaaaattttatttagtgccatggttatggcaatgatgtgcatgacaacaaccgttagcgcacaatctaacgagagtaaccagagcaagaaagagtgttgccagaagaaggctaaaacttgctgtgaaaaggaaactaaggcttgttgcaagaaggaagctaagactggcgatgagaaaaacgaggataaagcttgctgtaagaaggacaaagccagctgtgataaaaaggctaaggcttgttgcaagaagcaagttaagaaacaataaagttctctcataagcctttgcgtcttagcactcttagcgtgaatgaaatacttatcttatctaagaaagtttggataagttatgattctcgccaagtacgctaagacgcaaaggcttttttatatgttttcaagttaaagggcgagaaaaagatctgaagaaggaactgaaaaattaactactgaaaaaacaatcgacttggcgaaaaaaggacataaaaaaaggacgagtctccccgtccgtttgttttcacaacggaataatccttattgtgattagctgaattatgatgcaaagaaagaatttttttttcatatttccaaatttttttcgtttattttttctatttttgcttagaatctaataaataatcaaaacatgaggcatatcttaggcttggaccttggcaccaatagtattggttgggcccttattgatcaagaagaaaacaaaattattcacgctggtagccgaatcatcccaatggatgcaggtatgattaaagattatggtgcaggcaacttacaatctcccgcctcaaaccgtacaaactttcgcggaacacgaagactctatgaaagagctgtacttcgtcgcgaacgccttttgcgcgtattaaatgtattacatttcctaccaaatcattttgcaaaggctattaattttacggatcatccgggacaatttatagatcatcaggaaccgttattaccttatcgaaaggataataatgggcataacgaatttatctttaaggattctttctatgaaatgcttgaagatttcggcgaaaagcatcctgatatgattgcgaatggcaagaagataccatacgactggacgctatattatcttcgtaaaaaagcactttctcatgcgatacgcagagaagagttggcatggattattctgaatttcaacacaaaacgaggttactatcagcttcgtggcgaagaagaagaaaccgcaacatctaaaaacgaagagtataaggtgctcaaagtaacagaagtgacccaaatggatgaagacaaaaaacataaaggtaatttctggtacgaaattagatatgaaaacggtgctacccagcgtaaattaagcgcaagacctcctcaccaaataggcgacaaaatagagctaatcgttactacgaattttgataaaaatggcaatatagcgaccgacaaggaaggaaatgcaaaaataaaattgcgtgcccctaaagaggatgactggactttaatgaaaaagcgtaccgaacacgaattagatgagagtaacaaaacggttggcgccttcatatatgatagtttgctgacagaccctaccctcaaggttcgtggaaaactcgttagaacaatagaacgagcatattacaagaaagaactcatcgccattcttaacaagcaaaaggaatttatacctgaactgcaagatcatgctatatacatggactgcgtaagagaactctatcgcagtaacgaagcgcatgtaaaatcagtagaagacaaggatatatgtgatttcatcattaatgatattatcttttatcagagacctctgaaaagcaagaagggagaaatagcaaactgtccacacgaatactatcactacatcgataaggatacgggtgaaattgtcccaaaaccgatcaaggttatcgctaaatctaacccactctatcaggagtttcgcttatggcaattcttacagaatctgaaaataattcagcgtgagaaaataatagatggtagattaagaacagatgtagatgttactgctgaatatcttaattctgcagaaaaaagggaaaatctcttccaaattatcaaccaaagaaaagatattaaccagacagttatcctaaaagctctacatttaagttctgaccagtatagatggaactatgtagaagacaagagtctacctggtaatgaaacacacatgcttatcaacccagataatctgctgaatacacaacaagaatatgaattgtggcatattctatattctgtggatgatcttttagttttacgcaaggctcttactacttttgccaaaaaaaataatttggatgaacaagcattcgtagaaaaccatattcatactaagccatttgacagcgactatggtgcattctctgaaaaagccatacgcaaactattagctctgatgagaacaggtaaatactatgatgccgctgccattgacagcaatacacaatgtcgcatacagaacatcatcgaaggtaaagctgatgctaacatctacaaacaagcccacaaagctggcattgacttgaaagataagaatgcttaccaattcttacctttatggttggctgaatacgtaatatacgataagaaagaggatttcctggtttggaaaaagccagaagaaatcgacaaatatttgaaatttaacttcaaacaaggcactctgcgcaatcctattgtcgaaatggttttaggcgaaacgctccgtgtggtaagagatatctgggctaaatatggcaagatagacgaggtacatgtcgaaatgggtagagatctgaaacagccgagtgataagcgtaaaaaagatcagaaaagaatggctgaaaatgagcgtaccaaccatcgtatacgtaccttgctgcaagaatttgctgctgacgactgcaagattaacaatgtgcgtcctaattcaccatcacagttagaaatcttaaagatatttgaagatggtattctccatgatgaaaccatagagatagatgatgatatacagcatattatcaacgacctgggtgacacatcgactcatgtaagccataaagacgttattaaatatcgcttatggctggagcagcaatatcgttcaccttacacgggcgatgtgattagacttaccgatctgtttacacctgcttacgagatagagcacattataccacagtctcgttattttgatgactcgctgagcaacaaagtggtctgcgaaagtgccatcaataagttaaagagtaatcagcttggctatgaatttatcttaaaggagcatggtcatatcgaagatggtcacaaggtatttgacaaggtacaatatgaggaatttgtaaagaagcactatgccaacaataaaggtaagatgcgcaaactactgatggaagatattcctgatgctttcatacaaagacagctcaacgatagccgttatatagcaagaaaaactatcgaaatgctttctccactcgtgagaataacaactgaagatggtaaaatcgccgataacgacaagggaccagtatctatcaacgtcattgcaaccaatggcgcaataaccgacagactgaaaaaagattggggtattaaccagatttggaatgatattattgctccgcgatttgaacgtctgaaccaaatgacccaatcagaaaactatgggcagtgggtcaataaagatggcaagaattattttcagattaatataccattaagtcttcggggattcagtaaaaagcgtatagaccatcgtcaccatgctatggatgcgatagttatcgcttgtgctactcgagaccatgtaaactatctgagcaacgctgcagcatgttctaatcaagctgatttacgttatgacttacagcataagctctgctcgaaggagaaaacagatgataagggcaactatgtatggcgctttatcaaaccgtgggaaacctttactcaagatacgcgccagacacttatgaatatagttgtaagtttcaagcagaatttacgtgtcatcaataagatgactaatttctacgatcattttgaaaatggcaagcgagtaaaggtaaaacaggagaatggtgatggttgggctatacgcaaatcacttcataaggccacagtatctggtgctgtaagaatacaacggaagaaaaaggtgaaattagcagatgcccttgaccatttgaatctgatagtcgataaagaggtgaaaaaagatatcaagggcgtcatcgctcaatatcataaattcgaccaaaaaacgatattgaagtattataaagaccgcaaatatctgattggtaaaaaagatattaaacaggtagagatatgggatactcctgaaaaagctgactactctgccgtacgagtaaacttggattcttctttcacaaaagagaaaattgctagcatcacagatactggtattcaaaaaatactcttggctcatctggctaactgcaacgataaagctaacgaggctttctcggcagagggaattgctgcaatgaataaaaatatcaaggctctcaatggtggtaaggatcataagccaatactaaaagtgagaaagatggaatcgttcggtctgaaatatcctatcagcgaaacaggcaataaatctaaaaagtacgtagaggcagataaaggtactaatctcttctatgcggtatatgaaaatgagaatggagaaagaatattcgaaagtatcccacttatcactgctatagaaagaatgaaacaaaacgagacagtttcgccataccaagatgaaaatggaaataagttgctttttgttttatctcctggagacctggtatatgtagccgatgaaggtgagcatgtacacgatataaaagattgcagcaaaatatataaaatggtatcatcttcaaccaacagaagtttctatgtaccgcattcttttgccacgccaatcgttgataaattagaattaggatcactaaataaaatagaaaagatccaagatggtccagctattaaaaacatatgttataaacttaaagtagatcgcttaggaaatgtagaactaatatagttagcctatgataaagaaaactttatattttggcaatccggcttatctttcactacgaaataagcaacttgtcatcaagtttccggatgtagaacatagcaatatgcctgataatataaagcaagaaaatgtccacacgataccaatagaagatattggtatcgtgattttggacaacaaacagataactattacacaggcattgcttaatgaactgatcgaaaacacaactgccgtaataacatgcgacagtaaacgcatgccttcgggcttattcttacccctaacaggaaatacgttgcaaaatgagcgattccgtaaccaaatagaatcctcactacctctgagaaaacaactttggcaacaaactattaaagctaaaatagaaaatcaagctttctgtctacagaaaaacacgtgtaaatcaaatgctccattacatgttatggccagagatgtaaagagcggagaccctgataattacgaagcgcaagctgctgtatattattggcgtaatatctttccatgttatgaccattttgaaagaaatccagaaggagatccaccaaataatcttttaaattatggttatgccatattaagggctactgtagcaagggctcttgttggtagtggattattacccgtatacggcattcaccatcataacagatataatgccttttgtttagccgatgatatcatggagccctatcgaccttttgttgatgatttagtcattggtatcgtgaagaaatcgcagaaaaacatcccagaagaactaacgaaagaactcaagcagcaattacttgccataccagtgatggatgtaaaaatcggtttaaagaagagccctctaatgatagcagttggtcagacgacagcgagtttagcaaaatgctttagcggagaactgagaaaaatcgcttatcctgaatttccatgatttcaagacttaatcaatatcgcattatgtgggtacttgttatgtttgatttgcctacaaataccaaaaaagaacgacgagcagctatgttatttcgcaaacgaattatggctgatggtttcaccatgtttcagttttcgatatatgtgcgtcattgtgccagcatggaaaatgcgcaagttcatattaaacgtgtacaatctttgttacctgaatatggacatgtaggagttatgtgcattacagataaacaatttggtgatattaaaatattcgaatgtaaaaaagaaaaagagccgaatgctccctatcaacaattagaattattttaaaatttttaaagcaaattattcgtattttgaagcaaactcgcgaaattaaatgtaagttattgtaattagatgtaataattagaaaatgggattctggcctaatgaccatgaatcccatttttttactggattattttttatttctaattttcttcataattaactatataacagtcannnnnnnnnnnnnnnnnnnnnnnnnnnnnnnnnnnnnnnnnnnnnnnnnnnnnnnnnnnnnnnnnnnnnnnnnnnnnnnnnnnnnnnnnnnnnnnnnnnnnnnnnnnnnnnnnnnnnnnnnnnnnnnnnnnnnnnnnnnnnnnnnnnnnnnnnnnnnnnnnnnnnnnnnnnnnnnnnnnnnnnnnnnnnnnnnnnnnnnnnnnnnnnnnnnnnnnnnnnnnnnnnnnnnnnnnnnnnnnnnnnnnnnnnnnnnnnnnnnnnnnnnnnnnnnnnnnnnnnnnnnnnnnnnnnnnnnnnnnnnnnnnnnnnnnnnnnnnnnnnnnnnnnnnnnnnnnnnnnnnnnnnnnnnnnnnnnnnnnnnnnnnnnnnnnnnnnnnnnnnnnnnnnnnnnnnnnnnnnnnnnnnnnnnnnnnnnnnnnnnnnnnnnnnnnnnnnnnnnnnnnnnnnnnnnnnnnnnnnnnnnnnnnnnnnnnnnnnnnnnnnnnnnnnnnnnnnnnnnnnnnnnnnnnnnnnnnnnnnnnnnnnnnnnnnnnnnnnnnnnnnnnnnnnnnnnnnnnnnnnnnnnnnnnnnnnnnnnnnnnnnnnnnnnnnnnnnnnnnnnnnnnnnnnnnnnnnnnnnnnnnnnnnnnnnnnnnnnnnnnnnnnnnnnnnnnnnnnnnnnnnnnnnnnnnnnnnnnnnnnnnnnnnnnnnnnnnnnnnnnnnnnnnnnnnnnnnnnnnnnnnnnnnnnnnnnnnnnnnnnnnnnnnnnnnnnnnnnnnnnnnnnnnnnnnnnnnnnnnnnnnnnnnnnnnnnnnnnnnnnnnnnnnnnnnnnnnnnnnnnnnnnnnnnnnnnnnnnnnnnnnnnnnnnnnnnnnnnnnnnnnnnnnnnnnnnnnnnnnnnnnnnnnnnnnnnnnnnnnnnnnnnnnnnnnnnnnnnnnnnnnnnnnnnnnnnnnnnnnnnnnnnnnnnnnnnnnnnnnnnnnnnnnnnnnnnnnnnnnnnnnnnnnnnnnnnnnnnnnnnnnnnnnnnnnnnnnnnnnnnnnnnnnnnnnnnnnnnnnnnnnnnnnnnnnnnnnnnnnnnnnnnnnnnnnnnnnnnnnnnnnnnnnnnnnnnnnnnnnnnnnnnnnnnnnnnnnnnnnnnnnnnnnnnnnnnnnnnnnnnnnnnnnnnnnnnnnnnnnnnnnnnnnnnnnnnnnnnnnnnnnnnnnnnnnnnnnnnnnnnnnnnnnnnnnnnnnnnnnnnnnnnnnnnnnnnnnnnnnnnnnnnnnnnnnnnnnnnnnnnnnnnnnnnnnnnnnnnnnnnnnnnnnnnnnnnnnnnnnnnnnnnnnnnnnnnnnnnnnnnnnnnnnnnnnnnnnnnnnnnnnnnnnnnnnnnnnnnnnnnnnnnnnnnnnnnnnnnnnnnnnnnnnnnnnnnnnnnnnnnnnnnnnnnnnnnnnnnnnnnnnnnnnnnnnnnnnnnnnnnnnnnnnnnnnnnnnnnnnnnnnnnnnnnnnnnnnnnnnnnnnnnnnnnnnnnnnnnnnnnnnnnnnnnnnnnnnnnnnnnnnnnnnnnnnnnnnnnnnnnnnnnnnnnnnnnnnnnnnnnnnnnnnnnnnnnnnnnnnnnnnnnnnnnnnnnnnnnnnnnnnnnnnnnnnnnnnnnnnnnnnnnnnnnnnnnnnnnnnnnnnnnnnnnnnnnnnnnnnnnnnnnnnnnnnnnnnnnnnnnnnnnnnnnnnnnnnnnnnnnnnnnnnnnnnnnnnnnnnnnnnnnnnnnnnnnnnnnnnnnnnnnnnnnnnnnnnnnnnnnnnnnnnnnnnnnnnnnnnnnnnnnnnnnnnnnnnnnnnnnnnnnnnnnnnnnnnnnnnnnnnnnnnnnnnnnnnnnnnnnnnnnnnnnnnnnnnnnnnnnnnnnnctacttccctattctgatgcggtgcgtacgagactcgaactcgtgacctcctgcgtgacaggcaggcattctaaccaactgaactaacgcaccattttttagacctatttaagccctgcatcatttcttgattgcgggtgcaaaggtaagacataaaatcgaaactaccaaactttttccaagaaaatttcaaaaaaaatatatttttaccttcaaaaagctcggtaacaaagtattcaggccatgtatcttgttcaattccttgccattatacttatatccatgagatagattggtagcccaatagtctcttccatcaatatggctctggaatatcatgatttaaaaacattactgtctactgaacttcatataaagcttgtgcgaaaaataagccgtcaaagccaggcctgccaatgataagcagatactaattaatacatgtccggtgaagacagagtagcctagctcaatagctaatagtgtagtgatactattgctgatgacatgcaaaatgatggtatagagcaaattgtgtgttttaaaatagatgtaacaatataagacagaaagaggaaaggcgaacaatatttgcaatggaagccaatgcataatggagaagattagagatgtagccaaaatggctgtcagcggtttgtattggctcaataagccccttagaaaaacacccctgaacatgatttcttctgatacaggaccaataaggcatattgccagaattgaaagaaaatcacttgaatcttgggtgttgccatcttttataatgccaaacaaagggaaagctaacagagccgtaaatatgacattaaggagtaatgcatggccaaaaaaggagaaatcgttgacagaccatccatcatgatgccaacccttaacacggttaacaagacaggatactcctacgacaaataccgccataataaatacaatagccacttctataaatcgttggctaaaagacttctctatcaagattgacatgataacaccaattggtattatagacaatatcaatagtgcaataacttcccaaattctgttggggaaaaacttgctcacattattgttttctaacatatgatattaatttacacctttgtatgatgtcaggttattttaactaagcgtaaaggtaagactaacaaatcttctttattactgcaaagatatcaaattatttgatttgcaaaaagaaattttaatattctatcaaagaaaaatgatcaccaagattgcttacatctctgatgatacttcaatatatggaaagagggggtgtgccaatttagtaaaattatacgcgagaaaagtagataaaacgtgaaaaaatagacataaaatggtcttaaaagtgtaagaaaacaagaaaatagcacttttttgcgattttttttgagaaaagtttgcaagattaaaataaaaacactacctttgcacccgcaaatgagacaaggtcccttcgtctatcggctaggacgagagattttcattctctaaagaggagttcgactctcctagggactacttgttaatcgcttcaatgaaattttcgttgaagcgatttttttatttcactcctttcgaatcctttactatcctgttttaaccctaccaaaaacataactattttattacatatttttgcacataacaaaaagaatgtgtgcaaattgagaaagaaatacacttcatattgcaaaaaaattaaagaatctttcttttttcaccttatatatatataactttgtaattatgaataaatcgtcaatgacaagtgaagaatggtatcagcagggaaatgtatatcgcaaagaacaagatttccagaaagcgatgcattgctacatggaggctattgcactagacccgaatagtaaagctgttgaagccaagaagatgctggaagatatttacagcttctattgtaaggatatgtataatccataaacttgtactcagacataacgggaaaaaagaattagattaaaacaatataaaaatgggaataatcaaaggcgctatcgttgttaataccgacagatgcaaaggctgtagcctttgcgttgtagcctgtccgaaaaattgtatttcgatagcggagaaaaaggtaaacgttcacggttatccttatgttgaacctaatgcacagagtgactcgtgtgtagggtgtgcttcgtgtgctatcgtatgtccagatggatgcataactgtgtatcgtaaaaaaacagaagattaacctgatatgaatcaagaagtaaaattaatgaagggcaacgaggctatcgcccacgctgctatccgttgtggagctgacggtttctttggctatccgataactccccaaactgaaattatagaaactttggctgctttgaaaccttgggaaactactggtatggtggtattacaagctgaaagcgaagtggctgctattaatatgatttatggtggtgctggtgccggtaaacgtgtactcaccacttcttctagccctggcatcgccttgatgcaagagggtatcgcttatatggctggtgccgaggtacctggcgtcatcgtcaatgtacagcgtggtggtcctggtctgggtactatccaaccatctcaggctgactatttccaggctactcgtggtggtggtaacggtgattatcaggttatcgtactggctccaaacagtgtacaggaaatggcagatttcgttgacttggcctttgaactggctttcagatatcgtaaccctgctatgattctaagtgatggtatcatcggacaaatgatggaaaaagtggttttgcctccgatgaagcctcgtcgcactgaagagcaaattaagaaagaatgtccttgggctactatcggtagaactaaggaccgtcaacctaatatcatcacttctctggaactgaagcctgaagaaatggaaaaacgaaaccttgcccttcagcaaaaatatgcacgctgtaaagaacgtgaagtacgattcgaaacacagcaatgcgatgacgctgattatatcatcgtagctttcggtagtgctgcccgtatcgctgaaaaagcggttgaaatcgctcgtggtgaaggtatcaaagtgggactgttcagacctattacactctggcctttccctgaaaaacagatagcagaactggcgcagaaagttaaaggtatattggtaaccgaaatcaatgccggacagatgattcaggatgtaaaactggcagctaatggggctacgcaagtacaacattttggtcgcttagggggtatcgttcctgaaccacaggaaattgttgacaatctcaaaaaaatgatgaatcatgaatagcgatataatagcaccagaaaatttggtgtacgagaaacctaaattgatgaacgatgtgaacatgcattattgcccaggctgttcacacggtgtggtacataagctcgtggctgaagtcatagctgagatgggcatggaagataaaacggtgggcgtcagtccggttggttgtgctgttttcgcttatcgctatatcgatatcgactggcaggaagctgctcatggtcgtgctcctgctttggctactgctatcaagagactttggccagaccgcttggtgtttacttaccagggcgatggtgatatggcttgtatcggtacagcagaaacgatccatgctttaaatcgtggcgaaaatattaccattatttttatcaataatgcgatttatggtatgacaggtggacagatggcccctactacactggttggacagaaaacttctacttgtccgtatggtcgcgaccctgaacttcatggttacccgctcaagatgcctgaaatagctgctcagcttgaaggtacttgctatgtaacccgacagagtgtggaaacggttggcgctatcaataaggcgaagaaggctatccgtaaagctttcgaagctaacatggcgggtaaaggcagttgtctggttgagattacttctacctgtagcagtggttggaaaatgtctccgataaaagcgaataagtggctcgaagaccatatgatgcaggtttatacaaagggtgatctaaaagatacgacaaaacaagaataagtcagcgtgattggtaatactgacttcatgtggaaaattatacgtcaatgaaaaaagaaatcattatatctggatttggtggacagggagttctctctatgggtaagatcttagcctactctgggcttatggaggataaagaggtgacttggatgccagcatacggtcctgaacagcgaggtggtacggcaaatgtaacggtcattatcagcgatgaacgtatttcgtcgccgattttaagtaattacgatgttgctatcgtgctcaatcaaccatcacttgataagtttgaatctaaggtaaaaccgggtggtattctgatttacgatgattatggtatacttaaccctcctactcgtactgatattgagattcacacgatctcggctatggaaaaagctgccgagatgaaaaatgcgaaagtgtttaacatgatcgtattgggtggtttgctcaaggtatgtcctatcgtacccgactctgcactcgaaaaggctctttataagacgctgcctgaacgtcatcatgatcttattccgctgaatatgaaagcggtagaagaaggtagacatattattgcataataaaataagctataaccatctcttgaggactctaatccccttaggagatggtttttctaatgataaatggtatcatgaagttcttgaaaaaagaagaattactgaaaaaagatgatatagctgccagaatgaatgaactggcaagacttaacatccctttccttttcgtcattaactatgacagaacactagcatatattgagccattagatagcatcgaccccaatacaatcatgtatcagtttggtcaggaggggaatattcctgatcatagctatcttcaagaacacaagttagaatgggatttcttacgccctgaccgcaaacaatatcacgatagtttcaatacggttgtttcaaatgagaaggcgggtaatagttatttggccaacttgacatgcaagattcctatacataccaacttcactctgaaagagatatttttacgctcatcagcacggtatcgactctggattaaagatacccttgtttgcttttctccggagatatttattcaagtaaaaggaaatgaaatcagttcttttccgatgaaaggtacaatcgatgccacactacctgatgcacagaacctactgataaacaatgcaaaggaagctgctgaacatgctacgatagtagacttgatacgtaacgatctcagtatggtggccaatcatgtgcatgtaccgcgttatcgctatgtagaacgactcgaaacgaatcatggtgccattcttcaaacgagttctgaaattagaggaaatatcctaccttattatcaccaacacccaggcgatatgctgatgaaacaacttcctgcaggaagtataacaggtgcgccgaaaccgaaaacgatggagattatccatgaggctgaaaactatgaccgcggcttttacacaggggttatggggatatggaaggatggcgatatcgatagcgctgtcatgatacgatttatcgatcaagaaaataataagctgtattataaagcgggcggcggcataacagcacaaagtgatgaggaaagtgaatataacgaaatcatagaaaagatatatgtgccaatttgttgaaaccataagaattaaagatggcgttgccatgaacactcgctatcatatcgaaagactgaacaagactagaaatcatttctggccttcaagtaaacctatctctgaatcggaacttcttaccgatataccgcaagtcatgggtctgcagaaggctcgtgtggtatatgacgcatctggcattacgcttcgtgaatatcatgcgtacaccattcgcaacgtaaaatctatctgtgtggttgaagataacaggatagactatacttggaaaagtacggatagaaatgtacttaccgcacaacgcgataaagctccaaagtatgatgaagtgattattattaaaaatggtaaagttaccgatacttcctatacgaatctctgtttttatgatggccaacattggctcactcctgatactcccctactcaagggtactatgcgtcagcatttgctcgacgagggaaagataatagcatcgcctataacgaaaaaagatatagcctcatttgaaaaagtggctcttatcaatgccatgatggatttgggcgacttgattctccctatcagtagcatcgactttacacctttgcgcatttagcgagaaacggttaatatgcacaaaaacaaaaaaggtgactatgaacaaaattcataatcacctctattatgagcggaaaacgagactcgaactcgcgaccccaaccttggcaaggttgtgctctaccaactgagctatttccgcatttaaatatcaagtgaagaggaggagactcgaactcccacgtcacaattaacactaccccctcaaagtagcgcgtctaccaattccgccacctctccgactggtatttaaagccttataacaatagtagggaagaccggactcgaaccgacgacctcctggtcccaa

SEQ ID NO: 473 - DNA, 24228 bp, synthetic construct
  source 1..24228: mol_type = other DNA
  misc_feature 1..24228: note = Synthetic
tctggccctgcccaagatacgcagggagaagcgactgccgagggtgctgtccgtggagcaggtgcaacagctgctccgctcctgcgacctgtacaccaaggccctgttctccgtcatctacgactgcgggctgcgggcctttgaagcctgtaacctgtgctggaatgacatttccttcgaccgtcagcaggtattcatccgtcgcggcaagggcggcaaggaccgcatcgtccccatctcgcccaagacgctgcaggtgctcaaggtataccacaagaagttctggggtataggcctggtgttcaccaaagacggcggcatggtcaggcagattgacaacgcctacatccgcaagtgcctgaaataccagctggggaaagcggggcttgacacttccctctcgacgcacgcgctccgtcacagttatgccacccacttgctggaggccggcgaggacattcagaccgtgcagcggcggctcggccacaggtcgctgcagaccacgaccgtctacctgcatgtggcaaggcttgagaggcgtcagtgtgtctatctcatagaccacatcttctcatgagccgcacccgatacgaggtcgggcaggtcatccgcgactggggaggtgagtttatgtcccgcttccccgtggttgagcaggtgcgcaagtccttcggcaggatggccctgtgccgtacccgctggctgggcgggcacgtggaggtatgccctgagtgcggagaggtgcatgtgagctacaacagctgccgcgaccgccactgccccaagtgccagaacaaggagcgcgccgtttgggtggagatgcgcaaggacgaggtgatgccgggcgtgaagtacttccacacggtgttcaccattcccgactgcctgcaccagattgccatgtcccaccaggctctgttctacgacgcgatgttccgcgccgcatggctcaccctgcgcacgttcttcggcaacctggggctgcagggaggcatgaccagtatcctgcacacatggggcagcaacctgcactaccatccgcacatacactgcatagtgcctggcgggggagtggacaaggacggcctctggcaccaccagaagggatgcaagggggccgggcacgacttcctcttcccagtgcaggctctgagccctatgttccgtgccaaactcatggccatgctcacacaccggctgaaggaactcggagagaccatgccgcagcatgtccgcaggcagtgcttcgaaaaagcgtgggtggtctacagcaggcctccggccaagggcgtcggccaggtgctggagtacatcggcaggtatgcctaccgcgtggccatcagcaacgcacgaatcctcgactacgatgccagggagggcaaggtctcctacgactacaaggactaccgacatggcggcacgcacaagacgatgagcatgagcgccgtggacttcctccacctcttctcgctccatgtcctgcctcccgcattcgtgcgcatccggcactacggactgctctcgccctcatgcagagacaagctccgcaaggtgcaggagcagctcggaggaacgcccgtcccaaaggagaggcgcaggaaaacctacgaagaggtctgccaggagcagggatgggaaatcggcatctgcccgcactgcaaatgcaggatgattgtcgtagagaccatagcacccgcaagagcaccgcctttgtccgcccacgtccgcacggcatccgtatagccctccactccgcagtccgtcaagccatgattcttgacggacggccaccatagtgtccatacgtgactgtttcagtgtttcaaagaccgattcggctggctcaccagcctcttattactatcgcggacggcttattcgtcaccgcatccgctgatttcttccttccctgacgatgcacgaccgaggtccaaaccaaggttaatccccatagattcacgcacgcacaccgtacaacatggtcttcatatggccttgaggccacacgaagacctctttagttgtaacttactgcgaactcaggttgctctttcattttggttttgtagtcggctcgttcattttcacagaatagcgcacctcctgcacaagccgcaacgccagcaaacatagcaatgccttttacagtactacctttatagatttggcccaaacctggaataatggacatcactgctgggcctgcaccatagttgctggacttgtatgtcttgtcgaatattacccggtcagcaacgccgaccatatataaagtgtgaagtgtcacttgccctctattatattcaacatattcgtcaacaggatatgcttgaagccgatattgttggccggaaattcttgtgtcaatggtgatgttgttattgatggtctcgaccatattgccatttacaatctgctgatctattttctggaggttaccggaattcacactaacagtaacggctcttcgtagttgctcattttgagccaattgctgtttggcttccattcgggcagacgaaatactgtttccataggaaactatttctataaaacgatatgtattgttatgttctttgggggtattgttcacccatctaggtttgccaccatatgcattaatgtttgcacagcaaattgcgattgcaataatgcagagtttcttgatgttcatcgtcctattattgttttgtctgttcaagttccttctctatctcctgttcgtatttctctttttccttctggatttttgctctgtcgctatcagagatacgctgttttacctgttctgctgcttttttagcgatatctgcaacacttccattatattccaaacatacaaatatggtatatttgcggtctttaccgtagtatttgtctgtgttgatcacatttgcaccagagatgatattactggaaatagatttagcgagagtgttctgttgttgtcctccatccgtgttcgtcattccttcaccatccccacctgcatattgagtgatgtcgaagcctactgcttttgatgcagagacgatagcagcatcaagtgctcttgataattggccccgagcatccatctctgcaagttgacgtgccgcactttcgctgaaacttactcctttcccgtaagcacgcttgccaggtgctgcagcagccaattgttcagattttgtctggaacacttgtgctccgtatggattttcttgctcagactttgaagcctggggtactttctgggatgagccgcaagataaaatggttagcattaatgatactagtgctgatacaaaaaggaactttttcatttcaaattaagttaatagtgttttgcgcctcccctgcaaaacgggtcaatcttttttgtcttccataagtacgaaaaaagcgtgagagtctgtacttcgtcactcatcccgctatacaaggccttcgcattgcccactccaactgaacgagcaacaccagaggcccacgccgaatatgtatatacttgacctacgccttatatataaataaggtgtaggggtataaaacatacccaatgaacatctactgttgcgttgttcttggttgaagtcagaggttgcgaagttctgtatagccaaagaacaagcgcttggtaaacgcctttccataaatatgcatccctgcccttcacctatgcccgaaggcttcggttttcggcttggacgctacaaaagtagtgattattttcgaaacggcaaaacaatttaggaaaaaactattctttttattgttcggaaagcgatacaccaaacttgttcttcactttatagacctcacaataactggtctttttgatcagatattgcaccctaaagcgcccgtcaatccattcgtcgttctcaaatattgccatacattatgatttacgatacagtactatcccctctcgatccacgttttccttgaactttggattcttgatgttagcatacatgtgagtatcgaatttttgtgggatatgcgagtcatacagtttattgttgaggcgggtcaaagtgtggcggttgaagtctttacccttgatagacaaatccacatccgatgcccgccaaaagtcacctcttgcacgggaaccatagatgacgacctcctctatttcgggtattgaagtcaaaatctgcagtagttcattgtatgatttatctgtcattccgtacatatttacctctgtgctatttacaattgaaccttccaatcatctattcgtctagtctttgtagagaagttgacacctatcttatatatagtgaggccatcgtgctcgaagggcttcgcatattgcttgtcttcgatttgttgaagagcatcttcggcagacttgtcaagtttgaactctatgatatatataaagtctggtgtcttaattagcagatcgatgcggccattgctggtgtgatgttctacttccgtgtagaggccaaccaatttgaagatgatccagacgacattgtggaaatagagttcagcattgccggctaactgataatcgcctcctgcgaagagcgtttcgaggcgttgcatgaattgctctggctgtcctgcacgaacttctttcacaaaggaagaaacgaatgaagggccttgctgcgaagtcaaagtagtgtaaaatggaattaaaaagcgggtaaaaccgcgctccacttccaagtttgggaaaccaaggtgatataacccgaactcctcatcataatccttaactgtcaggtagccgctctgatagatgaggggcagcggattcttatctatgctgtcgatgctgccaagaagatcggcagtcacttcttcctgcgtgagttcttccagattgtagttgcttttcttaagcgcttcaacgaggatggtgggagtgcccgtctcaaaccagtagtccttgaaggcctgactatcgagggtgcgtagcagactgaagggattgtacatccctgtggtatcggcctcgaaatggtagccgtcgtagttaagtttcagtttggcgtaacattcgtccttagtgagattgttggcttgggccaatgactctacttctgcatcgagattgtcgtggatttccttttcagtgataccacaaatctcggcatagcgcttatccattgagatatccgccaagttgttgaggtcgctgaagacactcacctttgaaaatttggtgacacccgtgaagaaggcgaactggatataggcacccatcgacttctccacaccatagaatgctttcagcgtggcgcgatagtcatccttcagttcttcgttgtcgaaggcttgaagcagtggcttgtcgtattcatcaacgagtatggcaaccttctgacctgtcttttcgtaggcattgcggataactgccgtaaagcgaccagccaaagaatctccctgattggtacaaccgaattgctgttcccagaggcgaaggtttctgtcaaggattgactctaaggcttctaaattcgtatatttttcagcattcatatccagatgcaatacaggatacgtcttccagtcttgttccaactgttcgatggccaatcccttgaatagttccttctctccattaaagtagtattccatcatggaaacaagcaggctcttgccgaacctgcggggacgactaaggaaatagtactgcccgcccttgatgagtttgtacatcagtgctgatttgtctgcatagaagtagtcgtcagtgcggatggtcttgaagtcctgtatgccaatgggatatttcataagcctgcaatttttctgcaaaaatacaattaattttttatctcacaaaatgttatagcataaaatgtacttaattatttgcaccagagggaaaaatatcgtaactttgcaccaaaagttgcacgttatgattgcgagtacgaagtctgaaatcatctccttgctgagcgatgtcaatcgtgagggcgcggcgaatgagtcgtgaaatgtgatattttgcttaaatttgcagccgaaaatgtgatttctaaggaatggaactgctgaaaagaaagatagacaagttccttttggattggaaagacaacccaaagaggaagccgctgatagtgaaagtttcctcacattcttgttgaaacggttcctcaaagaaagaattcaatcaaataagactgtaatagtccccgtcgctactggaaatatatgacggagaagaactaattcacacgcatcatcttgcgccattttataaagccgaagatggcgatgacgacgtagagggcgtagagaccagccttgaaggggatgtccttgtagaaatagaggacacaggtgacgacgtcgacggcaatccagatgaaccactgctccagatacttatgcgccaaggcccagatgcccacgatgctcagggcagtggtgaaactgtcggccagggggacgttggagttggtgaacgtgacgaggagccagtagatggcggtccagacggcagcgatgagggcggcccaagggaggatcaagcggcgagggaagtggcggatggacagaggggacggttcttccgttgcgacggaagaaccgtccccctgtaaagcagtgccgcgcacccagcgccaatagccgtagacggtcattgagaggtaatagaactccatgccgcagtcggcatagagtcctttctgataatagagtacgatgcccagggcctgcatcaggaagccgacggcccacatccagatgctggccttatattccaacaagatataggccagccccagaatagtagtgacgatatcaagccaatgagcagcgatgaagtccgtcatatcatctccgtattaatctgtgtaacctgtggcttagaagcgaagtgttacgttacccatcatcgtgaagccagccatcgggatgaagccgatctggtagtagcggttgtcaggtgtatgaccataactttcggctacagcagaatatacccagccgctggcggcgtagcgacgattgaacacgttcgagaagttcagtccgaagacagcctccttcagtaccttcttgggcttcagtgtatagctaaggttgacgttcgacaccgagtagcagggcagcgagcggtcactgttctccgtattgtccagatactggcggctcacgaagttggtgtgccatactgcctgaaggcccttccaatggaaattgatgaagccattgaggatgaccgacggcgagaaggccaaagtagacttggagtaatgtatctggcgcagttcgtcgccgtcgccatcaatatggtacttggccatagcctcctgtcgtcctgcggcatcatcctcatagtcccagtcgtcccagtcttctacgaactcgtcgaaatccttgatcttgttctggctcagggctgcattaccctcaatggtcagccacgatgtaggattcacacctgcctgcagttccagtcccatgcgataggaatccttgatgttcgttgtcagtttctcaccgatttcgctcagttcgccggtctgcacgaactggtcggtatagtccatgtaataagcattcaggcccacatgccacaagtctgcattgtaagtgtagcccacttcatagtcgagcagcgactctgcctttggtgcaggatacttgccgttgtcggtgaagttgttacgctccggctcacgatggcttacagccacagagccatagacccgatgtccgtcctgctgccaggagaagcctgccttcggattcaggaagtcgtacttcttgtcgatgtcgaggaagtgcttgtcgtagagataggtctgcttgttgtaggcaaacttgtcgttgtagccgtcagtcttgtaccctacgtggcggtactgcatatcggcaaacacgctccaggccggtgagatggcgtaggcaaccttgacaaaggcactgccatccagtttcttggcatcagagtcgtaatatttgtagtcgccattggcaagtaggagtcttctcagtgcctcgttcgacacgtaagtggcatagccgaaatggttacccgagaagttttgcaggctcagtccgccgatgatgtcccatgcgtcgtccttgtatgtcatgttccaaaccagtccgtatgtatcctgcttaagtcccttcttgcgcacccagtccgtacgcttgatgccatccaacgcatcatagccgaactcagcattgggcaatcctaatttcttgatcttattattagggcggaactccctgtagtagccgtagccgtgggtgtagtgcagcgatgctgatgtagcccagcggtcattgatagtccaggatgccgataggatgttgtggttctgccagaagttgtcggtggtcttgtcccagtaactgccatcattcatctggtagcgctcagtcacgtaattgccgctggcatccttggcgaagttgccgtcggcgtcgtaggcgagcgtctcatagagtgtgttatacttgcccagcccagcctcatacatatccttataggtcttgatgcccgtcttgatgccatacgtgccgtccatcagacccatatcgttgtcacccgccgtcacgccgttccaggcctggcccgtcttctcgaaattgccgatgttcttatagcggatctggaagttgtcgcccagccaggtgaggccgccatagtaggagccggagcgtccgctggtgccgtggatgaatccgtcggtatttgtctcgtggtaagcgccgtcaaagatcaggtgattccacagcagtcccgtcgagaagttcaggccggcattccaggtattgaaggagccatacgagccagacacttcgatgcttggcgtctgcaagggtgtagccgacgagagggccaccgttccgccgaaggcaccgtcgccattggtcgacgtacccacaccgcgctggatctgcaccgagccgagcaatgaaccgtaagagttcatattggcccagaacacgcactggtcctcaggcgagttgaggggcacaccgtcgagggtcacgttgatacgggagtcgccggcaccacggatacgcatataggtggttcccgtgcccagtccgttctcgctccaggccagcacgcccggggtctgcgagaagaggaagggcagttccttacctgtcttggagaattcactcagttgttgtttcttgatgttggcgatggcatacggtgcattcttctgcgcacggatacccttcaccacgacttcctgcagcgcctccacctgtgtggagtcatagagcgccgctacattctggccatctgcactcataacgctcaccagcgcagccactcctaaaacaaatcttttcattctcatgtttagtacctttaattaataaataatgtaaaggggaaatttttgtgtcgatatatcctaattccatccctacgccggcattgcccggatcaggttagagggtatcatctcagccgccaacaggcagcaccccttgaattgcgggtgcaaaggtaggacttttatttggtagttccaaacaattcttctcttttttgccgatttttggttgaatcgttcgtttttctccgaattttgtagtcagaaagagatcgacggaagtactactgacctatatcgagataagcaatgcataacaataaaaagggcgagtcaccccgcccaacatgttttcacaacggaataatccttattgtgattagctaaattcgatgcaaagatacaatttttctgcaaaacggcaaacgttttctttattttttattaattttgtagcctagtttaacaaaaacgcttaatacgaatcaaatgaagaatatacttggattagacctgggaacaaatagtattggttgggcattgattgatagtgagagtcatcgtatcatcaaagccggcagcagaatcatacctatggatgcaagaacgcaaggtgagtttgaagcaggaacacttcaatcgcaagcatctgtaaggacaggattccgagggacaagaaggctttatgaacgtgccgaattaagaagagagcgattgcttagagtacttaacattttgggattcctgccttctcacttcagcgaacagatagactttattgttcatccagggaaattcaagaacaacgcagagcctctgcttccatacaggaaagccgtcaacggaaagaatgatttcatctttaaagactctttcaacgaaatgttagcagactttgccaagacacaaccagtacttgtatccgaaggaaagaaagtgccatacgactggactatctattaccttcgtaagaaagcacttacccaccccatccgaagagaggaactggcttggatactccttaacttcaataccaaacgtggttattatcaattgcgtggtgaagaagacgagttggctaccccacagaatgaggagtacaaagtactcgaggttaaggaagtcaaacaaactgacgaggataaaaaacggcgtggtgtgttctggtatgagataacgtatgagaatggcgctgttcaaaggaagtctggctctgttgccccaaggaaagttggtgacaaggttgaactgatagttacaaccaatatcgacaagaaggggaatgagtcgctcaaactaagagatcctaaacctgacgactggacgcttatgaagaaacgttcggagaatgccatccagacgagtgggaagcaagttggcgaatttatatatgatatgctactggctcagccagatgtcaagataagaggtaaactcgtccgagtgatagaaagagatttgtacaaaaaagagcttattgccatacttgacaaacaaaaggagtatatccctgagttaaccaatccagacatatataataaatgtatacgcgaactttaccaaaataacgaggctcacgttgactctattatagacagggacttcacggatttctttgtcaacgacatcatattctaccaacggcctttgaagagcaagaaaagcgaaatagccgactgcccgcttgagtcctatcattttgtagataaagagtctggcgaggttattaaaaaggctattaagtgtatctccaaatcccatccgctctatcaagaattccgcttgtggcagttcgttcaaaacctcaggttataccaaagagagaaagtcgttaacggcaagttgaagatggatgttgatgtaacctccgaattcatcaaaacggaagaagatgtctgtcaattattcgactggctgaacgaacgcgacgctgtcaatcaagaccagttcctgaaatataagccattcggcataggcaaagacactgcaagataccgatggaactatgtagaagacaaagtttatccttgcaacgagacccatcacgctattctgaaatgtcttgctaaggttgatggacatccacaactcgacgggagccaagagttggctctgtggcacatactgtactctgttgatgatgtcatcgaactgaggaaggcactcacttcatttgccgaccaaaacaatcttgacgtaaactcattcgttgagggattctcaaagatgaaaccattcccatcagactatggtgcctactcagagaaagccatcaagaaacttctgcctctgatgcgcacagggatatattggaatgcagaagccattaatccaaaaacactggaaagaatcgataatctgatagagggggtcgtcgatgacaacatttcgaacagggttagagaaaaggctattcatctgcagcaactggaagacttcaaatacctgcctctgtggctgaccacctatattgtctatggcagacattctgaatcaagtgaaatagcacgctgggaaaagcccgaagatattgacgattacctccgtaacgtattcaagcagcactccctccgtaatcctgtagtggaaactgttatcggcgagatgttgagagtggtacgtgacatctggaagacttatggaaagatctctgaagtacatgtcgagatggggcgcgatatgaaggccaatgccaacgagcggaagaagcgttcagaaaacatcagccgcaacgaacgcaccaaccaacgcataaggctgctactgcaagagtttgctaatccagaatatggcattgaggatgtacgtccccaatcaccaagtcagcaagagattctgaaaatatatgaagaaaatgcactaaacggcaacgaagacatccctgacgacattcttttgattgccgacaatttgggaaatccaaccaagcatgtcagcaaatcagatatgcaacgctatcgcctgtggcttgaacagaaatacaaatcgccctatacaggcaggcccatatcactctcaaaactattctcgccagcctacgagattgagcatgtcatacctcaatcacgctatttcgatgactcattaagcaacaaggtcatctgcgaaagcgaggtcaacaaactcaaagacaggatgcttggctatgaattcatcgtcaaggagggtggccggattattgatggcaaccttggcggacagatgaagatattcacaaaagagcaatacgaggagtttgtcagacagcactatggtaacaaccgtaccaaaatgcgcaaactgcttatggaagacattcccgatggatttatcgagaggcagttgaacgacagccgctatatagccaggaaaaccattgagattctctccaatatggtaagggaagagaacgagacggaagccacctccaagaatgtgatcaccaccaacggaaccattactgaccgcctgaaaaaagactggggactctatgatgtatggaacgacattgttgctccacgttttgaaagattgaaccagttgactggcagcaatgactatgggcgttgggtgaaccaaggtggaaagcaatatttccaaatcaatgtcccattggctatagcacaaggctttagcaagaagcgcatagatcaccgtcaccacgcgatggatgctatcgtcatagcatgcgctactcgcgaccatgtaaactacttgaacaacaagtctgccttatcgtcagagaaggaaacacgttacgacctgcagcacaaactttgtataaaggttaagacagatgccaacggcaactacgcctggcagttcaagaagccttgggacacatttacacaggacagccgaacagcattacaatccattatcgtcagtttcaagcaaaacctgcgtgtcatcaccagaatgaccaaccattactggcactacgctgacggaaagaaagtgatggagaaacagaagggtggtgacggatgggctattcgcaaatcactacataaagcaaccgtttcgggcgcagtccgactccaacaggttaaaaaggtgagattggctgaagcactcaaagactggcaccagataaaagacaaagacacacgtagagccatcaaggacgttatagccttgtacaatggctttgatgagaaaaccatcctacgctatttcaaggacaggaaatacatggccaacggcaaagacatcagcaaggttgaagtctactatctgccacaagaagcagacttgtcggccacaagaacaactctcgacatcagtttcgacctgaagcgaattgataagattacagacagcggcattaaggccatactactcagacatcttgaaaacaatgggaacgacccaaagattgcgtttacgccagagggtattgagaccatgaatcgtaatatcaaagtcctgaacaacgggaaagaccacaagcctattttcaaggtaagactagccgaatcgctgggattgaagtttgcagtcggacagacaggaaacaagaaaaagaaatttgttgaggcagacaagggcacaaacctcttctttgcagtatatgaagatacagaaggaacgagggattttaggacaattccgtttaacgaggccgttgaaagaatgaagaacaggttacccgttgctgaagcagagaccgaggaaggcaagaaactgctgttcatcctctcgccaaacgatttggtatatattcctgaagaaggtgaacatgtagatgagattacagatttgagcagaatttataagatggtatcgtctactggaaaagactgtcatttcattcctcaggcgatagcctatcctatagtacaaactacggaactcggtgctaataataaagcggaaagaacttgggaggggataaccatcaaaaaagcatgtaaaaaattaaatgttaacagattaggcatcatcactaaaattcacaatcgatgatcaagaagacgctctattttggtaatccagcctatttatcactcaacaacaagcaactagtcatcaaactgcctgaaattgagagtcaagacgatttgccagatattatcaaatcacaatctgtacggacaatccctattgaagatattgggattgtcgtactagaccatcaacgcattactatcactcaaggcgtcatagcagcccttcttgccaacaatgtggctttcattacttgtgatgaaaagcgtatgcctacaggacttcttcttccgctgcaaggcaacacgctttacaatgagcgattccgaaatcaaatagaagcctcactaccattaaagaagcaactctggcagcaaaccattaaggcaaaaatagaaaaccaagccgctgttctcaagaaaaacaatagcaatgcttctgcgaacaacatgtttgcttgggctcgtgacgtaaaaagtggagaccctgacaactacgaggcaagagcagcagtctactattggaaaaacatatttaaagacaagccagatttcattcgtgaccgagaaggtgaagttcccaacaacctgctaaactatggttatgccatactccgtgccacagtcgcaagagcactggttatgagtggactgctacctgtctctggcattcaccaccacaaccgatacaacccatattgcctggcagatgatatcatggagccatatcgtccttttgtagaccaagtagtacttaatataatgcagaagatgcccatcccggaagaattgacaacagacataaaacgcgaattgctttccattcccgtcgttgacgtttggataaatggaaaacgcagtccgctgatgatcgctgtctctcagactacagccagccttgcaaaatgtttcaatggcgagttaagaaaaatcgcatatcctgccataatatgatagaacggctaaacgaatatcgagtcatgtgggtgcttgtactctatgatttaccaactgaaacaaagaaagaccgcaagattgcagccaagttccgtaaagatatcatgagtgatggattcaccatgttccagttttccatatatgtacgccattgtgccagtatggacaatgcacaggtacacattaagagagtaaaagccctacttcctgaacatgggaatgttggtataatgtgtattacagacaaacaattcgctgatatcgaaatcttttattgcaaaaaagaaattcgccctaatgcgccttatcaacaacttgaactattttagaaagatggattttgccctctcgagcaaaacccatcttcaataccccaatcttttttcttttctaaacaaatccacaaagtactcataataagtgacttacgccaattcaggtgtttgcagccctattggggataagtaaattcagctaatcacaaccccctcgccgatgcacccgcatcgtcaaagcggtgtttgcagccctattggggataagtaaattcagctaatcacaacatactacaaaatcttcgtaaggctcaccgtggtgtttgcagccctattggggataagtaaattcagctaatcacaacatacccatacgaatatgcaacactcagaggtgtttgcagccctattggggataagtaaattcagctaatcacaacacggcaccgaacacaccgcctgacaatgcggtgtttgcagccctattggggataagtaaattcagctaatcacaacatacaccgagtaacggtgaagtaccctattggtgtttgcagccctattggggataagtaaattcagctaatcacaaccgagcgcgtagccttccacaccttgatcttggtgtttgcagccctattggggataagtaaattcagctaatcacaaccataatcttctgccgctgttacccgttgcggtgtttgcagccctattggggataagtaaattcagctaatcacaacctccgcgagtgcaaaaagcattgtaacctgcggtgtttgcagccctattggggataagtaaattcagctaatcacaacacataacaataattgggtttaggtaatcagggtgtttgcagccctattggggataagtaaattcagctaatcacaacagtgcaaatatacaaacattttccaaactggtgtttgcagccctattggggataagtaaattcagctaatcacaacgttttttttcttatatttgcaaccggttagggtgtttgcagccctattggggataagtaaattcagctaatcacaacctttcgccagttcatcttgcaattccttgggtgtttgcagccctattggggataagtaaattcagctaatcacaacgcttaggtctttcccgtgcaagccgcctccggtgtttgcagccctattggggataagtaaattcagctaatcacaacgctaaaggaatgtggctgcataaaacctcggtgtttgcagccctattggggataagtaaattcagctaatcacaaccgattctgccaccatttcttgataatctcgggtgtttgcagccctattggggataagtaaattcagctaatcacaactggtgccgctgtaggtggcctgctgagagaggtgtttgcagccctattggggataagtaaattcagctaatcacaacggtcaagcatttcatcgatgcgggtcatgcggtgtttgcagccctattggggataagtaaattcagctaatcacaaccgtccacatattccttgtcggcaagcgggtggtgtttgcagccctattggggataagtaaattcagctaatcacaactaggtgttcgccgtgacggtttccttcagggtgtttgcagccctattggggataagtaaattcagctaatcacaacccacacccatcaccaccttcaccatcgaggggtgtttgcagccctattggggataagtaaattcagctaatcacaaccaaccactacgacagaaaagagacacaatgggtgtttgcagccctattggggataagtaaattcagctaatcacaacaacaagaatggtagaactaacaaaagaccgggtgtttgcagccctattggggataagtaaattcagctaatcacaacaaactcttctctcacctgcatagaggcttcggtgtttgcagccctattggggataagtaaattcagctaatcacaactggtgtatcaatacctaaaattaaagtatcggtgtttgcagccctattggggataagtaaattcagctaatcacaacctccgcgagtgcaaaaagcattgtaaccttggtgtttgcagccctattggggataagtaaattcagctaatcacaactaggttgatgtcattttgaggttcgatgtcggtgtttgcagccctattggggataagtaaattggtctgtatcaacatttcaaagaactaaaacgggaacagaaagaatatttctatacatttgaaaggcaaagatattaaaaagtgctattataataaaagtaaataccaagtttaaccgaattttaacacataaatgaatgttgcaatagtcatagagggaacagattccatttgctacagatcgatagtcgctgaccgtcaggcccgccgtgcctatctggtgggcacagactcctgccatgttggctatgtggtctgcattgattaagggaaagcccagcctactgccccagtcacactttactatactgaccctatgccagactttggcaaccatcatcctgtgctcatgcctgacggcaatctggctgttgccgactgccatcattctggtggcactctgccttgtgattcttaggctgcggatcaaaaaagggatgctcgttctcctccttcatcaacggctaccgtatagactatgccaagcagcttctcatcagccagcccgacaagaagatatccatagtagccatcgagtcaggcttcaccagcgagcagacattccacaccaacttcaagcagataacgggcctgacaccccgccaatggctctcccaaaatacaaattcaactaaggaatcataaaaagaggcgaataaatttggtattttaccatataatatgtatctttgcatcgcaaaaaagttactaaattcgtgaccgtactcccgatttttatataaatttcgggagtacgatacagaaattaagaggttctatgtacaagagaatatttgatattgagagtaaattggatgaagggatgtttctgtttggtgcacgtcagacaggaaaatcaaccctcttaaaagaacggttcaaaggttctatttattacgatttacttaatccaaacataagaaaggcatttaagcagaatcccaactccttatgggaggctcttcaagacaagccagccggtacgcttgtgatagtggatgagattcagaaggtcccggaactgcttgatgtggtacattccttaatggtggacagggggttgttcttcatcctaagcggttcaagtgcaagaaaactcaagcgctctggagctaatacacttggcggtcgtgccatacccgaaacactttatcctcttgtatggccggaggttacagattttcagattgaccgcgctgtccagaatggtatgattccccgtcattatatggtagaagatgctacgaagcgtctttcgggctatgtgaaggtgtatttggatgaagaaatcagagaggaaggagaagtgcgggaactcgatgcctttgaacgcttcatggaagtggccgctatatcagatggcgagatgctaaactattccaacatcgcctctgactgcggtgtgtctgccaaaacagtcaagtcgtatttccaaatcctttatgatacgcttatcggatacgaaatccctgcattcaggaaagaaatcaaacggaagattgtccaggctccacgattctactattttgatgtgggactggccaactacctgatgggacgacataacctgaaacggggtactgatgattacggacatgcctttgaacaccttgtaatgcaagaaatcatagcatacaaaggttacaatgacaaacgtgacgtcatctcttattggcacacatacgacaagaaagaagtggatgttattattggtgacgcgaaagtggctattgaaatcaaatcaacggagcatgtggagaccaaacacaagaaagggctcaaggctttcaaggaggaacatcccgactgccgactgatgcttgtgtccctcgatccgattacccgtaagtcaggagatgaagaactgatatacgttcttgatttcctaagaatgctttggaatggtgagatattttaagaattcgactaaggaatcagaaatccacggttgaacgaatgtcggcagaagaggcaccgatctcgaaacggatggggccggtctctcggacgaacacatgggctgactcgtcccaatggctgaggtcttgccggtcaaccgtcagcaacacttcacgagacgcccctgccggtatcgctacccgctcgaaggcacgaagttggcgcacgggctgctccaccacagactctggataacctgcatagagctgcaccacctcctcgccgtcgcgactgccagtgttacttaccgtcacggctaccgtcacgctgcgcttgtcttgcttctgaatccgcgcctctccatattcgaactgggtgtaactgagtccgtagccaaagggatagagcaccggtttacggcagtacatataggttcgcccgtgacggatgtcatagtccataatgtcgggcagatcgagaatatcgctcacccaggtctgtgtggtgcgtcctgcaggattatacttgccgaagagcacatcggcgacggcgtgcccctgttcctggctgcaatgcgatacgtggaggatggccggcagatgctcgttgctccagttgatggtataggggaaactgctcaccaagaccaagaccgtgttcggattgacggcttgcatgcggcgtatctcgtcctcgtcaggcatctgcagcgagtggcgatcattggcctcgcgtccgtcgctgggcacagggcagaacttccagtcggtccgtgtgccgtaagggtggttgcctgtgcatacgatgaccatatcagcctcgcgagccatccgctctgcccgtcccatctgattgtctggcgcataggatatacggataccctgcgcctcagcctcctcacgcatggctttgaggatggtcacctcgtagggcggcgtaccgctataccagtcgtagatgatcttgtcggcgtaaggcccgacgatggcgatggtcttcaccttcgagggattgatgggcagcgtctgatgctcgttcttcagcagcaccaccgacttggccgtcacctcgcgcactgtctggcgcacctctggacggtcgtatggcggcgtggccgtcgagtcgcgccctatcgcatcgtagggattctgcgtatgacttccgtcgagcatacctaatttgagcgccacgaagagattgccacgtatcaccttgtcgatgtcggcctcagtgatgagaccctgctcgagggcggcctgcacgtggggcagataacggtcgaggaactggcctgtgccagccttgatgacacctgccgcagcctgggtgaggtcggggtagtagtgatgggccgtgacaagcatctggaaggctccgccgtcggtacagatgatgccgttgttgccccactcgtcgcgggctatctgctgcagacagggatggacacacatcgggacgccgttccagcagttgtaggatgccatgaaggcgcggctgccaccctcggtgatacctttatagaaaggataggagtaatactcgcggaagagccgctcgtcgtagttgctcgacgtggagtcgcgtccgtcctcgttgctgttggcgaggaaatgcttcatcagtgctgcggctttccagtagcggggatgatcgccctgaagaccacgcaccatcgccaccgagagttgcgccgtcagatagggatcctcgccaaaactctcctccgtccggccccatctggggtcacgcgccaagtcggcattaggggcatagacgaccagacccttgcgacgtgcttccggccgccggatatagtagcgggcctcatcggcctcgatgtcacccatccgacgtacggcctcacggtcccacgtgcagcccataccataggcctgagggaaaatggtggtgggcaggtcattgggcacctcgcggccatctacggtctttcgtccgttgttggcagcaggtccgccgagggccagtccgtgcagaccctcatagcagctgagtgatgggatgcccagacgaggcacgccgagattggttgacagcagcgagagtttctcgtcgagcgtcaattgcctcagcaacaagtctatacgcttgtcgtccttcaacttcgtgttctggaagtcatacttctgcgctgctgcaccctgtaccatcagcacagctgccatcagcaagaatagtctggtttgtttcatattcatttctgtctttttggttgctgcccacaaagttagattcatactggattagagccttgcggctgatcctgcggctcttgttgctcctgctgctggggctgtggttgttgtccctgctgttgttgaatgtcctgctgctggttgccctgctgctgacggttctggttgaactggttgcccatcggcatgtcgtcgaagtcgccgtccataccctcgcctccgcctggccgtttgtcgttgttcatattgccaaagttccaactgatggtggcgaagatgcgcgagtcgcgccagttgcgctgatggcgagtgaaggtctcgctgctggtgaagttttcccagcggcgactgctgaacacgtcgcgccagttgatgctcaggttaatcttcttgttgaagaacgacttgcgcagtccgaggtcgagcgactggttggccttgcggtagccctgggtgatggcgccgcgcgagcgcaggttgcctgtagcctgcagcgtgatgtcgtagggcagcatgatggagccgagtatgcgggcatcccatgagaaactctcctcggcatcgccagtgacggtctgacccatgatgttatataaaaaaccgtccaccttataataatagccgttgagcgtcgtcgtgagatcgaggacacgaaagagtttatccttcaggatcaactccagacctgcccgctggttcttggccacgttctcgctggtcatgtacatgatgccgtcggcaccctgatagcggatgcgctggatgacgtcggtcgtcggacggtagtaactgctgaggctcagcgtgtggttctcccaggtcttgaggaagttgagcgagaacgagttggtgtactccggcgtcagttccggattaccaaaggacaccattgaggcgtcgcttgtattcttgaacgagttgagttgtccgccccagggccgacgcaggcggcgcgtgtagttcaactgcagttgagccgactctgtcagttggtagttcaggaagaggcttgggaacagttggaagtagtctttcttgaaaggctcgtcgcgcttcgaaggattgttttcctgctcgtaggtgtaactctcggtgttcaccttccagtattcgccgcgcaggccgcccatgatgccaagtttgccgacggaggtggtgacggtggtgtagagggcgtgtacgtccatatcgtagatgaagcggttatagtaggcctcgtcctgctggaggttcatgcccgccagattgtcggtcgtccactgctccagcggcgtgttctcgtgcgagaagcgtccgttatagcctgcctcgagtttgaacttctccgtgatctggttctcgtaatcgagtttggcttccatcgagcggttccttacgtgcatgggacggtattggtagagttgagtgttgagtgttgagagttgagtgttgagtgacgtgggacggatctcgtcgcgatagacattgtcgttatcgctcatccagcggttgaacgagaggttggccttcagtttatggaagtcggtccagttgtgctcgtagcccacttcgccgtgatacatgtgcatgtcaccctcaccggtgttacggcggaacatctgctggtagggctgctgtccgatgatgccgtagtcgtaggtggtgcggctctcgttgtcgttggtaccctgcatggtcatgcccgagacggagatctcgtccttacgggtgacgtgccaagccagtcccatgcgggcgaagagattaccgcccttgttatcgctctcgccatcggagttctggtactcgttggtcatcaggtactcctgctcagccttggtgccaccactgccggcacgacggcgatagcccaggttggcaaaggcatcgagcacgccgctggagtagttgaagttgccgccagtgttccagccgccgccactgttgccacccgcccgcagcgaaccgtagtagccagccttgcggtcgcgcttcaggatgatattgatgatgccggcagagccctcgggcgagaacttggccgataggttatcgatcacctcgatgcgttcgatgctctctgcgggtatctgctggaggatctcaccacggttgtccgtcgtcagtcccgatgcctttccgttgatccacacctctacgctgctgttgcccctcagggatatctcgccatctgtggtcacctcgatgctcggtatctgctccagcagatccgaggcagagccgcccgccgacgcaatcatctggtctacgctgaagaccttgcggtccacttcgagtttcatctgcgaacgttgtcccgacacggtcacctccttcagcgtcttcgtgtcctctgtgatgtagagggcgttgaagtgtgcctgccgtcgatcgctggtgatggtgaagttacgggtttcatccttataccccatgtaactcaccaccaactgataactgccattggcaagcccaccgatgttgaacgagccgttcacgtcggt

SEQ ID NO: 474 - DNA, 20614 bp, synthetic construct
  source 1..20614: mol_type = other DNA
  misc_feature 1..20614: note = Synthetic
tgcatgatagcatgcagcaaatggcaatcatcaaaattcttatcattcttttcatttcatccattctaatcatttttttcataagccacaatatttaaaagtttataatgtctatttgcaatgtatgtttaaacatcctatattatatgttatattatatgctattctttatgaattagacgcatgatatccccaaatgtttaagtacaatgcctatcttgctgataagggcatagatggtctatcaaaaatagtactctaatatgatatttgaacgtaagaaatacttggatgaactgcaagccaaatgtttgattcaactgccatctacgattccgtttaccaaaaactacgatatcatgcacctatatctacgaaatcatgtactttaaactacgaatctgtttaccaacatctacgaaaccatttaccttaatgaatgtaaaatactaataatcaacaagttgacttacttgtaattataaataatattctaatttttaatttataaaagagattttatcgaaagaatggtcagaagtaaatatgtgattttcagatacttaatcatttgcaagtaaacgatttcgtagatgttggtaaacagattcgtagatttgatgccagtaaatactgaaatgatgatataataagccaatcatcacaaatatctacgaaaccatttacttcacagtggtaattgtctgatatttagaaggataagcctcataattatagttttaattttgatttaccctattttgaaggtaaaataatagttgctataagtgtcagatattcagtaagttgtaaactttaggtaaacagattcgtagtttttgctttgatttccttattgcccatgcgccatatctacgaaactatttaccttagtttgtagaaatcactaataatgagaggtttgtaccttttagatgaattatttctttacagaattgttttcatttttcatttgcaaaagtctatgtgatacaataataaatacctcattatcagatatatagagaaataaggtaaatactttcgtagatgtaagagcataatatgaagatgaaagcatgccgagcagggcttccaacctctttcctcccctaccctgcaacctatctgcgtatctatgtactttcaactacgaaactgtttacaaatatctacgaaactatgtacctatatctacgatttcatttacctaaaactacgaaactgtttacctcgtaacctataacttcttgaaaataagtaaattagcttctttgtaattatataatgattttaatcataacttataaaaacaattttaatttagaaatatgaggcataacataccgattatcagatggatagcgaaaactaggtaaacactttcgtagatatataaaaaagtttcctttggagaaggaaatctcttcatccaaaggaaactcgactcgtgtctttattagtctctataaaatgtcggtgaatacgagcctttacagttaaaaaattctttagctatatcttctacgcccagagttctcagcaagtcaaagtcttcctgtgtggccttgacgcaaaacctgtcgtttttcattcctacaaatttgaatcttttaagcaaagcctgctgacttgggtcgatgatcatcgcctggaaactttgccacttgtcttccccacccttcacgattttgatcttgggtgattccgttgtattgacatgggcaaacaagtcgcctatcactggttccttgttggcttttcccatcttctgttcctttctctccaagaccttgccatcgatgtgagcctttcctagtgccgtcctctttaccttgaagagaagagcctcaggattacctctcgtctggccacgtttatataccggactgcaatcggtgaagacgatgtcggtcttgtcttccttgctaagtttggcgaagtctgctttgacagcatccaatacttgcttcttgaactgtgagaacttcggatattgctcctctaccaccgtaccatcagccgatagggttgccatgcccagatattctttcagtgccatgaagggaacttggaaagtcatcttgcctttgttgatgcccatctgtctcaataaaaacaaatagattcgcggagtattggccctgttggcgtatcttgcaatcatcgccatgtgatggatgaagccttggctcatgtcgaaggcatatttcgccactacagggtcgattttcagttccacctcccctttagaacggtcgtatgccacgccttccttggtatatccattgatgaccacatcctccgtaatgttggagaaaacgtgctggatgaccaccttaccgtcaatcttgatcctgacgctgaagtccaacaattccttgagggctttgcgcaagtccttataatggctggagtcgatgcccagttcgttgagcttcagtcgaatcttcggcacattcatcgccacgtgctctttatcgacctcgaagagatagtctgaccgaagcccacccttctctctcttctcgttgaagaagcgtgtgacatactcctgaagatgcgaactgacgcaaaatagcacatgctgctgcgacaaggagtattgcttgtctatcttcgtgaagctgaatggggtgttgatccactgttcattcgactggatgatttcgtttttcttgtctgtcatgctgcaaaggtacgtttttatttgtttatgtgcaaataaaatgccaaaaaactctcagtttccttattgattttatctgaattcttacaaatccgacatgtttgcgtgtttgcatacatgcaaaacaacaaatttgcatccacacaattttgcatgcagtattaaatgaatccatacatgtttgcaagtggagttggaggttaatttgtcagtttgcaaatgtaaatgtttgttttcaaaattgcctaaatgtttgtttgattggatgcaaaaatgcaaacatatttgaaaaatagtttgtcgtcatgcaaacaaatttgcaaaataatttgtttgtatgaatattaaatcgtatctttgcagcgtctttataaaatataattggtgaaaatatggaaaacaagttgaaaatgatattggccattgtcaacaacaagggtggggttggcaagaccacaaccgtgcagaatctagctgccggtatgcttcgcaagaacaagaaattgagaatcctcgaaatcgacttggaccctcagtgcaacctcacgcttctgaatcatgctccagaagggtgcgccaccatcttcgaatctatgatagagtgcaagggattgccaatctataagtcagagattggggtgtattatgtacctggttctgccaagatgcaggatgtggatccattcttgcagaacaccggcgctcctagacaagtgttgggagcgtgcatcaacagtgattcgatagatatgacgggtgagggcatcaaaaatccgatcgactatttcgattacatcttcattgattgtcctccagccttgtcgcaatccacctataatgccatggtggtggcgagccatctcttggtgccagtccagatggagggtctgtctgtcaatggtttggctgccatccttggagcaatgaatgaggtgaaaaatggtcgtttcgccttgaacaaggatttggaactcttggggttgttaccagtcatgttggatgagaggccacgtatcgtgcgtcaagcattggcttatctaaaggagagctatggtgatgcagtcctgaaacatggcatccgccgctgcgtgaaggtgaatgaggcacagacagagatgactgaccttttccactattcgccttattgcacggcagccatcgactatagtgaggtaatcaaggaattgtttaatctttaaagcttaaatgattatggcaaaggattttcgtgcggcattcaataatatgaaccaggcagttcgtcctggggtaggggagtctcagcaagttccagcacctgcagctccggtggttaaggaaaagaagatgaaggcggtagaaaggcgagctcagttgcatggtgttcagacctacttgaacgatgaggagtatgaacagttgatgctcaccaagctgagaacgaagaagaaatttgaggaaatcttgcatgatgctttggtgcaatacatgaagaatccatcgtaagtctttgatatgcagatagctaacttgaaatgttgtcaagatggcatgaatgaatgtgtggatgcacaaatgcaaataatccgtcatgcaaaaatgtttgcatgacggattaaatcacagtataatatgactatagaagaaatcaaaagcagaaaggaagaccaaacctttgactgcaagagcatacagatagacccgaaagcattggcagtacctattgttgcaatggctaatgctgatggtggcatgcttgccatcggagtatcggataaaacacgacgcattgaaggcatcaaccaatataccaagcagttgaatgaactactccgagtgccgatggatttctgcacaccatccgtaagggttcagtattcttatcttccttgtatcgacagtgagggaaatgagaatcgaatcttgctgatgcagatacctgccagcagcttcttgcataccaatcaagctgatgaggcttttatgcgtgttggtgacaaaagcagaaaattgagttttgatgagcgtatgcagttgatgtatgacaagggagaacgaaattacgaggacgaagcggcgtatggcgcaaccattgacgatgtggatatggctgcagtaaacgagtatattaaaatcataggctacggaaagtcggcgatgcaatatctctttcagaataatgacttcgtgaaggaggttgatggaaagcagaaagtgagcaatgcttgtgtgctgctattcggcaagaacccacagagattcttcccacgcgcaagaactcgattcattcgatatgagggaactgaggaaaaggttggaacggaaatgaatgtggtgaaagacgtgacttttgagggaaccatcttgcatcagattgtaaaggcgatagaatatcttgaaacgcaggttcgtgagcattcgtttttggggcagaatggacaatttgtaactaaccgtaactatcccaagtttgccatacaagaaatggtggtgaatagtgtctgtcacagagattatagcatcaaggggacggaaattcagataaagatgtttgacaatcgactggtgtttgagtctccaggtagattgccaggtttggtaagggctgagaacatccgccatacccatttctctcgtaacccgaaaatagcgcaattcttaaagtcgtatagttttgtcaaggagtttggcgaaggtatcgaccgtatctgcaatgaactcgaaagtcgtggctcaaccattccttctttccatactgatgcctttatcttgaaagcgacattgatggcagaatttgtggacgaaagtgtagatgttgtacagacggttggcggaacggttggcgagttgaaagtcgcagtaaatggcgaaattcaacttactgaaagacaaatagatatacttcatctaatagataatgatgtcgcagatatatcccaaaatgtcgcagtaaatgtcgcagtaaatacaaaattcttagcagatagtttagggcttaatcgtaaaaccatacaacgagagttagcctggttacagaaaaacaatcttgtacgctgggttggcgcagataaaaatggacattgggaaacaataaaaaagaaataatgatgtatcattcttcttttgggtagttctacaggctgcaaagaaatcatgcttgatatgtattgtgaagccatgttatatgggtaagccgtgtatgatgacaactgctggtaggacaagccaaatgatagcacattgtggctattgaaagacaaggggcagcccaaattttgctaactataaagtataataaagggcgagtcaccccgcccaaaatgtgttcacaacggaataatccttattgtgattagctaaaaattgttgcaaatatacatattttttcttaaaagagcatatttttttaaataaattcactatatttgcgacaaaaaaacaaaaatatacctattatgaagaaaattttaggcttagatttaggaaccaatagtattggttgggcattaatagaagctgatggacataaaattatcaaagcaggtagccgcatcatcccaatggatgcagctaccataggtgactatgagaagggaaatctgaaatctgctgcatcggaaagaacaggctttagaggtacgcgtcgactttacgagcgagctattttgcgtcgtgagcgtttactgagagtgcttaataccatgggattcttgcctgattcgttcgcaagacaaattgattttgttgaacaccctggtaaatttaaaaaccatggcgagccattattagcttactgtaaaaatgagcaaggtaaaaatgaattcttatttaagaatgcatttcaagagatgttgactgattttaagcaacatcatccaaaactagttagcaatggcaaactcataccttatgattggactatttattatctccgtaaaaaagctttaacccaggctataaccaaagaagagcttgcatggattatccttaattttaatacaaaaagaggctattatcaactgcgagggatggaagataatgaaacgaccaatacagaaaatactaaattggaggaatataaaattctaaaggttgtttctgttgaaaacattggtatcaacaataagaaaaaaggctacaactggtatcagataacttatgataatggagcgtcacagaaagcctcatctccggttccacctcaacaaataggcaatcttgtagaagtagtcgtgacttctacccttgacaaagatggaaatgtcaaaaaggataaggaaggtacaccaatgataaaattgcgtacaccaaaagaggaagattggactttggtgaaaaaacgcacagaaaagaatctatccgatagtcatcagactgtaggtaactatatttatgaacacattttaagtaatccaagcataaaggttcgaggcaaactcatccacaccattgaacgaagcttctataaggaagaactcaagcttatcttggcaaagcagaaagagtttattcctgaattaaacgacatacaattatacaaaaaatgtatacatgaactttatcatcataatgaagcacatgtagaatcccttatgtctggtgactttaccgatctttttatcaatgacatcatattttatcaacgtccattgaaaagcaagaaaagtctcattgctgattgtcctcttgaatcttatttctatagagacaagaaagatgataccataaaatcttgctctatcaaatgcattccaaagtctcatcctctatacgaagagtttagactttggcaattcatagctaacctcagaatatataagagaaaaagtgaagtcaatgggatgttggttacagattatgatgttacttctgaatattttaaagattttcagagctattcctctttgtatgattggttacaaggcaagaaagaaatcaagcaagagcaactcttaaagtacaagccgtttggtatcggcaaaaatagtggcgagtatcgttggaattatgtagaagataagatatatccttgttgccctacgagatacgagattaacaaacgtctcttaagcctaaatacaaaggaattagatgaggatagttatctacatctatggcatattttatattctgtagatgacccaatcatgtgccaaaaggctctacgtaaatttgctattgctcacaagtatccaacagaagaatttgttaacacgttcaagcaatgctctgttggttccaaagattatggctctttttctgaaaaagcaatcaaacgtcttctaccattaatgaggatgggtaagtattggaatgaagacgatatagactcaaagacacgttctagaatcaataacattcttgatggtgtcgttgacgccaatatctccgaccgagttagagaaaagaccacacatatgcaagctattacagatttccaaggacttcctctttggatggctagttacattgtgtataatcgtcattctgaagcgtcagaaataataaaatgggaaaagccagaagatatagacatctatcttcacactcatcttaaactgcatagcctgagaaaccctatagttgagaaagtcataaccgaaacgttaaaggtagtgcgagatatttggaagaactatggcactattgatgaagttcatgttgaaatgggtcgtgaactcaaaaaagatgctaaaagcagaagccaagatgtactcagaatggcagagaacgaacgtacaaatctcagaatacgagcccttttacaagagtttgtcaatcctgactatcacatagataatgtacgtccatattccccaagccaacatgaaacattaaaaatctttgaaaatggaattttatcagatccgactctcgagatcgaagatgacatcaagaatatcatcgacagtcttggaaacacaaaaactgtccatgtcaagtcatctgatatcatgaaatataagatgtggcttgaacaaaagtataagtctccttatactggtcaaatcattcctttgtccaaactatttacgccagcctatgagattgagcatgtcatacctcaatctcgttactttgacgattcactcacaaataaagtgatatgtgaaagcgaagtaaacaaagagaaagatcgtatgcttgcctatgaatttatatctaaaaaaggtggcagtatcataaaaggtaattttggcaaagatattaaaattctggacaaaaagcaatatgaagactttgtgcagcagcattatgcaaacaatcgtacaaagatgaaaaagttgttgatggatgacatccctgatggttttatccaacgccaacttaatgacagtagatatatgagccgcaaaatgctcagtattttgtcatgccttgtcagagaagacggtgaacaagaagctatttccaagcatgtaatcccaactaatggagccattacagaccgtttaaagaaagaatggggtatcaataatgtttggaatcaacttatagctccacgttttgaacgcctgaattcaattagtggcacgcaagactatggtcaatgggtaaataaaaatggtaaaaaaatcttccaaataaatgtgccacttgaattgtctgcaggattcagcaaaaaacgtatagaccatagacatcatgctatggatgccatcattatcgcttgctctagtagagaacttgtcaattatctcaacaatgttgcagctttgtcctctaaaacgaaagagagagttgacttgaagcacaagttatgtacaaaagtcaaaacagatgacaaggggaactatatttggcagtttaacaaaccgtgggattcattcactcaagacgttgcttcagaattaggcagtatcattgtcagttttaagcaaaacttgcgcattattactaagatgagtaattattatactcattatgttgatggcaagaaagtacttgataaacaaacaaaaggtgatagttgggccattagaaaatcaatgcataaggctacggtgtctggtctcattagtttgcaacaaaagaagttggtcaaactctctgatgcaatttcacaatgggagcagattgcagacaaggacctgagaaatgaaatagtttcacttatcaaacaataccatcaatttgacaagaaaactttagtgaaatatttcaaggacagaggtaataaattgaatggcagagacatttctaaagtgcatatcttccattatagtggaattaaagatggaatagcagcaaccagagtatccattgatgaaactttcgatactaaaaaaatagaatctatttctgatagtggaatcaagaaaatcatgcttgctcatctgaaaaaatacgatgatgaaaaaggatcatcccatccggagatagctttttcaccaaaaggaattgcttctatgaatcaaaacatcaaggacctaaatgatggcaaagatcacaaaccaatatataaagtaagaaagactgaaactttgggaatgaagttcaatattggcgaagtaggaaataaaacaaaaaaatatgtagaagcagataaaggaacaaatctcttttttgcagtttacatcaatgagcaagaagaacgctcttacgagagcataccgttgaatattgctatagaaagaatgaaaaatcatttgaaagtagcagaagagattaaagaggatggcagaagactcttgtttatactgtcaccaaatgatttggtttatttgccagactcagaatcaaggaatagtatatataaaatggtgtcttgcacaggaaatagagtgttcttcataccagaaacatgggcaactgtcattaacaatggctatgaattgggatctttaaacaagattgaaatgtcattagaggaactaaatatcaaacagagatgtgaaaagatagaagtcgacagattaggacgcatcataaaaacatataaataaagagcctatgataaagaaaacattatattttggcaatcctgcttatctgtcattaaacaacaagcaattagttgtcaaactaccagagattgaaaaaaataaggaattaccagaagtcgttaaaaaaacttctggtaaaactattcctatcgaagatataggagttgtaattctcgaccataaacagattactattacgcaagcacttatagaagccttgttggacaataatgttgcactggtcacttgcaatgacaaacgaatgcctacaggcttattcttgtctttacaagggaataatactcaaaatgaacgctttagaaaacaaattgaagtatcccaacctctcaagaagcaactttggcagcagaccgtaaaagccaagattgagaatcaagcaactctgctagaatctcaaaccaatcaaattgctaaaaatctgcgaaagatggcttcggaagtaaaaagtggagattctgacaacaatgaagcccaagcggcagttttttattggaagcggatatttccatcttttccaaacttcgtcagaggacaagacgaagaccctccaaacaatcttctcaattatggatatgctatactcagagccattgtagctagatcacttgttgcaagtggtctattgccaatctatggaatttttcatcacaacaagtataacgattactgtttagcagacgatattatggagccatatcgtccattcgttgaccaacaagtaattgaaatcatgaaaagaaatgagaatattgatgaattaactttagatattaaacgtcagcttctacaaataccagtcattgatgtaaaaatcaatggaaaaaaaagtcctcttatgatagcagtttcacaaacaactgcaagtttagccaaatgctttagtggagaaactagaaaaattacctatccttgctttatatgatagacagattaaatgaatatcgtgttatgtggatcttagtactatatgacttgcctaccgaaactaaaaaggataggcaagtcgcagccaagttccgtaaaaatattatggctgatggatttaccatgttccaattttctatatatgtacgccattgcgccagtatggataatgcccaagtacatattaaaagagtgcaatcattattaccagacaaaggacatgttggtattttatgcataactgataaacaatttgctgatattaagattttttattgccaaaaagaaaaaagccctaatgctccataccaacaattagaactattctaaaaaacagaaatgaagattctttaatcagcacagaatcttcatttctttgacaactcaatttttaattctaattattgcattaatctattgatattcagatgtatacaagaattaagttgtttttgaccttgcaaaggtactaattttttagctaatcacaaccactcttcttttgtaaattcggtaacattcgttgtttttgaccttgcaaaggtactaattttttagctaatcacaacagatttgcgctaaccatttcaaaattatctgttgtttttgaccttgcaaaggtactaattttttagctaatcacaactgcaatcagaccatactcatcaagttattggttgtttttgaccttgcaaaggtactaattttttagctaatcacaacagggtcgtcgtttaattaatgttcttggtgttgtttttgaccttgcaaaggtactaattttttagctaatcacaacaaaatcttaaagataagtttgaattgcttgttgtttttgaccttgcaaaggtactaattttttagctaatcacaacaagtactcaatagttaccgcaaaaagctatgttgtttttgaccttgcaaaggtactaattttttagctaatcacaaccataatctttaattttttatatgttctatagttgtttttgaccttgcaaaggtactaattttttagctaatcacaacccatatcatcgaacatcttcacgtcacccagttgtttttgaccttgcaaaggtactaattttttagctaatcacaacaactactacggagataccaatctagaacaagttgtttttgaccttgcaaaggtactaattttttagctaatcacaacaaactcctaagacttcttataccttgtttgttgtttttgaccttgcaaaggtactaattttttagctaatcacaacttatctttgccgttgctatcaaaccacgcagttgtttttgaccttgcaaaggtactaattttttagctaatcacaactataggctaataacttttctacatattcagttgtttttgaccttgcaaaggtactaattttttagctaatcacaactctgaaactctttggaaaatgttatacatgttgtttttgaccttgcaaaggtactaattttttagctaatcacaacgactaacgttttgatcccaaagtctgaaagttgtttttgaccttgcaaaggtactaattttttagctaatcacaaccctgtctatatttcaaaaaattcacttaacgttgtttttgaccttgcaaaggtactaattttttagctaatcacaactcattttattgttcagcattatggttgtttgttgtttttgaccttgcaaaggtactaattttttagctaatcacaacgtacgccgtgataacgttactcgccgcttggttgtttttgaccttgcaaaggtactaattttttagctaatcacaacttctatgtgctttagttgcgcaatacttatgttgtttttgaccttgcaaaggtactaattttttagctaatcacaacggtgtttcgtctctgactagttgtgcctttgttgtttttgaccttgcaaagatactaattttttagctaatcacaattggaaggatcatacttatacatctgaccaagttgttcttgaccttgcaaaggtactaattttttagctaatcacaacctgccaattgcgcgcgcaattcgtcaatacgttgtttttgaccttgcaaaggtactaattttttagctaatcacaacggagctttgcaagtgccgcggtatggcgtacctgcatagttccgtggatagggttatccaaagatgcagcatagcctatacataaagaattttacatcaagtactccatgcagttgcgccctgaagtttttgactttagggttaaatgattctgcggatgcgttagttgatctttcaacaaaatagttgaggacttggtcttccttcaacttaattgtatctctcgcagcttttacttccctcaaagttgatgcggcaaccttgtcataccactcatgcagtttggacttggctgtttccttgttgagcgtggtgtctcgaagaatggaacgtagggagcatagaagactgtaagcctccttgatttttggatactttccaaagagtacgttagctctttccttttgtgcatcagtccacttctctccactttgcagaagcatgttcctgcactttctcaggaggtctattggagtgtctccgttggacagtgttgtaggtatgtatctggcattggcacgtacaggcttgcgcccacgtttcttgcccttgtaagtcttcggatgcttctcggcatatttctggcgcttcttggcatttctttttgccatgcccatccttgttggtcaagaaaacatatacgacatggtctatggaggtctcgtctatgttcaggtgcgttcccatattctccacaagcaagttcaagtcctctgcatgattctgctctgaccaagttctgaaatcactcagatgattcttgtaattgcgctctagattgtcgccatctacgtagtaagtccggccctatgagcttacggtcacggatagggaaatcctccacttggctagattctgtaaatccgtttgggtgcaagtcgttatcatcagctgagcggttgttacgttcatccaagtagatatgaagctcactttggtatagattgtctaaacctagctttgattctccactgataggcttctcctccatgcgaactagctcaaagtaatcgagcaagttctctggaaagataaagtctagaaagtatttgtatttgctaatgtctcattctgttccatattgcaaatgtacaaaatcttatgacaacttggtgctaatagaggtataatttaatatttttatccacggaattatgcagaagccccgataaacctgtactattattctgtacccatcaaaatgaaagatctatatgctctgccaacaaatcttttgcagggacatactgtactttaccttgctcatcagcaatcacgacattttgattgtgaagtgctttttctactagcatattatgctgtgcttcagctaaccctgcatcaacacgagacaaaaagtcttctatatcacgttcactcatagctcttaattttattaaatttcaacttgtcttttatcttcgttggaatcgcctttcctccaaaagcaactctttcacccttattattgctgttatcataaatcacccaaacatctacttcgtccataaatatttggaaaagatttctgagaccagcttggtatctacgttctatcacagagagaggtatattatgacctccacttgcaacacgatctgccacacgcctcttcgccaactccacgctgttaagccagaagaacaggacatgtaccatatacccttctctttgcgctcttctcacaagattgatatacgactttgtcgccaaggtcgtttctatcgagaatgactcaccagcattcagcaactcatttattcttttgagcatcagtcttcctgcctctatcgccacaccctcaggattgaatggagagagacctttggctatttcatcagcattgacgaattccttcacaagcaaagacttgggaagaatcgtcttggaggctgtcgtcttgccagctccattgcaacctgctatgatatataaatgtttgaccatatcgaccgcaaaaatactctttttcatcgaaaccgccaaacttttacgcagaaaacttacactggaaaagaaactaaataggagaaataaagttatcacataggagatgttgtcagaatgcgattgtaaagattattgatgtgtaaagcgttttagtaaggcttttttgattgtgtatagtattttagtaagaaagtaaatttagtgtatagtaaaccagtaagtagaacaagaaaggtgtacactactttcagttaaagacacagatataagttccgtcgggatcatcgctaccgtgggatgaccggctgacgggagtcaaacgaccgttccactcccgtcagccgctcgttccactgctgtggaacgacttacggatgtacattcacatcccctctgcacgtacgcccacatcccctataaacgtacgttcatatcccttatagacgtacgtcctttccagcagtcatctgaaggaattattctgaaacaattggagaaataccacatttgtgcgattacctatttataagaaaagaagtacctttgccggcacaaatcgaatataatgaacaaaaggtagtatgacaatggaaaaggtaatggaaaaaacaatggaaatacaagacaagaaacaaggtaagaataagcaaaccaagcagttggctctgtggattggggctctgatattgggtgctatcttgggtgcattgggcatcgaagtgctgaatgggatgatgaacttcgtggcaacagtctatacccgattgttccaacttttggcggtaccaaccatcgccttggcagtaataaccaccttgtcttcgctgggcaaccaggctgacacgggcaagattttccgccacgccatcgtctataccctgctcactacgatagctgcagcagccgtaggactggtgctctacaacatcgtggctcctggcaatctgcctaccgacatggtgcagagtggcacatccgaactgcctcaaaacttggaacaaacttcctattctgaccatatcttgggtgtcatccccaacaatatcatcaaaccatttgccgagggtaacgtgctctccatcttgctcttggcagccgcagctggtatcgccttggccaagatgccacagagcaacaagaaagaggtagtcgtgaaggggctgttgggattacaagacttgcttttcatgctgattagaggtttgatatgggcattgcctttaggtatcgtggctttcgccgcccaactttcggcacaattctccgcaggaatcgtgatggattcattgggcaagtatgtagccatcatcttgggtggcaatgtcatccagttcttcatcgtcttgccattgttcctattggcaaggggcatcaatcctgtgcgtacactgagcaagatgatgccggcggtattgatggcactctttacgaagagttccgcagccactctgccagtcactatgaacacagcggaaacgaggatgggcgtatccaacaaggtatctcgattcgtattgcctatctgcaccaccatcaacatgaatggatgtgcagcattcatcctcgtcacctccctattcttgatgcagaacggaggcattcagctgtcattatctaccatgatactttggcttttcatctccgtcctgtcagcggtgggcaatgctggtgtcccaatgggttgctattttctgaccctctccctgatgtcgggcatgaacgctcctatcggcatcatgggcatcatcctgcctatctataccatcatcgatatgatagagacggctgagaatgtatggtctgacagttgtgtatgtgccatggtggataaggacatgcagaagagtatctagaagagggtttactctttccacactctctttttgagccacaatgccaatattgggtcgctcatctccagatacttgggggctgtgatcatcaccaagtccttctctatcaatgcttttttcaatctggtgatattggcagcggtaccaaggcgataattagccaatatcgcactctgcgtaaaaccagtgtgtactccattcaccaaggcatggaggaaattcatctgataggcagaaaggtcttccgtctgttggataaacaaaggctcgcaagcatccaataatcggtcgatgccatactgcacatctttggatgtagccggagtagcatctgccgtacgcaaccaaacgaaccatgccagctgttgaacataagaggaatatctatcagtaaccaagcatatctcacgtgccaggttctctgaaatatgctttcctgtcgcctcaaatctttggcagatatactccacccagtcctcttcgccaatcttgttgagatagaagaaatcaccaaagcgatagaatggatagctttggttttgaaacatctgctccatcatgtgcttcttgctaccatacaggcaataagacacatggctctgcaactgccaaatgccacgaagcttcttttggaaagtcaaggaatcgggaaaatcacctatctgctgaaactcatctatacacaccacaatacgatagcctttggattgggctatgacttctggaagtttcaacacctcctcagtggtctgattactcgcattatattccaaagacaaagaaaagtcgttagaagtcgccctaacgacagccgtggcaaaagcattgatgaaatcattctccgagcgacaaccaaaagcatctatacgcgctatttttatgtcatcgccctccactaatgagcataccttatccaccaatgaagtcttccccatacgacgaggtgaaatcaagatagtattcaccccataggtaaagttagccttcaatcgttcggtttcttctctacggtcggtgaaagcatcaccttccactcgaacaccaaaaacaaaaggagcttccatattctttgccatattcttactttgcttatatgttctcaatatgcttaacgactgcaaagttaataaaaaaatccgttttaaacaaggttgtttaaaacaaagttgtttaaaatggagaaatatgtgattttatgtcttctcaccagtgctactctatataattattcaacttgttggctggattcaaaggcttctggtcgcagagctgcaacgacttcaccaactgccatcattacgattttatgcatgatttttctgttcatataataatattgtgtattaacagttggcgcaaaaatacaacaaatatataaaatggcacttaactataaaaggggaaaacgtaactattttacggataaaggagataagctttcgcctatccccaaaccgcctcggctatctctctgatcaagtcaagcttagcccattgctctgcctccgtcaacttgttgcctatctcgcaagaggcgaagccacactgaggactgagactcagacgctccaaaggcacatactgggcagcctcgtggatgcgagcgatgaccgtagccttgtcctccaagactggcgacttgctggtaaccaaaccgagcaccaccttcttgttatcagacacatacttcaaaggctcgaaactgcccgaacgctcatcgtcaaactccagatagaaggtatccacgttctcatgggcaaagagataaggagccactgggtcgtaagcacccttggcggcatagcaagaatgatagttgccacgacatacatgggtgttgatggtcaatccctcaggcttgccctcgatggcgaggttgttcaccttgagatattgcaacgcctcatgctccaatgtgaagccattgcccaacatcgacttccaatagtcatcatccacgatcatgccccaagtacagtcgtcgagttgcacggtgcgacaacctgctgcataaatctcctggaagaaggtgcgataagcctgggcgatatccttgatcaactcctcggtgttaggatagaactcacgggtattcttcgaattgttgccacggaacaactctgagaggaactgggctggagccggaatggtctgcttcgcctcaacgccctcctcctcaaactgcttgacgaagaggaagtccttgatgaaaggatggttatcgcccgtaatcttgcctgtcaacttcaaagagcccttggtggtctccacgccatggaactgataaccatgttccaactcgatgtgctccacgccaccgaatccccacatgaagtcaaggtgccaataactgcgacggaactcaccatccgtgatgtaagacaaaccgtgctccttctgctgcttgatgacatcagtaatcagtctatcctcgatgctacgcaagtcggtggcagaaatctgtccctcagcaaacttcactcttgcttccttcaactcggcagggcgcaagtagctgcccacagcctcaaaatgcttgtttgatatgttactcataatcttcttcttttaaaaatgttattatattcaacattgcaagccttgtcatcagaaaccaaggacttgcggcatccggatttgcgagtgcaaagataagaagaagaattttatccgccaaatattctttgtaattcagaaaaatatgctaactttgcagcagaattgaaatttttacagaataatattctgcaaaatttcgttttcataaaacatttagaagagcataaggaaagaagcatacgtcttaacttcctttgactccttaacttcttaactcctcataacaatggcaacacaagagacactcgatgaaatcgacatcaagatactgcgacttttgcagcaaaattccaatatgacggtgaaggaactagccgccagagtacacttatccccctcacccaccttcgaacgacagaaacgattggagcgagagggatacattactagatattcagccgtggtagatcatcacaagttgggtcacaacgtcattgtgctctgcaacatccgactgaagcagcacacccacgacctgatacagcagtttatggacaccgtgcaaaagatagaccaaatcacggaatgct

SEQ ID NO: 475 - DNA, 15830 bp, synthetic construct
  source 1..15830: mol_type = other DNA
  misc_feature 1..15830: note = Synthetic
gtcgctatcgctcctttgtctggggttatgcagagtgtgcctctccgaggcactcttcatctcgaaaatctgactaatcataagactgagtagttacaataggcgaagccgacagtcgtggtaagtcgtgaaaagccgatgcaaaataatttgggcttgcaacaaaaaataactggcaaaatagttggaggctattaataaatatcctatctttgcaatgtagacttaacaaagaaacaatttaatcaagacaggcctatgaacttcaacaagaaaagccaggcccgaagatggatccttatctgtctggccgccattgtaagcctcttgctctacaagttcctgccctatgacgtgaatgccaacaaaggcttggcacttctcgtcttcatggcgttgctgtggctcaccgaggcgcttcccatcaccatttctgccctattagtaccaatcttaggagctttgtttgcctttccgagcgaggcggtgcgcgacgaggtgaccaaccagttgctgcccaactgggctgacatcaagcccatctcgttcggtgcagccctgaagaactttgccaaccctaccattttcctcttcttcggtggcttcggactggcaacagcactcaacgtgcagaaactcgaccgtaagattgcgcatggtatcatcagtctctcaggcaacaacttcaagcgtggcatcttcggcatcctgttggtatgcacagtgttgtcgatgtggatcagtaacacggctactgccgctatgatgttgccgctctcactcggactgctcaacgagttgccacaaggacgtgacaaccacaacactaaggttttcgtcttgctcgcggtggcttactgctgctccatcggcggtatcggcacgctcgtcggctcaccacctaacgccatcgcctctgccgaactcaactataccttctacgactggctgaagatcggtctgcccgtgatgatcatcctcttgcccgtgatgctcggcgtgctttggttcatcttccgtccaaatctcgacttcgaggtaaagaccggcaatgagtttgaggagataccctggacaaagaagcgcatcatcaccatggccgtcttcatcttcactgcattagtatgggtcttcggctcaacactcagcaagtggattggcgtaaagattgacgacggcatggtcggactctttgccgtcgtactcgtggaagccttccaactggccagttggaaagagctcgatgagcataccgactggggcgtacttctgctctttggtggcggtctggcactctcatcgctgctacaggtctccggagccagctacatcttagcccttgaggtgaagaatatcgtcggttccatgccgccaatcatcatcatcgcagcagtagccttcttcattatcttcctcaccgagttcaccagcaacacggcctccgcagcccttctcgttcccgtgtttgcaacaatagctaccgagctcggactgccgaaggagacgctggtcgtcatcatcggcatcggtgccagctgcgctttcatgttgcctgttgctacaccacccaatgctattgtctttggcacgggtcagatcaagagcagcgagatgctcaaggcaggtgctgtgctcaacgtggtatcagtcgttgtcgtgaccctcttctcctacttcttcctgatgtaacgctacaccgcgctgcggctaccttcaacgtaagggtaccccttgtgggtacccttctcccgcatctatatcgcttttttgccacagacaagcacaaacacgcacgaacttttctgcatcggctttgcacgacttaacacgacatactaacactatgtgtgatgtgaggagatccgccgcactcaacttagagtaccaaaaagaaggcgatgcatgatgcaccgccttaaatgttttcacaacggaataatccttattgtgattagctaaagatttatgctgcaaagaaacaaaaatattctgaatcctgcaagtttttgaaaagaaaaaattaactttgcctttataaaaaagatgaaaacttatagactatgaagagaatactcggcttagatcttggagcaaacagtattggctgggccgtcatcgataatgaagagaaaaagataatcaatgccggcagtcgcattatacccatggatgcagcagcattaggtgactttgaaaaaggcacattacagtcgcaagcatctgtaaggacaggttatagaagcactcgtcgtctttaccaaagagcgacattgcggcgagagcgtctactcagagtccttaacatacttgggttcctaccggaacattttagggagcaaatcgactttactgaacatccaggtcaattcaagagccacggagaacctctgcttccttatcgcctcaatagtcttacgaataagagagaattcatctttatggattctttcaatgagatgcttgatgacttcaagactcatcagcctcaactcgtagcagataacaagaaagttccctatgactggacaatctattatcttcgcaaaaaggcattatcccaacctatcagtaaggaagagttggcatggattatcctcaacttcaacacgaaacgcggttattatcaattgagaggagaagaagatatactgacgacacagaagaatgaagaatataaagtcctgaaggtcattagtgtagatgagactggagaagataagaaaagaccaggttacaaatggtacgatgtgacttatgaaaatggtgctatacaacataaagccagccccattccacctcgcaaacccggagatattgtagaacttatcgtttctacagagcttgacaaagacgggaacgttaggcttacgaaggacgggaagccgaaaatcagtctaagagaccctaaggaggatgactggacgttaatgaaaaaacgcacagagagcattctcaataatcgtcaaggtaccgttggctcctacatctacgatgcaattttgcagaaccccaaggttaaagttcgtgggaaactaattcataccattgaacggaattattatcgtgatgagctgagacagattctctccgctcaatctaaattcataccagagctgaaggacaatagcctatacatgcaatgtgtcaacgacttatatcctcaaaacgagacaaaaagaaatatgcttgctaagaaaggaatgtcagatctaataatcgatgacattatcttttaccagcggccattgaagagcaagaaaagcgagatagccgattgccctttcgaatacgatgtctttcaagatcctcagacacacgaatggaagcatcagtacaagaaatgcatgccaaaatccaacccatattttcaggagttccgtctttggcagttcattaagaaccttcatatctttgagcggcagagagaagagaatggcagattgttgactgatgttgatgttactaattctattctcaaaactgaagaagatattacagacctcttcgactggctaaatcagcgtaaggatgtcaatgaagatcaactgctcaaagccccagttataggacttggcaagcgctatactaattatcgatggaactatgttgagacaaagagctatccatgcaatgagactcactacgagatttcacactctatgtcgaatgttaaaggcaagcccaagttgaccttcagtcaagagatggatctgtggcacatattatattccgtaaaggatcttacagaactaaacaaagcccttacacatttcgctcagaagaatggcattgacgaagattcttttgtcgatgcttttatccactttaagccctttgaaaaagactatggcgcttattctgagaaagcagtaaagaaacttcttgctctgatgcgttgtggcaaatattgggatgagaattccatagattctaagacacacataagaattgagcatatcattaccggcgaagaagataatagtatatccactcgtgttagagagaaatgtgctacatttcaaaacattcgccaatttcagggacttaccttgtcattggcatgctatgtagtctataatcgccattccgaagtcgatgacatgagcgtttgggagtctcccgatgacattaataagtacctccgggagttccatcgcaaaggattgaagaaccctgttgtcgagagtgttcttagcgaggccttgcgtcttacccgtgacatctggattcaatatgggaaaatagatgaggttcacattgagatggctcgtgacttgaaacagaacaataaacaacggaagaaagccactgacagtatgctgaagaatcagagtacaaatctacgtatcagattgcttctgcaagagtttgcttccaatgaatacaaagtggagaacgttcgcccacattccccaagtcagcaggaattactgaagatctatgaggaatatgctctcaatgacaacaatgagattcctgttgatattaaacttatcattgataatcttgggaacccaagtaagcatgtgagcagtaatgagataatgcgctaccgcctgtggctcgagcaacgctatctatctccttacacagggcagcccattcctttgtctaagcttttcaccaccgactatcaaatagagcatgtcataccacgagcacggtattatgacgactctcttagcaacaaagttatttgtgaaagtgaggtaaacaaggacaaagaccgcatgcttggatatgagtatatccttaagaatggtgggaaaataataactggctcaggtggacaactattcaagatcttagatcacgttcagtatgaggatttcgtgaaaaaacattatgccaacaaccgtggcaagatgaagaaactcctcatggaggatattcccgatagtttcatacaacgtcaattgaacgacagtcgttatattgcccgtaaagcattagagatattttctcaccttgtcagagaacagggtgaagatgctgctgtgtccaaacatgtcattgctaccaatggcaatatcactgacagattaaagaaagactggggcataaacgatgtatggaacgatatcgtggctcctcgcttcgagcgtatgaaccgcataacgggtacacaggattatggaggctgggtgaaccgtgatgggaaacgattcttccaaacgaatgtccctctcaatattgccaaaggatttaataaaaagcgtatcgatcatcggcaccatgccatggatgctcttgtcatagcctgtgccacacgcgatcatgtcaatctgctcaataaccaagcagcactgtcgggtgaaacgaatcggtttgacctccagcacaagctctgtgagaaggtttggactgatgacagagataattattcttggcgctttgtaaagccatgggaatcatttacagcagatgtaaaagattgcttaagtaacatcatcgtcagtttcaagaacaatataagaataattaccaagacctctaatcattactggcattatgaaaacggagtaaaggttttggcaaagcagaggggaggtaacgattgggcaatcagacaaccccttcacaaagagaccgtttccggatccataagattacaaaagaaatacagtgtgaagctcgcagatgcattggagaatatcaattatatctgtgacaagcaaatcagacattccatcaaagaggtacttaaactgtaccatggcaaagcagacctcaagactcttgtaaagtatttcaaagatcgcaactacataatcgaaggaaaaaatatcaagaaggtcgacgtttggaaactcacacccgaaggtgctctgtctgctacaagagtaactctaacggataaatttacacgcaaggatatcaatgccatcacggataccggcatccaaaagatactactgcgccatctcgacaactacaaagaaggcgataaggatcacccagaattggctttctctccagagggaatcagttatatgaactctcatctgcgagaactgaataatgggaaagatcatcaacccatattgaaagtgcgaaaatatgaaagacttggagaaaagttcaatgttggcaccttaggtaataaagacaagaagtttgttgaagcagccaaaggcaccaatctgttctttgctgtctataagaacagtgaagggaagagaagttatagtacaatcccactcaatgtggtagttgaacaaatgaaaaatgggctcggagcagcaccaaatgtcaatgcagagggagacaagctcctctttaccctctctccgggtgaccttgtgtatatgccagaagaaggagagcatatctctgttgacaagctggacaggaacaaaatttataagtttgtttccacttcccaagggagagcgtgttttatcccctataatgttgctatacctatatacgacgggcacgaatatggatcgcacaacaagatagaattagatgacgacaagcgcagcattaaaggatattgcataaagctcaaagtcgaccgaataggtaacgtaactttataaggcagatatgatcaagaaaactctatatttcggcaatcctgcttatctttctcttcgcaacaagcaactggttatcaggctacctgagatagagaaaagtaagggactgcctgacatcatcaagaaagagagtgtacgaaccatccctatcgaggacatagggatggtcgttcttgacaaccgcgagataacaatcacggagggagtcattgcggcactgcttgacaacactgctgccgtcatcacgtgcaacgagaagcggatgcctacaggactactgctgccgcttgaagggaacacactacaaaatgagcgtttccgtagccaaatagaagccagtgtaccacttaagaaacagctatggcagcaaactattaaagcaaaaatagaaaaccaagcatggttactctcaaagaactcaccgaaatcggtagcctgcctgtttgctatggcgagagacatcaaaagcggcgacagcgataactttgaagcacaagctgccgtctattattggaaatacattttccaaaacataccgaatgccataccggacttcaagagagatccggaaggcacctatccgaacaatttgctcaattacggatatgcgatcttgcgtgcaactgtagcacgggcacttgtcatgagtggcctgctgccggtagccggcatccaccaccacaacaaatacaacgcttattgccttgctgacgatatcatggagccttatcgaccattcgttgatcaattagtcatctctattatcggacagacagagccaacagaaagtcttactaaagacctcaaagcccaacttttatctattccgacattagacgtaaaaatcggaggcaagcgtagtcccttgatgattgcagtggcccaaacaacagcaagtttagccaaatgctttaatggtgagattagaaaaatagcttatccgacgctctcttgatagaccggcttaatgaatatcgcatcatgtgggtgcttgtgctatatgaccttcccactgagacggccaagcaacgaaaagcagccgcccgcttccgtaaagatattatgggagatggcttctcaatgtttcaattctccatctacattcgccattgtgcaagtatggagaacgcacaagttcacattaaacgcgtgaaagcccttctccctgaagaaggtgatgttgggatattgtgtatcactgacaaacagtttggcgacttagagatcttccactgtaagaaagaaaagaaagacttcaatacccccattcaacttgaactcttctgatgttgcttcatctaaaagcaaggaaggaattctgactcactcatcagaattcctttcttaatcacaactcttttttttaatcgtaatctatatagtatcctattgatatatagctgattaaacaaatcaagttgtttatgcctatgcaaaggtagcaaatctttagctaatcacaacagccctccgaagatatgttcgacacttgcgttgtttatgcctatgcaaaggtagcaaatctttagctaatcacaactatgattgctattatgtcaaacggtacaatgttgtttatgcctatgcaaaggtagcaaatctttagctaatcacaacagagttcgggtgagaatatagacgtacttgttgtttatgcctatgcaaaggtagcaaatctttagctaatcacaaccaacgagatcttctgggcctacgttctgggttgtttatgcctatgcaaaggtagcaaatctttagctaatcacaacagccggcctgcttcctctttcctcgacggagttgtttatgcctatgcaaaggtagcaaatctttagctaatcacaacaaagttcctattgtatatgggaataatgatgttgtttatgcctatgcaaaggtagcaaatattttgctaatcacaacgaaactcggcttcaaaataatgataatctgtagacatccgagatggtggccggcactatggcacggccactgcaaaacttacgcgagaaacataatatacccacgcaccattggcgaagccgactgtcgtgtaatgtcgtgaagagccgatgcaaggaaaaagtgtagatgcggtattaaagaaatctcatgcagacttgttttttctaccgaatcggtgcctaattagaaagattctgcgtaaatttgcagaaaaggtcgcaacatatgaaataccctatcggaatacagaatttcgccaaggtcagacaagacaattacgtctatgttgacaagacggcacttatctatcagttggctgatcgtggcagttattacttcctcagccgcccccgccgtttcggtaagtcgctgctcgtctcgacgatggctgcttatttcagcggacagaaagagttgttccacggactggcacttgagcagttggagaagaactggaccgtctatcccgtcatctatcttgaccttaacacaggcaagtacgactcggaagacgcactgtttcacgtactcaacgacttcctctgcaagttggaggacatctatggcaagtatccttccgaagtgaccccggagcttcgcttcaaagggctcattgaacgcattgcaaaaaaacacaaccagcgtgtcgtgatcctcgtagacgaatacgacaagccgatgctccaggccattgataacccggagctgcaggatcatttccgcaatacgttgaaggcgttctactctgtgctaaagacgcaggatcagtatatcaagttcgcgttcctcacaggtgtgacgaagttcggcaaggtcagcgtgttcagcgacctcaacaacctcgtcgacatctccatggatgcgagataccaaggtatctgcggcatcactcaagacgagttgatgacttatttcacgtcatcagtgcaggatattgctgatgcgaatggtgtaacctttgatgaggctgccgcaaaattgaagaaacgttatgacggatatcacttccggcagcgtggtgttgatatttacaatcctttcagtctgctgaacacctttgctacgggtgagctcggcagctattggtttgagtcgggcacgccgtctttcctcgttcaactgctccagcgtgacaactattacctcccgaacctcacggaggaagaagtgtcgggcgacttcctcaactccgtcgactccgtggatgtctcacccgtgcctatcctctatcagagcggatacctgaccatcaaagactatgatgctcgcttccaaacttacacattgggattcccaaatgaagaggtggaagaaggattcacggaatatttattgccctactacaccaatatagagaagaatgcatcacccatgtttgtcggacaattcgtgcatgatatggagaaagggaagcccgaagcattcatgaagcgcatggcagtgctcttcgccgacaccgactataagattgtaggcaacgccgaactctatttccagaatgcattctgcctcatcacaagactcttaggtttctacactgaggtcgagcgcactatcagtgacggacgtattgacatgatagccaaaacgaaagacttcatctatatctttgagttcaaatacgataagagtgccgatgccgcccttcagcagatcgacgacaaaggctatgccgcaccatttgccactgacccgcgtaaactttataaggttggcgtgaacttcaaccggcaaaaacggtgcatcgacgagtggaagatagaatagtcaggagtcgtgctcaacctatcttccagtcctcgacggtcctgctttctttgtcgatgtttactccgaccttgacaattttccgtccatcggtgagatatggcttggcatagcctttggcctcgatttgctgaagggcctgctcggcactgccaccggctttcagctcgatgatataaatcgtatccggcataaagactatcatgtcggccctgccgcccgcaaccttcacctgagtgcggacatagacattgagcatagagaagataagatagaacgtgaactcccagaaaccttcagctgttgacgcttctgctaattttttcttgaatccctcaacatacggaataccggcaagataggcctgcatatgctccatggccagattaatgtcaccactgcgtaaagccagccagaacttagctgcaaagcccatctgaacatctgtactggtcaatccgatgtaggttggcagcaagccttttacatatcctacgcgcacttcctgattaggtatcgacagagtataggtttcggtcataggttcgtaatccttgatcgtgaggtatccactctgatagagcagcggcagtgcatcttgcatgttttccgtaggctgatcaaaggcatctgccggcacctcgagcttgtcgagcgcagtgatgtcggtcttgaaatgctgcagctggcggatgaggaatgtcggtgtgcctgaagcgaaccagtagttcttaagcttgttgtccaagaaggcgttgagaagactgaacggattaaacacagacagagagtcttcagagaagtgataaccgtcgtacatgagtttgatcttcgcgtacatctcgtctggcgtcaacttgaaaatcttagccatacggtcgatgtccggtccgaacactgtttgtacttcctcttcagtgaatccgcagatggcggaaaactcagggttgagcgttacattcttgatattattaatggtcgaaaagatactgagttgcgagaacttcgtaatgccggtgatgaagcagaacttgataagtgcttcgtttgcctttagaggttgatagaactcctgcatcactttgcgcatgccatcgagattctccttctcgtgaagaacctcgagcaacggagcgtcatactcgtcaataataacaacaacctgtcgcccgctactgctgagccttcttatcataccatcgaagatctctccaggtgtcttttcatcttcatttctttcgaagcagtcgagacgggagagcatccagcagatagcacgctgtaattcgtcagcatcttttctccccttgacaatactcagatcaagatggataacagtatagcttttccatgcctgctccaagttcataatcttcagacccttgaagagctccttatcacctctccaataggagtcgagcgtcgacgtcagcagactcttgccgaaacggcgaggacgactcatgaaaacaaaggtagcataatgcgacaactcccagacaaggtctgttttgtcaacataaacataaccctcttcgataatcctctgaaaggtttgtattcctaccggatattttcttctttgctgttccataactacagatgcattgctctttgcaaatttacagtttctttcccaattatccaagggaacgaggctttttcctcaagctctgcatgaagacggcaatgagctgctcctcactgtcaccgatgagctgactcagctgcatagccttctcgatatcgctacggagacgcagacgacgctggaacttacgcatatacttccggcattcagcctccttcaagtcggatgagaactcatcgtcattgaccacagccatcagaccggtgtccgccttcatgccatcgaagaggtgcatgatctcctcgccccatttcttgatctcgtcggcggtgactttctcaccctcgttccacagtctgatcacggtcaggacatcctcttccgtggagctgcctccaccccgatgcggccctccgttgcctctctccgtgtcatcatcatccgggtcctcctctacggtgatgccggggagctcatcgtctgtgtctacctccacgtcgatgaactcgctgcgagcaaactggctcttgataaacccatagaggttgcaataacgaagccagaacgactggaagatcccgtcgtagtacctcttatcaatctctatgacgtctttcagatccatgatatcattgtagaaggtgccgtaagcctggcgtacgagccgtgccttgtttatataaaggtcgggcagatcgctgcccgtcacgccctgcgccttctgagcctttatctcttctttcgattcctgctccaactgaaactccctggtgatccactcccgccagtcggcctccatcagctccagggtgttgccgtcctccggattcttcttgtaggaaaggaaccagcgggtataaggataactctgcaagaggtacttatagctcagctctatctccttcacgacctcgcccgggttgaaatcggagatgacggtgtgacaatatttcttgaaggctttccggatattctccacgttgacattcttccatgacatatcaacaacgtgacactccttcttgtacttgcagatacggtccacacgcgatacggtctggacagcattgatatcattgatctccttgtcaaggaagagggtatggagatgaggctcatcaaaacccgtctgaagcttgtcgacgacgatgatgatgccgttcttggagttcttgaagtcctctatcacctttgcctcactcttgtcgccgtccttgtcgctgttcaggctctcacacgtctccacgccctgacggtcactgtagatgatatacacaggcgccttggcatactgatgataacgcgagtcttcaggctcacactgttcgcgcatatacttcttgatcttcttgaaatagcggatggcgatagggatactgctcacagcgagcatcgccttgcccgtgccgcgtatcttgccatagacgagcgagaggcagcggtccacgacaaagcgggcaaactcatccatgcgcgtctcgttctcatacacgctccttgaggggtcgtgcaccttcttgtcgttgtccgtcgccgggtcgaagtcctcgggcggataaaacttcatcgagagcttcacggggatgatatgctttgtcgggtcaaggatataaccgtcgcggatagcctccgtcatgctgtagctgtcgaaaggcacccacagaggcacctcctttgcagagctcttgaactcaccgaagcgcgccagcaccttctccgtgggcgtggcggtgaaaccgatgatgaggttctttttcttcgcctcagagccgtcggcctctacctccccgtcgatgacgtcggcaagctgactgaagatgtcgatcatctcttcgcccgtctctcccgtcgtggagcggtggatctcatcgatgaggaacaccacgcgcatcttcctcagcttctcgtccgaggcgaggatggcattgcggagctcgagaaacttctggatattgaccacgatgatgcgcttctcccccgacaaggctctgacgaaggtgctctggttgcggacctccacaaacatgctcttgtcgatgttcatatccatcatcatcgtgtcgagctggtcgcggagctgcaggcggtcgacgacgatgaggatcttgtcgtaagcccactgaccctcatagcgcaggtccttgagctgaagggcggtccagccgatgatgttgctctttccgaagcccgcagcatattgcagcaggaggctgtagacatacttgttgttgcagcatgcctcgcgcctgcggatgatgtcttctatcttgtcgggatcgacggagagatgggtgagctcctcgcgaagctgccggatataatagtcgggatctttctccttgtcgagcatctcacttacgcgcgccatgatcttgtcgcagccgaacttctgcttgggtcgcggcgtgatgagggtaccggtgttgctcgtgcgcgattttctgccatccaccttctcatatttatacttgatgaagttgtagatgaggatctctttctctatcatctttttcgcgtagagggcgcgcatcgtctctttgaacgcctggtcctgcgacagcgaggggctcgacagcggccatgccttgaagtccttcacgatacgctcgttgcgatactgctcgatggtctgctcctcactctcaaaggctttcagggcagcatcggtgtagctctgcacattgcgccagacataggtctcgttgatgtcacatgccgtgagatggatggctttctcaaagatcatcaacgcctcgcgccggtcctcgtcgacagtgttgtcgtcggggcggttgcgcttccgcgagtccatgagctggatagccctcagatagtcgccgataatcttcccgcggccgtcgctctccgcgctctgacccatgatgttcgtcttgagctccatataaccgaggtagatgccgttgacgaaaaacgtgacgtcggggcggatatgctcgatgtccacaccgtcgcaggctacggtgtgaggcagttccttgacagcactgaagatgttcttcttgaagtcggcatcgccacgcagctccgtgccggagacgaagaagagctgaagcgactcgccttggaaggtgatcttctggttcttgttcagaaacgtcgctacattgctgctcgtcagcatacggcgcttcacctcctccttgatgtcaccagtgagccgctcctcgtcgttcttgtaccggctcatcagcgccttccacgagaaccggtttgcctcctggataaactctatgagctgcgaggggatgaagaggtcgggactgacgatgttgggcggcgtgtcgcgataacctaatccgccttcgctctctgcccgacaaatgaacttcatcacatagtcctgctgtatctttgtttcgcctgctgtcatgttttaatggtattagttgcagtggccgtgccttgtgccggccacccaccgcaaaagtaattaaaatttcgtccgcttccccgtcaccacctcgttgataaggctgcgcttcaaccgtttgtatgcatcaatctgcttctccacaatggatgccgcacggtcaatctttgaacactccgcatcgaggtaagaagcaatggaacgctgctcggggagagggggtaaagcaaaagacatatttgcaataatcttttgattcatcatcttcgccccatatatattttctgttgcattattatcgcatactaatggcaagtaatagtaaaagtagtccaaatcgtattttttcgatggacttaaagtaactatcgcctcatttgtaaaaagatctttggatgcaaaggcaactttacctattgatagtttaaagctaaacatcaatgagccttttctcgtaattggtatctgattttccttagtaacatttaaaaattaacttggtaaactcgtcttcccttgccataagattctataattccatttaggaagcttcttatcaaatacaatatgt

SEQ ID NO: 476 - DNA, 10863 bp, synthetic construct
  misc_feature 1..10863: note = Synthetic
  source 1..10863: mol_type = other DNA
ttctcgccattctgatacgtaatccgttctatgactgcccgcagcttcataatgatgttacaaaagtactgaaattattgggcaatcaagaaaacaactgtacttttgtagtccacaaatggaaaacagacctatagccttgtctccaacagcagacataattgtaaatactatcaaataatttttggtatgtaatttattatttgtaactttgcgattaatggttgtaaaccctataaggtatatgcttatgaagaagttattattagctctttttctttctgttttctctttggaacttttaaatgcgcaagaggttacatttaatgaccaaaaggaattagttttgaaagaggtgattaaagattctacattaacgaagagtcaaatttttacagctgtccaattaatgctaagtgattggcatccaaataccaatagtaagaatacgattgactactcagacttaactacaggtacgattattactaaaggccagtattggcttggattccataaatcaaatttaatgtatggttacaatgtgcttgctgatttttcgtgcacaatcagaatgaaagatggtaaatatcaggtccttttaaaagtgccaaccataacattgtcctggtctgctggcaacactgatgacgaaaaggttgatgttgtacacgtttatccatcttatgatggttataagacaagtcattatttaacgaagaaaccattaaccgagtttggccccaaagtccctgatgctatgcggacaatctttcagtcgataaaatactctgtaatgcagaatgcagagaaaaacgatttttagttcgagtttagaattaggtctatagcctatatgaatacaaactaacattgtggagcgttattgtgtttctgttgacaaagttagccaaattaagaacgacagcaacggctgggcttttgaccataaaaagccacgttactctcttgacatcttgctaactgtgacaaatgtttctattcagttcaccacagggatccttccctgagcaaaacgggaaataacatttctatgataaatgtaatatagaagtttgttgacataatcaaccctctgccacatcttaattaaatttgacaacgctaaagagaactaaaatatgcacttagcttttaaaggacttcccaattataattttgacaagaatttgcaaatcggtatccctgcaatcgctattgaaaagcgtagcgggtacattcagtttattttaccttatggtattaataaattgtatcgctatttaacagataagttatatcctgcaagattgctcgatgatgacttctatgaattccccataataaagcaaatgggatattttgactggacaagtaaaccaacttggaataactttaagacttttttgcgtaatgttgtgtacgaatatgatataagaagtaacggcaaagtatctgttatgatactaaatccattgcactacaatgagaatgataaaattgacaagaaagacatttcattagcttaggaaagtgcaaggcatttgcttaaaaaatagtaatacacactaaagcaacaataatgcctgataatcaacctataaacaacaacgccaacttccctgccacaatctataagccgtcagagttgcttggtatgttcacagcctatctatcgagacaggaagtgaattcaaaggtcatattcctacgtggcatctacttgaagaatccaaaacacgaccctcgctgggtttacagatatgacatactgtttgacgctgacttctttcagattccagctcgcgatggacacccttgtctctctggatggacagttcccactactggggcctgttagggacttacacccgttagccgatatacatgccagtcaaacaaacaaagaattttaaccaaaagataccgaaaaaagtggaaagtaaaatgaattttacacctttgcaaacgtgacctacaaggggggcacttttagattagcaaaggggtcacatctcgacccgcgcgcgcatatctttgtcgtgttgataagacattgacacataaacgattaaacattccatatatgttttcaaaattaaataaaattggtgagttgaccaagatcctaagtgttaaaagtaagacttgtgatgcaattatacacttcatggcttgttttggcatgggcagtatctgcctacttcttacagtgctattcatttgtgcatgttccagtgacgagccaagtgctacagaaaaaccagttgaacttggtacctaccttctaaatgcgcacaaagaaggcaagtctatctggaatgttgctaaccatgaaatcaagtttgatgattattcttcgggaactggctggatatttgataggactattttcgaaggactaaaaatcattctgccagacacatcaaacttagccatcgataacgccagaatttatgtggaatcccattattatgaagaaatcagtattgacgaactaagattggagaagggggaaaacatgtcttataactgtaaagaaaattacgaatttggacaatataaattgtatcatataggcaaagtctcggtaaaattttatgggcagaaactactttataagccaatatatttcaaaggctcagaagataatcagtatctaagaataatttttaataacggtttggaattagtttatagatatgacagcaaggatgatatattgtaccctttcctatattcttatggtaataaacaattcttcgtgaaaaaagattctttagacagtcatgaagaacttaaatatgaaggagagcaggaaacctggctgtataagaaaatagtagaaaaattcactcagcttattctatatgctatcatttatattatagtctgtattgtaatatgcctaatcagtggtatggaagcagtgttaacatcaccgattggtatgattacaagttctattattttcttcgtttggattattttctttctttagaagggcttatcggttttatcttataattcataacttaaatattttttacttccttccctctctgagaatcgattcttttcgaacgaagaggacgttggacgaaaagaacgcgttctcagggcaggttagtaaacaactatctttcagcgcattacgcattttctacttttgaaaggctttctcgtcatgcctatggcgttgccctccctataggataagcactgttgttcctatagaacaggcatcgtcatctctgaggtatgtcaccgtcatctctgagagatgacggtgacatctctataagaaggtactttttcctcccttttttccatctttccttgtcccttcttccacttttagggcctaaaacatcggatttcccgctctatttcatactgttcccgttgtcctgactttttattttttttgtcaatatttttacaaggaatttctcagcctacatcttatagccgtctgtccttgtccaacagtctggttatggcacatagagcgggacatttgtcatccagtcctgccgctcgtagcctcgcatgaagcgacggaggccatggaggtggtcatcgggatgagcagcaatatcttgttatatagaatagataggttgacgttagcctgttcggagcgttgcatgtaggtccagcttgacgttgtcggaaagtcctggccaatcgtaaaatatttttgtagtttgatctgacaagatatccgccgatttctattgaagatgggataatgataaaaatgcgcaactaaaaaaagggcgagtcaccccgcccgatagtgttttcacaacggaataatccttattgtgattagctgaaaaatttattgctgcaaagatatgttttttttcgcaatattccaaaatttttggtgattatttcttatctttgcaataattgaccaactatcattaaaaccttgacccatgagcaagatattaggcttagatttaggaacaaatagcattggctggtgtcttgtcgatgataccgacaaaaaaataattaaggcaggttcacgcatcataccaatggatgcagctgccatgagtgattatgagcgtggcaatttgcaatcgcaagcgtctgtacgaacaggattccgtggtacgcgtaggctctatcagcgtgctgaactgaggcgcgagcgtctgttgcgtgttcttcacgtgctgggctggttgccgaaacatttcgacgagcgaatcgactgggtggagcatccgggacaatttaaggacaaaggggaaccactacttccttacagaaaaggttcagatggcaagaacgatttcattttcaacgattcatttcaggaaatgcttgacgatttcaacgagcatcatcccgagctcttgaccaatggccgtagggtaccttacgactggaccatctattacctccgcgacaaggctctgcggcaacctatccgtcgggatgaacttgcatggatactccttaacttcaacaccaagcgcggctattaccagctccgaggcaaagatgaatttgtgacagaagatgagccgaaagacaagcgagaggaatacgctcgcctaagggtgaaggaggtgaacttcctcgagcctgaccagaaaaagaaaggctacaactggtacaacatcgtttatgaaggcgacataacccagcgagcccacagcatcaacgaaccccatagcgttggcgatgaggtagaactcatcattaccactaaacttgacaagaagggtggagtgaagttgagtaaggagggtctgccgatgattactgtacgttcgccaaaagaagacgactggcagctgatgaagaagcgctcagagaatgcaatcaccaaatcgggatttacagttggctcgtatatatacaaagccattcttgccgaccctgccattaaggtccgcgggaaactcgtccgagtcatagagcgtgatttctaccgcaaggaactcatagccattctcagcaagcaaatggaattcatcccggaacttgcttctaaggatgccatggcaaagtgcgttgccgaactttaccacaacaatgaggctcatgtggcctcgttggcggacaagaccctcgcaagcctctttgttgatgacatcatcttctatcagcgtcctcttaagagcaagaaaagtgagatagccaactgtcctcttgaacactaccattatatcaaccgggataccggcgagatagtggagaagccaatcaagtgcatcccgaagtcgcaccctctcttccaggagttccgtctttggcagtttgtgcgcaacgtatccattttgcagcgtgaaaagtatatcaacggaaaactgaggactgacgtggatgtgacaggagattttatcaccagccccgaagacatggcatggctctttggtgagctcaacgaacttggaagcatccgccagaaaagctttctcggattgttcggcttgaagcccgaccaatacagatggaattatcctgaggacaaagagcttccttgcaacgaaacccatcacgacatcgtcgctgcattgcataaaacggcaggcgagccaacccttacttacgaacaagagctgaaactgtggcatatcctttattcagtggacgacatcatagaactgcgcaaggctctggcaagattcgcaggggctgcaggtatagacacggtctcgtttgtggacagctttctccacttcaaatcctacgagagcgactttggcgcttactcagagagggccatcagccgtttgctgccactgatgcgagtcggcaaatactggagtgctgaccgtatagatgcaaagacgcgccaacgtatcgacaagctcatcactggcatagatgacgaaacgatagcaaagcaggtgcgggagaatgccatcgctctcacttctgtagaagatttccaagggctgccactgtggcttgcaagctatgtggtttacaaccgtcactctgaggccatagacaccacggtgtggaagagtcccaaggacatagactattatctcaagttcaacttccgcaaccatgcgcttcgaaaccctattgtcgagaagattcttggcgaaatgctgcgcgtggtgcgcgatatatgggacgcctttggcaagattgacgaggtgcatgtcgaaatgggacgcgaccttaagtcgcctgccaagaagcgtgccgccgaaagtctgcgcatggcggacaacgagcgcacaaacatgcgtattagggttctcctccaggaattcgtcaatccagaatacaatatctccaatgtacgccccatgtcaccaagccagcatgagatattgaagatatatgaggattatgccctcaccaacggtgaggaggttcccgacgacatcgagaccatcaaggatgccatcggcaacacgtcgaagcctgtagccaaatccgacatcatgcgctatcgcctgtggcttgaacagcgctatcgctcaccctatacaggggacatcatcccactgtcaaaactcttcacgccagcatacgagattgagcacgtaataccccaggctcgatattttgacaattccctgagcaataaggtgatatgcgagagcgaggtaaacaaactaaaggactgcatgcttggctatgaattcatcctcaataaaggtggaagcgtaatcaaaggcagcttcggaaaagagatacatatcttcaccaagactgaatatgaggagtttgtgagggagaactaccgtaagaaccccatcaagatgcgcaagctcctgagcgaggacatccccaagagcttcatccagcgccagatgaacgacacccgctacatcgcacgcaagacgatagagcttctctctcaccttgtacgtgaggagggcgagaaggaggcaacgtcaaagaatgtcattgtgacgagtggcagcatcaccgatcgcctgaagaaagagtggggcttgaacgatgtgtggaatgacattgtggctccacgcttcgaaaggctcaacacaatcactggctccagcgactttggcgagtgggtcaacatggacggcaaacggttcttccgcaccaatgtgcctcttgccatatcccttggcttcagcaagaaacgcatcgaccatcgccaccatgccatggacgcaatggttatcgcctgcaccacacgcaaccacgtcaactatctcaacaactcctccgcagccgaaaagaacgaggaccaccgtttcgaccttcgcaacaagctctgttataaggacaaagccttaggcagcaacaattatacctggcggttcgtcaagccatgggacaattttacggctgatgcaaaacgagagttgcagagcatcatcgtcagtttcaagcagaacctccgggtcgttacccgtacgaccaacagctattggcattacgagaatggcaggaaggtgctcgccaagcagaaagacggagatggatgggctgttcgcaaatctcttcacaaggctacagttttcggagccatccgtctacaggagaagaagaaagtaaggctcgccgacgccttgcttgtgcccaacctcatctgtgacgaggaagtccgcaaagttgtcagcaggaccataggaatgtacaagcgcttcgaccagaaggccatcctcaagtacatcaaggacaacttcgccaataaggtgaacggtcaggacatcaggaaagtagagatatggcacatccccgaacagcctacgatgtcggcaacacgcgtgcccctcgacgacagcttcgacaagaagaagattgaaagcgtttccgacagcggcatacgcaagatcctcctcgcccaccttgggaattacaatggtgacagcaaggcggccttctcacctgagggcatcgccgccatgaaccgcgacatcaaggttctcaacggcggaatggaccataagccgatactgaaagtaaggaagacggaaaccttaggcgagaagttccctgttggctatgtcggttccaagagtacaaagttcgttgaggccgacaagggcacgaacctgttttttgccatatatattaatgaggagggaaagcgttcatttgaatccataccgttccgagtggcggtggagcgtaggaaggagggtctgccggtagccccggaaaggaacggcaagaatgagaagttgctcttcgtgctctctcccaacgatttggtgtatgtccccgaagagggcgagcatgtggacagccacctcaatttgaaaagaatctacaagatggtctcatgttctggaaatcattgttgtttcgttcccgaacgagtcgcattccctatccttgctggaaaggaattcggctcactcaacaaggtggagatcgcgctgtcgggtgagaacataaaagtggtctgcaagaagataatagtcaatcgcttaggtttaatcaaaaagatagagcaatgatcaagaagaccttgtattttggcaaccccgcctatttgtcgcttcgcaacaagcaacttgtcatccgcctaccggaggtggaaagtggcaatatgcccgatgagatgaaaagggaggccatcaccacagttcctatcgaggacataggtgtcgtagtactcgacaacaagcagattaccatcacacaaggtcttgtagcggctctacttcaaaacaccacagccctgataacctgcgacgacaggcgcatgcccactgggctgttcctgccgttgcagggcaacactgtccagaatgagcgcttccgaagccagctcgaagcctcgcaacctttgcgcaaacagctttggcaacaaactgtgagggcaaagatagagaaccaagccgccgtgctgcgcctgtacacagtcaagtctgtcgcgcggatgtacaccatggccgacaacgtgaagagtggcgacagcgacaactttgaggcacaagctgccgtgtactattggaagaacgtctttaccgacattcccacgttcatacgtgaccagaatggggagcctccaaacaatctcctcaattatggctacgccatcctaagagccgtcgtcgcaagggcccttgtatccagtggtctgctgcctgtttatggcatacaccatcacaatcgctacaacccatattgcttggccgatgacatcatggagccctatcgtccttatgtggacatgcaggtgcttaatatcatgcaacagtatgaggagattcctgagaatctgccaaaggagataaagcgcgacctgctctcgatccctgtcgtcgacaccatgataggcggcaagaaacgcccgctaatgatagctgtttcagagaccacggcaagtttggcgaagtgtttcgctggagaactgcgtaagatttcataccccacaataaatacaggcaaccgatgatgaaccgattaaacgaatatagagttatgtggattcttgttctttacgaccttcctactcaaacccaaaaacagcgcaagagcgctgccaagttccgcaagaggataatgtcggacggattcaacatgtttcagttctccatttacattcgtaattgttcaagtttggagaatgctgaagtgcatatcaagcgggtgaagtccatgatgcccgacgaaggccacatagggatattcaagattacagacaagcaattttctgagatagagatattcaactgtaaggcgaagatgcaagcaaggaagcctccactccagcttgagtttttctaaaacacaacaagggattctgtcttttacaagaagaatccctttgttttgctttactcttttttaattctaatttcaagcgtaacaacctttgctccaatccattgcgtcaatcgagttgtttcttaccctgcaaaggtacaaatttttcagctaatcacaacgccctatatggccttatttggtgtaagcggttgtttcttaccctgcaaaggtacaaatttttcagctaatcacaacccgtactgtgatcgtcaatctcttatcgtcgttgtttcttaccctgcaaaggtacaaatttttcagctaatcacaacgccttcttggtggttctattgctgcctcttgttgtttcttaccctgcaaaggtacaaatttttcagctaatcacaacttattccatgaaacatgatccttataaatcgttgtttcttaccctgcaaaggtacaaatttttcagctaatcacaacttgcgccatgtggccttatttatgtggtggttgtttcttaccctgcaaaggtacaaatttttcagctaatcacaacggcctcaccgttgctcatatagctgttgggttgtttcttaccctgcaaaggtacaaatttttcagctaatcacaacaggtcgattcctcgggcttgacattcttggttgtttcttaccctgcaaaggtacaaatttttcagctaatcacaacataaattagatatgcaatatcttcatgatgttgtttcttaccctgcaaaggtacaaatttttcagctaatcacaacagtcggctgctgaatctcttcatgtattcgttgtttcttaccctgcaaaggtacaaatttttcagctaatcacaacagtggagaactccaccttgttgatgagagcgttgtttcttaccctgcaaaggtacaaatttttcagctaatcacaacagaagttcatgaaacgtttgcgtcgctcagttgtttcttaccctgcaaaggtacaaatttttcagctaatcacaacagatagataaaatatagtttttgccttcttgttgtttcttaccctgcaaaggtacaaatttttcgacctgtacgggtggatttcactcatgagtcagttaattattattaatcgagcactctatgtcaacaagcaacaggaaggtaaaatttgt

SEQ ID NO: 477 - DNA, 8872 bp, synthetic construct
  source 1..8872: mol_type = other DNA
  misc_feature 1..8872: note = Synthetic
aggaacatgcattaaaaatcggcggataaattcctcgccggatatggtaatctctttccaaagcccttggtttttgtaatctttagcagaaaatgtaactgtagattctgtcatgtctttgatacggtagttgctgatagcaatccggtgggtgtattttccaaggtatctgatgacagattcggcaccgtcaaatggtttcttgcaataaggaatccattcctttgtatagcaggtatttaacaattccttgaaagtatagtagtttttgtaaggtgcagccgatccatgaaattcaagcctgtcattttcccagagctgcttaagttcagccatatattttccacgaaatgttttggagatcaccttaatcggaagaaaaaaatctttcccgttgtctttccaatgatttttcacatccagccctccaccaagaacaatcgcatggatatgaggatgaaaattcatggtgcttccccatgtatggaggatacaaatatagccgatatcagtcccaagatatttactatcagcagcaagttcactgagagtatctgaagccgcatgataaagagcagtgtataagaatttctggttgctgtagataatgggattaagttcttccgggactgtaaaaactacatggaaataaggagcatctaagatatcctcacgccgtgcatctacccatttttcttttggaaactcctgacacataggacagcatctgtcacggcaggaattatagtggactgacatgcagccgcagtcctcgcatacgcttacattcacaccaaaggcaccggttttgcaattcatgatgtgataagcggcctttcgctgagcgggagaaatactatgtgtggattcaaaagatggatagagtaaaataaacaatgggcgacttgcgccgcccttaaatgttttcacaacggaataatccttattgtgattagcaaaaattgtttggcaaagataataaaaaaatcgattccgtacaagtactttaatattttttttgtatttttgcccttgaaacattatcacggatagttcgataactcttaccgaagtattgattatcatacactaacatgaacaagaaaattataggacttgaccttggaactaatagcattggatgggctttagtggagaaggatacagagcaaaacgatggtaaaatcgttgatgccggaagccgtattatacctatgtctcaagatgctatcagtaagtatggaacaggtaatttgcagtctgcggcttctgtgcgtactggttttcgcggtatgcgccgcctttatgagcgtgccgaactgcgccggtcacgcctgttgcgcgttttgaacatcatgggatttcttccaaagcattttagtgatgctattgattttacagaccacttaggtcaatttaaagatcagggagagcctttgcttccttacgagaaaaacgaaaaatgcaagaatgaatttatcttcaaagatgcattccatgagatgctggaagatatgcacactcatcatccggaacttgttgctgacggaaagaagttgccttacgactggactatctattatctgcgcaagaaagcactttcccatcccataagtaaagaggaactggcttggatcattcttaatttcaatactaagcgcggttattaccaaatgcgtggaaaagaggaagaaaccgctaccaatgacaaccaagtatatgacgtgttggaagtgtctggcgtggaagaaactggacccaacaacaagaagaaaggctataactggtatttgatccattttaccaatgggaaaaaacagatccgtacttggaaagatgctccatgtcacgttggcgacaagattgagtgcatcatcacttatcaggtgaagaaagacggtacgccaaaacttgatgagaatagagagcaactctacaagattacagctcccgaccccaatgattggacgctgagaaagaaacgcacagagtccattatcaatcatgatcatgttactgtaggagaatatatctacgatcatttgatggctcatcctgaagacaagatccgaggtaaatttgttcataccattgagcgcaaatattataaggatgagctacgaattattctcgatatgcagaaagaatatattcccgaattacgtgataaaaacttgttgacacaatgcatcaacgagctctatcatcataacgaagcgcatcgcaagtccttgcaaggacaggactttactaggctctttgttgatgatattattttctatcagcgaccattgaagagcaaaaagagccttgttgccgactgccctttggagttctatccttatagagacaagaatggggtttggaaacatcggcccatcaagtgcacaccacgctccaatcctttctttcaagagttcaggctctggcaatttatacaaaacctaaggattttccatcgtgaagaggaaagggacgggcgtctcttactggatgtagatgtcaccgaccaatttctttcctcatctgaggactactgtgctctctttgactggctgaaagaaaagggtgacatcacacagaaacaattgttggcttatccagccttccaacttggtaagaaggcaaagtcatatagatggaactatgtcgacgacgacaaacacgcctacccgctttgtaccacccatcacgacatctgtcaggctttgaagaacgttgaagaagcacccacgctctcggccatacaggaagagaatctatggcacattctcgactcggtagacgatcggtatgaattggagaaagccctttgtcattttgcagagaagcaaaaactggataaggagagctttgtaaacgctttcattaagtttaagccttttgacaataactatgccagttactccgagaaggccattaagaaaatgttacccttaatgcgcatcggacgctattggaaagcagacaacatcgatacgcacactctgcagagaattaatcatcttatcacaggtgaagccgatgaaagaatcagcaatagcgtaagggagaaatgttcgggattagaacgattggagcaatatcagttcttgcctgtatggaaagtatgttatgtggtttacaatcgtcattcagaggctacagacacaggacactggtcatcgcccgaagacattgacaactatctgaaaagtgaactgcagcagggctctctccgcaaccctgttgtagagagcgtcttggcagagtctctgcgtgtcgtgcgcgatgtttggaagcaatatggaaaaccgaacgaggtgcatatagagatggggcgtgacttaaagcagaataaggcacaacgtcaaaagaccaacagcgctatgcttgccaaccaacaaaccaatctgcgtattaggttcatgcttcaggagtttgctgatcctgagttccatatcgacaacgtcagaccgcaatcgcccagtcagcaagaaatactcaagatctatgagcaaggtgtgcttgacagcaccaacaacatccctgatgacatccaaaccattatagaccacattggggataaaaacaaaggcgcaagcaaaaacgatttgctgcgctataaactatggttggaacaaaaatatctgtccccctacacaggccagcccatttcactatcccgactttttacatcggaatatgaaattgagcacgtcatacctcaagccagatatttcgacgactcgatgagtaataaagttatctgtgaaacggagataaatcgagataaaggaagtatgcttgcttacgagttcatcaagtccagaggaggaatgattgtaaaaggcacaggtggtcgtcaatacaagattctcgacactgtgcaatatgaggagtttgtcaagagccactattcctcgaacaagcgcaagatgcgcaatctgctgctcgatgatgttcctgacagtttcattagcaagcagctcaacgactctcggtatatggctcgtcgggccctcgacattttctcacatctggtaagagaagagcaaaatgacgaaggtgctgtgtctaagaatgtcgttgcttgcaatggtgctatcaccgaccggttgaagaaagactggggcttgaatgatgtttggaatgacattgtggctccgcgttttgagcgaatgaactctattacccaatccaacagctatgggcagtgggtcaacaaggatggtaagcgctattttcaaatcaatataccgcttgctatatccaagggattcagcaagaagcgtatcgaccatcgccaccatgctatggatgctatcgttatcgcctgcgcaaaccgaagcatcgtcaattatctcaataatgcttctggagctgacatggaggtgcgtcacgatttgagaaatgcagtgtgcttcaaggacaaaaacgttgatggatgcggtaattaccaatggacaataagaaagccatggtgcacttttacgctggatgcacacaatacactgaaccatatcgtggtgagcttcaagcagaacaaccgaatcatcacacaaaccgtcaatcgctattggcactatcgtgatggcaagaaggtcatggaccgtcaagtgaaaggtgatcactgggctatcagaaagtcgctacataaggcaaccgtgtcgggagcgctatacataccagagaagaaaatggtgagccttaaggttgccttaggagatctcaatgccatttgcgacgctaaggctaaaaaagagatccggcatattatcaatgatgtgtatcaaggacatgccgataatgccacgctcctgaaatacttcagagcaagaaaatatcagatcaatggcatcaacttcaacaaattggaggtaaggatggtccccgtcaagcccaactattctgcatcaagagtgctacttgatagtacctttacagaaaaagatatcgaaaaagtaaccgatacaggtatacaggccatccttaaacaccacttggagcactatgtcgatgacaaagggaagcatgactgcgcagctgctttctctccagaaggacttgccgagatgaacgagcatctgacagagctcaatggcggaaagccccataagcccatcttcaaagtgagaaagaaagagacctttggcttgaagttcaatgtgggaaatgtcggctctaagaataaaaagtttgtggaggctgataagggcacgaacctcttctatgccgtctacgctgataacgagggcaaacgctcctttgaaagcattccgctcaatatggtgatcgaacgcaagaaaaacaagatggagatagcacccgctgcgaatgcaaagggtgaaaaactgctttttgtgctctcgccgggagatcttgtctatttgccacaggaaggcgagcatgtttccttgccattggatggaaggcgtatctataaaatggtgtcttgctctgagggccgtagttattttattccatatagtgctgcaagtgtgatttgtgataaagcagaatatggaccaaacaacaaaatggaacgttccttagaaggcgacatggtaaaaaccacttgcgtcaaactgaaagttgaccgcctcggacatgtcagcgtctgagataaagatttcggcctatgattaagaagaccctttattttggaaatcctgcttatttgtctctcgccaacgggcagcttgttatcaagctgcccgaggtggagaaacagagcgatttgtcatccgtcataaagaatacggcagtgaagactatgccgatagaggacttgggaatcattgtgcttgacaatcggcagataacgttgagccatggacttgtgaccgctctgatggctaactgtacaatcattatctcttgtgatgagcatcatcttccctttggactgatgctgccaatggcgggtaacacaacaatcaatgagcgagtgcgctatcaactggaggcttctcttccgttgaaaaagcagttgtggcaacaaactgtcaaagggaaaatcttgaatcaggcttatctcatagggacacacacttccaaatcgattgcttatatgcatgtgtgtgccgatcgcgttaagagtggcgatagcgacaaccaagaagcgttggcggctgcttactattggaaaaacatctttcccaacattcccaactttaccagggggcaggatggcattccgcccaataacctgctcaactatggttatgccatactacgcgctgtcgtcgcacggtcgttgatcattagcggcctgctgccggttataggtattcatcaccacaacaaatacgacgcatattgccttgccgatgacatcatggaaccctaccgtccctttgtcgaccagatggttctcgacatcatggcaaagaatgagcaaattgatgaactaaccaaggaaatcaaacgtgatcttctctcgataccaacagttgacgtgaaaataagtggtaagagaagccctctcatggtggctgtggctcaaacaacagcgagcctcgccaaatgctttagcggtgaaacaaggaagattgcttatccttctttttcatgaaaactcgacttaacgaatatcgtgtcatgtgggtattagtgttctacgacctgcctactgagaccgtccaacaacgcaaggacgctgcccttttcagaaagcatatcatgggtgatggcttcaccatgtttcagttttccatctatctgcgtcactgtccaagcatggaaaacgctttggtgcatatccaacgtgtgaaggcgatcttgcccaaatatggcaatgtaggcatactttgtgtcactgataagcaatttggtgacattcagttgtttatttgtaaacaagagaaaaaaacggcccaaccctatcagcaacttgaactcttctaaattcataaaagggattcctgcacttcagcaagaatcccttttatcgacaacactcttttttcttttctgaaaactaaactaatgcattgatattcaatgaattgtagcgttagagttgttgttgtacctacaaaggtaatcaaatttttgctaatcacaacaatgacggctacaccaataccgaccaattcgttgttgttgtacctacaaaggtaatcaaatttttgctaatcacaacccgtgatgcggtagggctgggaagttaacagttgttgttgtacctacaaaggtaatcaaatttttgctaatcacaacctctttcgtgcggcaaaaaaatcagcgaacgttgttgttgtacctacaaaggtaatcaaatttttgctaatcacaactaaaatgtagtcgcccagcaaggagtcgaagttgttgttgtacctacaaaggtaatcaaatttttgctaatcacaacggtggaagcgctggcacctctgtacatgtgttgttgttgtacctacaaaggtaatcaaatttttgctaatcacaacagtaagaagtttgcgaatatctgggcaaacgttgttgttgtacctacaaaggtaatcaaatttttgctaatcacaacttggttctaatactacgccgaattccaatgttgttgttgtacctacaaaggtaatcaaatttttgctaatcacaactaccgcgagctgtgcccaggcaatcacattgttgttgttgtacctacaaaggtaatcaaatttttgctaatcacaacggttatggttaaatcagatttaatgtcgcggttgttgttgtacctacaaaggtaatcaaatttttgctaatcacaacctagttgactatcggttttttaagatgtagttgttgttgtacctacaaaggtaatcaaatttttgctaatcacaacgtgatgtagtcaatccactttctcttactgttgttgttgtacctacaaaggtaatcaaatttttgctaatcacaacccgctcagcaaaatgcttttcagtctgaggttgttgttgtacctacaaaggtaatcaaatttttgctaatcacaacatcaaagatgcgaacggaaagaagatcgagttgttgttgtacctacaaaggtaatcaaatttttgctaatcacaacttctgcccctggcatgctcttacctgtttagttgttgttgtacctacaaaggtaatcaaatttttgctaatcacaactcttcgaatagcatgagagctctgtatgaagttgttgttgtacctacaaaggtaatcaaatttttgctaatcacaactgggatgctcacactgcgaatggttggaatgttgttgttgtacctacaaaggtaatcaaatttttgctaatcacaacaaatgcgactgtacgaaaaaaggtgcgactgttgttgttgtacctacaaaggtaatcaaatttttgctaatcacaacaatgcctacaataaggatagtgaggatccagttgttgttgtacctacaaaggtaatcaaatttttgctaatcacaaccgtcgtcccacttgtaacaaaggtatttcgttgttgttgtacctacaaaggtaatcaaatttttgctaatcacaactgtgtgttcgctcaccccttgcatcatttgttgttgttgtacctacaaaggtaatcaaatttttgcaaatcacaactggtgacaaaaacgggcgtcgcgctccacgtgggcgcgtgggttgaaacacggatcgaagacgccaagtactgaatcttggcgggtttcaatcgcacctttatagaattgaaagattaaagtgcatttcatgcacatttgttgtgcgagccaagaaggatctgaaatacaaatgctgtaaatggaggcgcaggttgccaaagaacattttgacagatgctgtgattgaattcactgaatacaattcataccggaagtatcttgagaaactcagactctaagcatttctctt

SEQ ID NO: 478 - DNA, 23363 bp, synthetic construct
  variation 15698..15797: note = n is a, c, g, or t
  misc_feature 1..23363: note = Synthetic
  source 1..23363: mol_type = other DNA
cccgctctttctgtctttgtggattacaatcgggtatcgcatcagcggtcctcccacttccattgggcttgtcggtagatgttgcgtagcgttcccatcggaatatctttggccggatgcttgaccgtgacccgtcctgacttcttgggatgcatgaactggtagtggctcccccgcgtattccgtagcacccaaccattctgttttaatttccgaatgaggtctgcgcttttcattatgcgtataatacacatcacaaaaaacgctgtcaattaacgtcctgtgattctgcttacagaatgacaggcaacgagttgggtaaaattgataagggccgctaatacacgcggccggacacgagccaatgccggtcgtcgggcacgtcgatcagcagacggcttaaattcatttccgccaactgggccgcgatttcgtcttcggtgaaggcgctcaataaggaatgataaaaatcgtggcgcagttgttccggctcatcagccgcgtattgatcgaccagggcctgagcctcttccggagtctcgggtcgtaacaaatccatgatgagcacgggtgccccgggcttggctaaggttttcagggcataccaaaactgaaaggcattgggcacgtgatgcaccaggctattggagatcacggcatccgccgggccgtccaactgcacgtcctggaaccggacgcagatgagtttgatccggtcctcaagccctgcctgacgcacggcttctttcgcccaatgcagcatgggaccggacgcatccatcgcggtgacgcacagccccggacgactgcggagaagccggaccggaatatccgccgggccacagcccaaatccaacacggttccttcttgaagatcgggatacaaggctagaaactgatcaacgaacccctgattttcttccgcgaaatcggcagtcgcatagacctcggcctgctcttcgccgtccataatttccggttcaagaatccgttccatattcgggtgtcctttccaccactcttgtctgtcaacaccggttgtatgatcgtacctacccccatcaggaggattcaaggtgaaaggaacacggccacattttccttgcaccattcccgggttctggctaaggtctgaagaaggatacgttgaaaggaacccaatggccacgtatgcattcggcgatattcaggggtgcctgacccctctccaaaaactgttggatcgcattcgattcgatccgtcttcggaccggctgtggtttgtcggcgatttggtcaaccgcggccctcattccctggaagtgctgcgcttcatcaagggtctcgaaggacgttgcgtggtcgtgctgggcaaccacgacttgcacgtgttggcgatccattgcggagtcgcgcggctccggaaacaggacacgctgcaaccaatcctggaggcgcccgacgcagacgaattgctcgattggcttcgttgtcaatccatgattcatcgtgaaggcgactatgtgctggtccacgccggcatccttccccaatggtccgtggaacaggccgtggtattggccggcgaagtagaggatgccctcagatccgaacggtatcagactcttttacctttcatttaccggagtgaggagacccattggtccgacaccatcccgccccctgcgcgacttggcgtgatcacgaacgtcctgaccagaatgcggatgtgtacccaagaaggccgcatcgacctggcgttcaaaggtccgccggaccaggcaccatccggcctttctccctggtttcgcctgccttcctgtacccgacgaacagaaaccgtaatttgcgggcattggtcggccttgggggtgtgcatagaggaaaaggtgatcgcgctggacggaggatgcgtctggggaaacgagttagcctgtctgagactggaggaccggaagctgtatacgattgcgtgtcaatgagcgggcccgtagcaactgggtagtttccggcaaaccgggaatccgcgtccggcacgcttgcgagtggctccatgaagctgctttcgaaaaagcattccatcctggaaagacccgtcatgcaatttcgtccgttcggcgtgaccccggatggacggaaaatccgagacgtgagcggaattacgatcaaggcaaacgtcgaatacctggaagaagtcgtcggcaagaaaaacggggaagccgccggtcgtcaagccatcgagcgcctctccgattcgctgaacgcccggatcaaggacccctcgtaccacgttacccccgaattcctgcaaaacatctggcacagttattcctatgaattcgcggtttacctcggcgagttctgcatcctgatctccgggaatcccaactttcaattcgagatgggcaaacacaaattcatttctcccgtcattcaaaccctggggcggccgttttccgttgcgcaaatcttcgaactgttcccgcgcttcggagaaaagtttgccaaagactcccttcgcttcagcgtacgcaacgtgactaatggctcagccgtcctgggtatgacgctgaccgaacacgtagcccaacaatttggcccttatcggaaccggtgcgcctatgtcatctgccaggcatcgaaggccggactcctggctgtgccgcaacaggttcatcacctgggatttgccagcgtccgggacctccgatgcatggcggacggggacgagtcctgtgaatgggaattccattggcccgcccagtcgctctctgaaacccgtggatgggtcgtgaccgggaccgtggcatgcgtgagcatcccggccttcgtctacgtccggtcggcgcatcctgaatggtcctggttggaggcaagcctctggactctcatcccgggtttggcttcctggttcatctggaattggtatcgtctcaagaagaaagtagaagaacgggaaaccttgctcaaggaacaagtggattccgtggatgcccggcacgaagagcttcgagaagcctatctcgaacaggaacgcaccgttgtggaactccgcacactgaacgcggacctggaaaaccggatcctggaacgaacgcgctccctcgcagtcgccaacgaacgactccgcgaactcgatgaacgcaaatccgccttcgtctccattgcgtcgcacgaaatacgcacgcccctgacctccataaaaggcttcgtggaaaacatgctgaccggcgtgactggggatttacgtgagcgacaagtcctgtatctcacgcggatcaaatataacatcgaccgattgacgcgaacgctgaacgacctgctggacttgtcccgtatcgaagccggtcatgtggaattacggttgaccgacgtctcgctggccgaagtgaccgctgaagccttggacaatctacgcccccaggcggaggaaaaatccctcgtgctggagaccaagaccccttcgcagcttgcgccgatacagggagatcgggacaagattcttcagatcctgacgaatctcattcacaacgccataaaatttacaccttcatccggtcgcattttgatttcactcgtgcggttgcaagactccacgatccaagtgtgcgtcgccgacacgggctgtggcatcgctcccgaagaggtgcccaacgtcttcgatcgtttctaccggagcgacagcgggacgacggaggcacggggagcgggcttgggcttggcgattacgaaaagcctggtggacctgcaccgaggacggatttgggtggaaagcacaataggcagcgggacccgattcttttttacgcttcccacccggtgaaccgtgaaacggccttactggtcgtctttctgcgcttccgcccgtttctgcttgagaacgcgcgcgaggtacgaacgctggagccccagcgtttccgcggctttggtctgattgccacgagcccgtttcagggcttgttcgatcagatagtaccggtagtgttccatcgcctcatggtaagacaaatcactcgcctctcgcacttgaggctcttcttcctgatcgcgagagagacgtaaatgctcgggaccaatttcacggtccgtggacaggaccacggcccgggccacggcgttctccaattcccgcacgttgcccggccaccggtaccggtgcatggccccgagggcggcctccgtcagccgcatgcccggctttcccatctccttggtatagcgccggaggaacaggtcggccaaatgaggaatttcatcgggccggtctcgtaagggaggtatggaaaaactgatcacgtttaaccgatgaaataagtcttcacggaacttgccttctctcacggcctttgacagatcgcggttcgtcgcggcgatgacccggatgttgacctgaaccagtcgcgtcccgcccacgcggtgaaattcacggtcctgtagaagacgcaacaatttggcttgcaggtccggcgccatgtctccgatctcgtccagaaagagggtgccgttatcggccagttcgaccttgcctttttgttgcgtggtcgcgcccgtgaacgcgcctttttcgtgaccgaacaattcgttttcgagcagggtctcggtcagggccacacaattgatcacgacgaagggattctcaatccgcctgctccattgatggatggacctggcaaagagttccttgcccgtcccgctttctcccagcaacagcacggtggcatccgaatccgccgcccgcttgatcaatgcaatgagggacgccatggccggcgtgtccgccacgatggtgccgtaccgtgaatcgacgtcctcgcgcaacacggcaacgtgccgtttcaacgcctcgcgttccaaggccttttgcatgaccaaggtcagatgatcgaggtccaaaggtttcatgagaaaatcaaaggctccgcgcttcatggcttccacggcccgttcaatcgtcccatgggccgtcatcacaatgatcggaggaagattcgagaggcgcgcctgctcttgggccaacttttccatcacttcgaggcccgtcatccgcggcatttccaaatcaagcagaacgagtccgggtttctcggattccaggatctcgagcgcgtgctgcccatcgacggcggacagcgtcgcatagcccaatgactccaaacgatccgtcaacatcaacacgacgtctggatcatcatcaaccacgagaatgtttttctgcatcggcaacccaacgaatattggtcccggcaagcaaccccagggcaaacagagtttcggctcgggtttcgtttcagcgtttcttctttcatgccgaaacggccagaagcgattctaggcccactccttccgaaatctcaacatatattataacgattggtctataaatattggctatagggacaggcccctgtacctgccttccggctgattcgggacggcacgggggccgtcccctacacagtcggcgcttggagtttgccggaaggcgatgttatagtctcgcggtcatgagcggggaatatcggaccaaagccttactcatcgcggtgtcagaggaccctattccggtgcaagcctgcatcaaccggctcgccccggagtttctctgtttcgtggtctctgagtcccgaaaaggctccatcgaaaccgaagttcaaccggccatcacgacaatgccgcaacgatgggattggattcttgcggaagaatccgggagttttaccgtggtccatcaaacgttgaccaaaagccttcctgacatagtgaaaacctggggcctgcaacccggagaactcgtcgtggacttcagcagggccacgccggccattgccgcagccatggcgctcaccagccggccgtggacctcgcaagtcgtcggcttgaccgagccggagagcgacacgggcaagcctgccctgagcttgtcgaaggggcgtgacgtggtggcggtcggcgaccggaccttcgcttggcaagaagggaatccctggaacgaagaagccgtgccggccaggcaggaggcagccttgctgtttaatcacggggcgttttcttcggcagccaaacggtttcgacgtattgaatcgttggtcggaggcagcttcaaaccactgtatcacgccctggcggatttgggcgatggctatgccgcctgggagggcctcaagtaccgggacgcctgggacaaactcaaaaccgcgctcaaggccttggaattggcctcggtctggggcgggccgcccggcatgtctgctttattgtccggggtcaaacaaaacctgaagtttctggaaagcatcgtcatgaaccccgacgacgtcaagctccccgtggcgcatgatttacttgcccacgccaagcgacgcgcggaacgggaccagcaaatcgacgcggccctccaactgttgctgcgcaccctggaagcctatgcccagtaccacttgtggaaacagcatcggatcaagagctgggacgtgcaggttgaacaattgccgcaggatctccaggaaccctgccgcacctgctatgccaacgacgtggacggcaagtttcacctcccgcttcaagcccaatttcgcgccttggccgggctggggcatcccatggggcagaccttcgtgaacgagtggaccaagatcaaaactctgtgggatacggcccatcagagcgtcctgggccatggatttcaaaccacgaaagccgaccgctttcatcagttctatgccgcagccgtcaagctgaccaacgtcaccgaacccaacttgccggtctttccgaagatgacgctgtaacgccggtgaacgtcaaaatctattatgaggataccgactgcggcggcgtggtgtactacgccaactatctcaaatattttgaacgggcgaggaccgaatacctgctctcgcacgggatctcggtcgcggagtttcaacggcaaggcatctacttcctggtcacccatgcggaagtcttttaccgctccgcggcgcattacggagaaaccctccacgtcgaaaccgtggcctcggcatcacgaaagaccgccgtcaccttctcccacacgattcgggaagccaccagtcaacgcctgatcgtcgaaggatcagccaccctcgtcaccgtcgacgccaagggaaaaatcatcaaacgccccccgcaattgcaggcgatgtttcagtagccagcttccgaaccgcagtgtagtgtatgtgttcagtaattcattgacaatgacaacctgggattatggggtgccatcatcctgcacaacgcgccccatttggtcatcctgagcgaaacgaaggatctgcttttccaagccttcggttgttgagcgagagattcttcgctaggtccttcgcattgctcagggcaagctcagaatgacagctataatgtggtagcttttgattttgtcaacgaattactgaacattgccaacgtgcctcatgcggctatcatgccttgtcccgaaacacccaggccaagtacatgccgccaatagcgatcgtcaccagttccacggtctggaggatgcgactcaccacggcatcgggttccggaggcgacaggatgaagtgcatgcccaagtaggcaggaggagaaccgggcagcgactcccacggcggaaacagcacggccaacaccaacagtccggccatgatgtacaggatccgaagattgaggatctccttggatcgagcctcagtctgcggctcctggaaaaaccgcttcccgcaactggtgcaaaagcgggcctccgaagccgatgcatgcccgcaagcctgacacgtcttttgaccgttcatcacatcagattataaccatgagaagagaaattgccagcggggaaaagcgagacccgacgccggatggcgtcggcacctgttaggtgacggtttcaaaagaaggcccgacaaggtaagattgcgatacgatcgtagaaagcgatccagtaaaggtccaaatacggaatttgaatgatgaaccaagtatctgaacccagggcaacctacggcggaaaatggaccagagaaaagcttgaaatactggaaaagtacttagacgcctatacgaccgcactcaaaaagacgcctttcaagctaatgtatatcgatgcctttgcaggcacaggccatgtggatcttgatgacaacgatgaggataccgagaacttcatacgtggttcagcaataagagccattggcattgaccacaggccattcgacaaactgatttttgttgaagaaaaagaaggtcgatgttctgaattggagcacctaagaaaagaacatcccggcagagatattcagattgaaaattccgatgcaaacgagtttttgaggaatctccaacaaaattgggagcgatggcgtggtgttctctttctcgatccattcgccacggaagtcgaatggacgactatcgaaaagatagcgggtttgaacgcgctagatacatggattcttttcccagtgtctgcgattgcccgaatgttgccaacatcacgccaacctgacgatatttcggtaaaatgggccaagcggctcactcggattttcggagatgagaattggcgcaacctctaccaagaagacccgcagggaaatttatttggagatatcgaatatcagagggatccaggcgtcaatggcctcatcggcgtctacaagaacaagcttaaagcgctttttggcagaaggttgctagagaaatcgcgaacgctaaagaactccaggaattctccgttgttcgagtttatgttctgcgtgggaaacccgaaggacatcaaaccagctaagccaatcgcggaatacatcttggagcaaatgtaaacatgtcaacgctgtcgagcatcgaatggaccgagaacacctggaacccggtgacgggctgcacgaagatcagcgatggctgcaagcattgctacgctgaacgcatggcatcacggctccaggcgatgggcgtcaaaaaataccggaacggttttgacctcacccttcacgaatccgtactggaagaaccgctcaggtggaaaaacccgcggcttgtgttcgtgaactcaatgagtgacctgttccacgaatccgtccccgccgcattcatcgagtcggtgttccgcgtcatgaatcaggcgtcccagcatacgtttcaagtactcacgaagcgcccggcccgagtcatggaactcgaccataaactcacctggacgccgaatatctggctgggcacgagcatcgaatccaaagagtggattgaccgattgtcgaagctgaaagaagccagcgctctaacaaaattcctgtctctcgaaccgttgctggggccattgcccaacctggacttaacaggaatcgattgggtgatcgtaggcggagaatcaggacccggtgcccggcccattatggctgattgggtgcgggaaatacgagacaattgcctacaaagcgacgtcccgtttttcttcaagcagtggggcggcgtattcaagaaacagacaggtcgcacgcttgacaacaaaacgtgggatcaaatgcccgctttgaaggtgatttgacgcaatgcccaatgctcctcgcagatcaccacatccgggccgctcgatcaggcgggactgcctcgaagctcttggactgacagtaactgacggcgccaagatactggggattagccggtacatgctgtcgaaggtcctcaatggccaagccgggatttcaccggaaatggccgggcggctggaaaaagcctttggtggaaccgcgcgtagttggctcgcacttcagcaggcgtatgatctcgcacaggtaaaacgggaaaaaatcaacgtgcgacgtgcgtctttggttctggaagaagcgagagtataaaagaagccatacaaaaaggcgacccgtaggtcgccctctgaatgttgcgaattctcgcttgttaatcatagcgaaaaccgcctattcccatgttctaatacagtgattagaatatatagaagctttgataaaatcaacacaaaatagaggagtgttttgagatggcggtatacagaataggattggatgtcggcactaactccattggatggagcgttttggaactcaatggggcgggagagccatgcacggtcacggccgccggagtgcggattttcagcgatgggcgggctgataagtctaaagccacactgaaagcagaccgccgtaaagcacgctcggctcgtcgcagacgagaccgtttcaagcaacgccagacattcttgctagacgtgctgaaaagggtcgggctttttcctaaggacgaaagtaagcgcaaagctctccaactccttaatccgcttgagttacgcaccaaggcattatcagaaaaacttgagccgtaccatatgggccgcgctctgtttcatctcaatcaacgcagaggtttcaaaagtaatcgcaaggaccggagcgaggaaacgacaagcggcaaggtgtccaattcagtgcggatgttgctggagcaaatgcacctgattgacccgcctatgccagcagaagaatacaaaggattgtcgaagacggacaaaaagcaggtgcgacaggaggaagcggaaaaccgaaacttggcgctaaaaaacttggcaatgcaatccaaactgacgtatggatcgtttttgtggcagcgtcaacaagaaggcaaacagactcgtgcacgccccggtgcaggtgataacggcaagctttatgatgtttatccgacgcgcgagctttacgaagacgagttcaaaaaaatatggaatgcgcagacaaagcatcatcctgccctgatgacggacgaagtacgtgagcgtattcgtcatatcattttcacccagcgtccgctcaagccgcaacagcgcggccaatgccagtttttgccagaggaaaagcgcacatttcgcgctatgccaagtttccagcgttaccgaatttaccaagaaatcaataacttggattggatcggtagtagtggcaagtgttttctgaaagattatcctgccgcacgtgatgcaattatcggcataacggaaagaccaacgcttaaagaaaagccaactgcccaaaatgctcaagtgagttttcacaaaatgaaaaaactcttgaaacaaatggatttagccgaaggaaattttgctttcaattttgaaacaccaaaacgcaatggccttgacggaaaccaaacttccaacattatgcagcatgaagattatgttggagaagcgtggcatgattggacgctggaacaacaagatgatttcattgcgttgattttagacgatacaaaaactgatgaggatgtacggtgcgaattaatcaatcgttacaagctgtcggaacatgccgcaacatcctgcatgaatgcaccattaatagaaggaatggccagcttatcgctgaaagccgccggattgttgttgcaaaaaatgcgtgacggctaccatattcaatcggacgctataatagcagtagctaaagaagtcgagaaatttgtcaatccattcattcgcgccggcaaaggtgaaatgttgtcggagctgccttattacggcgaagcgtttagcgatggtcgccatatcattcccggtgacaggcaagaagcagacaggcatgacgatttgaaatactacggcggcgtcacgaatccgaccgtgcatattgcgctcaaccaaatccggcacgtggttaatgaactcatacatcgttatggtcacccaaaatcaatcgctattgagcttgctcgggatttacctgcgggcaaggaaggacgggctgccattaacaaagaacaagctgataatcaagagaagaatgaaaaactggatgaaatattgcgtgacctagggcagaccatcaattctggcaatcgtctgcggttgcgtctatggcaggagttggatgaaaacgatccgaatggtcgttgttgcccctttaccggcaaaaaaatttgcaaggcagatttgtttggtgactcgatcgaaattgaacacttgattccattcagtatctccctggatgacagccgcgccaataaggttctttgtacgaggcaagccaatcgcgataagggcaacagagcaccatttgacgcattcgggaatagcccagacggatactcatggggcgatattcttgaacgcgccaaacaactacctaaaccaaaacaatggcgttttcaggaagacgcgctgaagatatggaaacgcgattattctgattttaccgaacgtcatttgaacgatacccgctatattggccggctggccaaggaatacttggagaatatctgcctgttcaacaagattgacgtgctgacggggcggcttacggccctgttgcggggctattggggattgaacggcattttgggcgaccacaatcaagctcaagaaacaaaaaagaaccgcaatgaccaccgccatcatgcggtggatgccattgtgatcggcatgacctcgcgctccatgctacaaaaggttgccaccgctgcaaaccgcgccgaagaacttcaccttgaccgactgtttgagagaagtgccaatggcaaaaacccgattgacccgtggcccggcttccgcaatcacgtgaaagagatcgtgaacaaaatactcgtttcatacaagccgaaaagaaaaacactgggcaagaatacaaccgacggccaactgcacaacgacacagcgtatggcatcatttcggggccggataaacaagggcgttacaatgtagttgtgcggtgtccgattcaggaatttaaaaaacgtcagcacgtggaagcggtccgcgatacacaattgcgggcagaatttttgcaagcgtttgatgcggaaggtccaaccggtgttgcccgtcttgcgggggacaaaaaaataagacgtttaagacgaaccgaaaccttgagcgtcattcccatcagggataaattcggcaagggctataaagcgtataagggcgatagtaactggggtatggagatttatgagtatcctaaaggccacaaaaaagccagccaatggcagggggtggtgatctcacgctatgaggccaatcaagatagctttcggctcggttacactcaaaaaccacaccccgctgctcggctggtcatgcgtctgcaaatcgacgactgtgttgaaattgagcaaggtgggctcaagcaaatcatgcgggtgcaaaaactttcgaggaacgggagtctagatcttgcaccgcataacgaagcgaacgtggatgccagaaaccgtgacaacgatgatccgttcaaatatctcaacataacagccagcaaactcaaggaaagcaatggccgcaaggtccatgtcagcccggcggggcgggtgagttatgaacaacggcgcaaaccccgacggaagaatgaataatgcccgagcagattgttgaaatcaccacaccaggtctgcatctcgccaaggaacggggctttttggaaattagggacaagtccgatctcattggacgagtttcgctggacgatatccttgcagtgattgtcagcgtgcaaggctgttcaatctcgaccgtcctcatggatcaactcagtcaacgcaacatcatgctggtagtatgcgggaagaatttcctgcctagttcttttatcctgccagttgccggccacgggcggcaattccaggtaatgcgagcgcaagtaaacttgtcggaacctcgccggaaacgcgcttggcaaaagatcgtccgtgccaaaatccgcaaccaagccgacttactcacccatgccggaaaaaatagccgccagcttgtcaggttagcggaaatggtaaaatccggcgatctggaaaattgcgaggcacaggcagcgcgcatctactggcaacggctattcggcagcgacttccggcgcgatcaccaagcaataggcttgaacgcggcactgaattacatttatgccgtcatacgggcatgcgtggctcgtggggtaagcgcagccggcctgcatcccagtttcagcctatgtcataagaacccacaaaacccgctgaaccttgttgatgatctcgtagaacccttccggccgattgccgactatcttgtatggcagagcgatgccagccgctttcaggacctctcgccgaaaataaaggcaagcctatcggcgattaccacagcaatgatccctctaggggaagaaaaatcacccctgtcactggcaacagtgaaagcctgccgttcgtttgccagttactgccttggtgaagaggacgattttttgttgccaaccatgcccatacgtctgaatgcttcaacagcatgaagcgcagagcacatctcagcccctatcggattatgtgggtcgttgtgatgtttgatttacccgtgggcaccaaacaggaaaggaagcaagcgacggattttcgtaacaacctgctcgacctcggttttgagatgtcgcaattctcagtgtatttgaaatattgcgcgtctagtgagaaggcggaatccatcggtagccgaatcccgaactatctaccgcttggagggaaaatcgatattctgacgatcaccgacaaacaattcgctaatatgaaaagattctatggtactgaccgaatcaaaaacgacggaaaagttgatcagttgcacttgttttgaaggagttttcgctacagtctgtagcgaaaactccttcaaacataagaacttctgggagtcccagtctagcacatgggaataggcggggctaggacaacccccacggatgccaggtgcaaacccggaagagtctagcacatgggaataggcggggctaggacaacgtccgtgacggacggtcttgcctattacaaagtctagcacatgggaataggcggggctaggacaacgaacgaatgttcgaagccatgtcgctgtttagtctagcacatgggaataggcggggctaggacaacggaatgctgatagtcttctctgccccattgagtctagcacatgggaataggcggggctaggacaacgagtcccggcttagctccagggaagttaccagtctagcacatgggaataggcggggctaggacaactcgttaatgacgatggattgattgaagtcgagtctagcacatgggaataggcggggctaggacaactggccgggcgtacaccttcggccactaattagtctagcacatgggaataggcggggctaggacaactggccgtttgatccgttgaaaaataccgcaagtctagcacatgggaataggcggggctaggacaaccacactaacaaacgaagggggattttatggagtctagcacatgggaataggcggggctaggacaactcatcgaaatctcccctcaaaacctttgtgagtctagcacatgggaataggcggggctaggacaacacccgacccgatgttacctcgacggccaggagtctagcacatgggaataggcggggctaggacaacactaacttcttcactttcgctgaggcctcgagtctagcacatgggaataggcggggctaggacaactctacgccgccacggatgagttggtgaattagtctagcacatgggaataggcggggctaggacaacgaaatcgtaggttgggtcagatccagggtcagtctagcacatgggaataggcggggctaggacaacctctcctttgagcgggactttctcacgagaagtctagcacatgggaataggcggggctaggacaacnnnnnnnnnnnnnnnnnnnnnnnnnnnnnnnnnnnnnnnnnnnnnnnnnnnnnnnnnnnnnnnnnnnnnnnnnnnnnnnnnnnnnnnnnnnnnnnnnnnnagtctagcacatgggaataggcggggctaggacaacctgatttgattgttgttgttaacgtgatcaagtctagcacatgggaataggcggggctaggacaactggtacgggatgcttatgagtttgccgttgagtctagcacatgggaataggcggggctaggacaacgatgagtaggaatagtacgacagggatcatagtctagcacatgggaataggcggggctaggacaacataggaggaaaagtcatggcaatgagacggagtctagcacatgggaataggcggggctaggacaactggtggggaatataacggagatattaacaagcttgtacttttactcagataaactcgtaaaatgcaattgcttgtgaagacgcgggtgacgtaagtgaatatgaaattgacagtcctgaaaggccgttcctataatcctgcacctctttccaccttgccataccgaatgccatgacgatttctctgcctgccattcatactgcgtcggttattggagcgggggcttggggcaccacactcgcccgccatctggtgaatcaggggctcacggtcaagctctgggcttatgaaaaggaagtggtcgggaacatcaacctcaaaggggaaaactccttgtttttgccgggagtcactcttcccaaggcgctttcggccacgcattctcttcaagacgcggttgccggcaccggcttgatcgtgctggctgtgccttcgcatgccatgcgaccggtggtccggcaattgatacccgcacttcccgaacctcttccgattgtcgtggcgtcaaaggggattgaggaagattcgcatcaattgatgtcccaggttctcgacgcactgctgccctccggctgggctcatgggatcaccgtcctcacggggcccagctttgccgctgaagtgagccgggacaagcccacgaccattttgttggccgggcaggatgccggccttacggcacacctgcaaacggtgttcatatccgcagcgttccgggtgtacaccggaacggatcatatcggagcgcaattgggaggggcgctcaaaaacgtcatggcgattgcggctggcgtggtggatggcttggagttgggactgaatgcccgggccgcgctgatcacgcgaggattggccgaggtgattcgactcggcgtcgcgcttggagccgatgtccatacgttctacggtctttcagggttgggggatctggtgctgacctgtacgggtaccttgagtcgcaaccatgccgtgggcttgcaattgggccaaggccggcagttggaggatattctgaacgaaaccgtcacggtggccgaaggcgttcggaccaccaaagccgccatggcgttggctcggcagtttcaggtggagatgccgattgtccaaggcgtccacgcgatgctgtttgaaggtaaaccgccgaggcaaatcgtcgctgatctgatgtcacgatcggccaaagaagaaatccctttcgcgaattccggccgcgcgcgctgacccccatgcacccttcggctctcgaatctctgctgcagtcggttcaagccgggtccacgtcaattgcggacgcgctggaacaactgcgcaccctgccctatgaagacttggaatttgccaagctggatcaccatcgcacgttgcgtcacggctcaccggaggtgatcctgtgcgaggggaagaccgagaagcagatcgtcacgctgacccggggcctgctcaaacacaaacagccggtgctcgccacccgcgccgatgccgtcgtcgcgcgcgcgctcaaacgagtaagccggaaggccgtgtatcatcaagcggcgcgagtcgtggtcattcagccgtccacccccaaccccctgaagggtgatatcgtgatcgtgaccgccggcaccgcggatatcccggtcgcggaagaagccaaggtgaccgcgatgacgatgggaagcgccgtacacacgattttcgacgtgggagtggccggggtccaccggttgttcgatcaggttgatcgtctccaacgcgcgcgcgcgctgattgtcgtcgcgggcatggacggcgtcctgcccagcgtggtggccggtctggtgcaaaccccgctcattgccgtgcccaccagccggggctacggcgcgcacttcggggggcttgcccctttactcaccatgttgaatacgtgttccggcgggatcggcgtggtgaatatcgacaacgggttcggagccgggcatctggcgcatcggatcaataccctggtcgatcgaccgtaagcaccggcagggtctattcacagctcacttttttcagcagtcccggcattctcaggttgatcggaatcggttacgaccggatcttcgccttcctcattcaagaggtcggggccggcttcatccgacacgaatggcacgtgttctaaatgcggagcctgccgggcgagggtttgtggagaagacacgtcaagcgtccctctcgcaaacggcgaaacgatcttgaccttggcaaatccttcctcatgggccatcaacttggctctggcttcataggaatacgtgccttgcggtacatgttttcgggtctggtctttcccatcccagagcagggtggtcgtcatgcgaggcttgccgtccttgatggtaacggtatccaggatctgccgtttaaccaggaatcgaatggatcgcctggtcggtacactgatgagcgaggagacttcgagcaaatcgaactgatccagtttttcaggcaactccacggtcaccgtgatggccatgggctcatgacccggagcaaaaggcacgggtgaggtcgtgatgcccacgatcttgagtggagacggcgaggtccgccttttccgcttggcatcgagggacaccggagccagcacaaaagtcagaagcgtgagcaggctgataaaggtcagacgagaagcgatcattcgggttttgatttcggattgtggattgttgatttcggatcgcagaggagtgtggattgacaatccgcaatccgcaatccaccatgtgcttacataccgtgacgcgggtagctcgtcaaggatttttctaagtggtccggcacaggggccggaccctacacgaggcgggaaaggtcgccgtgcatcttcacttcgattgtttttccggtatcagcggagacatgacgttgggggccctcgtggacgtcgggctctcgccgagagccctgagccaaggtctcaaggcccttcctgtttccggataccgcctcaaagtctcaaaagttcaccgcggggcggtccacgcgacgaaggtggacgtggtcatttccagggtcgcgggaaaacgccgctcctggacgcaaatccggcggttgctgtccacaagccgtttacctcctcaggtcaaaaaacaggcgcttgcggtcttcgaacgcctggccacggcggaaggaaaggtccatgggcaagatcccgccaatgtctcgtttcatgaagtgggggccatcgatgccttggtcgatatcgtgggcgggctgctcggatgtcatgaactgggggtgaaaacctttagcgcgtctgccgtcaacgtggggtcgggaacgatcgacgggacccacggcgtgttgccggttcccgggcccgcggttgccgaaatggcgaaagggtatcccatttattcccaagggcccgccatggaattgaccactccgaccgggatggccctgctgaccactctgacgcagaattttgaccggctaccgcttgtggtgccaagctccgtcggatacggggcaggcacggctgatccgccagactggccgaacgtgttgcgcgtgtttcttgccactccggccctcacctcttcctccctcacccctacccctctcccggggggagaggggtaccaagcggaccaggttatccagttggaaaccaacatcgacgacatgaaccctcaactgtacgaagcggtcatggaacgcctgttcgagaacggcgccctcgacgtctgcatgaccccgaccatcatgaagcgcaaccggccggggatcatcctcacggtcctggctcaccccgagcaagccgtccggctgacgcaactgctttttcatgaaacgacgaccctcggggtgcgaagccaacccgttaaccgaaccacgctgcctcgttcaatgcaaacgatccgcctgccgcatggccgcgtccgcgtaaaaaccgttcgcgccggcaagaccgtcaaataccggcccgaatttcaggactgccaggccatcgccaaaagaaccggcgtcccggttcaagaggtcatcgaacgggtgatgcaagcggtccgggacaggaaccgggtttaacccatgccgaatacaccgacacgccacaagcccattctcgccgtgaccatgggtgacgcggccggcatcggtcctgaggtgattgtcaaagcgctggcgtctccggcggtgtggcgtgcgtgtcgtccaatcgtaatcgggtcggtgccggtgctccaacgggaagcccgtcgcctgtcctcttccctcacggttactcccttgcagggcgaccacggatggggtccgagcattcgcagagaccgtattccggtgtttgatcctttgaaaactccgttgggtcgcgttcgcgcaggccaacccgcccaaggccccggagcggcttcagtcgagtttattaaaacggccgtccggtgggcgcagagcggctgtgtctcgggaatagtcacggctccgatcaataaagaggcccttcaccttgccgggtatctgtaccccgggcatacggaacttctcgccgatctgacgggcaccaaacaggtcgggatgatgttaatgggcgggccactgaaaattctctttgtgacgacgcacctggcgctccgggacgttccaggcgccttgacgaccccacgcgtgttgcaggctattcgactcgcccatcgcgccatgaaagattatttccggatcccgaggccgcagattggcgtgacagccctcaatcctcacgcgggcgagcacgggttgttcggcagcgaagaacaggactgcattgcccccgctgttcgccttgccaggcgcgcccgcattcaagcatccgagccgcttccggccgatactctgttcggcgccgcggtccgcggagcgtatgacgtcgtggtggccatgtatcacgatcaagggctgatccctctcaagaccgtggcgttcggacgctgtgtcaacgtcacggtcggcttgccgatcattcgcacttcggtggatcacggtacggcctatgacattgtcggcaaaggcaaggccgatccccaaagccttgtggaagccatcaagctggccgcggatctggcaaagggaaacggctgattgccgattgaaagaattcgcaatccataatcgacaagccgaaatgcgtgcatggacctgccgaagcctggcccttcaaacccttctggccgtggaacgggaaacctgttttgccgatgaggcgtttgcccgcttcgccgcgcgcgcgaagctgtctcacgaagatcaggccctggcgtttgaactcgtgtacggggtgcttcgtcaccgggccacgctggattggcaattgaacgccgtggcgagtcgtcccgttcaccggctgccgaaggtcgtggccgccatcctgcgtctcggggcctatcaaatgcggtatttggatcgcatcccggtttctgctgcggtgaacgaatcggtcaaactcgtcaaaggggtcaagggccgggattggagtggcgtggtgaacggcattcttcggaatgtgcaccggacggaaatcgtatggccggatatggctcacgatcccgtgaacgggctatccgtcacgtactcctgcccgcactggttgacgcaacgctggatcgaccgatggggtctcgaaatagcggaagccatgtgccggcacaccctcacgatcccgcccctgacgttacgcaccaacacgctccgttgttcccgcgagcaactcgaaaccaggctcggagaagaagggtatgcggtatcccgaacgtccgtcagccccgaagggcttattctggagaagtgcgggtcgttgcaggccttgcccgtgttacaggagggctggtgttacgtcgaggacgaggccgcccagttggttcccctgctgttggatatcaggcccgggcagcgtgtcctggacgcatgtgcggctcccggaggcaaatgttcacacatcgcggcgttgatgcagaacaaaggggagattgtggccaccgacccggaaccccgccgccttgaacgcctggaatcgaatctgcgcatgctggggatcacgtgcgtggaaacgtgcgagctctcccacgagacggaccatgtctccccatggctacatgcccaagaagcgtttgatcggattctggtggatgcgccctgctcgggtttaggggtgctccgtcgtcatcccgaagcgaaatggcagaagacttccgcacagctcgattggcacgggaaacggcaatcgggcattctggaacgcgtggctccttacttgagaacgggcggagtcttggtctatagtgcgtgctcaacggagcccgaagaaacgacgcgagtcgtttctcgtttttgtcaagaccacccggaattttcccgtgaatcaacggcacggtggcttcctccacatgcgcattccctgacgaatccggacggagatttcctcacgtccagtttccgttacaatatggacgggttctttgccgcacgacttcgacgaacgtagaccatgagttccgcgaccttacacattgctccttcgattctctccgcggacttcgcgcacctggccgatgaaatcgccgcggtggaagcggcgggcgccgacctgctgcacgtggacgtgatggacgggcatttcgttccgaacctcacgatcgggccgcctattgtcgagtcgatccgaaaggtgaccgcccttcccctcgacgttcatctcatggtgacgaatccggatgccgtgattcccgactttgcccgggccggcgccaactatctcacggtccatacggagacctgtccccatttgcaccgcacgattcagcgcgtcaaagagcttggggtcaaggccggggtgacgctcaacccgtcgacctccctgagcaccatcgaagaagtcgtcacggaggtcgacctggtgctgatcatgtcggtgaatcccgggttcgggggacaaagctttatctccgcctgtttggataagatccggcgaaccagacagcttctcgataacaccggcagccacgccctgctcgaagtggacggtggcatcaaagtcgagaacgccgccgaggtcctcaaagccggagccgacgtcctggtcgcggggtcggcgatttttcgcagtccgaattatgctgacacgattgccgcgttccgcaccgttgcccgggaactccaaccgcgtagtgtcccctctccttctgggagagggtgagggtgactgggtccatgcagaccacggctgtgtatgatagtttgcatcctctcgaaatcaacctgctggcggctttcagccaatcc

SEQ ID NO: 479 - DNA, 23333 bp, synthetic construct
  misc_feature 1..23333: note = Synthetic
  source 1..23333: mol_type = other DNA
tttaaaggtacaactgttgcaccagcacgttgcacagctgccgctaatttgctgatttcgcggcgatgcaagagaagttttctaggctgagtagccttatgattaaacctattacctgcgtgatattcaggtatgtcagcattaatcagatgcgcttcggcctgatcgagttgaacataggcatgggcaagatttgctttgcctagacgcagacttttgacctcggtgcctcgtagaacaagacctgcctcaaatgtatcctcaatctgataatcatatcgcgcacgcctgttttcagaaataacacctgaaatgccgtcagcctttttcttgcgtccgccattttttgcagacatcacagcccccgttatgccaatccagcatgaataagagcctgccgaaccgctttttttgtcggctcggtcacaggcacaagaggtaaacgcaattcctcagaacataaaccgagctctgcggctgcaaattttacaggcgcagggctagcctccagaaacaacgcatggtggagaggaattagacgatcctgaatctcaagtgcttttggcatatcaccagcaagacacgcggactgaaattcagcgcatagggctggggccacattggcggtcacagaaatacacccaacaccgccgtgagcattaaacccaagtgccgtgccatcttccccagaaagctggataaattcctcaccacaagcctgtctttgcaagctgaccctattcaggtcaccggttgcatcttttacaccggcaatattttgtaactttgacaagcttgccatggtctcaacactcatatcgataaccgaccgaccaggaatattgtagataaaaatgggaaggctgtcgacagcatcatttattgctgagaaatgagcagttagtccggcctgtgtcggcttattataataaggtgtgacaaccagtgcagcatcagcgccagctttttcagcatggcaagtgaaagccagtgcctcagcagtcgagttcgagcctgtaccagctattataggcacgcgcccagcagccgtttcaatcacaatctcaataacttgcagatgttcctcatgacttaaagttggcgactctccagtggtaccgcaaggcactaaaccatgcgtgccggaagaaatttgatgttccaccagcttaacaagtgtctcaacgtcaattttgccatcttggaacggcgtaatcaaagcgacgttggaaccattaaatttagcgaccttagggtctgaactcatcatgtctgacattatattgtgactcattaaggctatatattaccgagtatttgttgacgcgcaccctaagtcaaattgcttttttcttcaagcataccggtatgaaagactaattaccaaacgattgtctgttacttcctgctcagttattagtccaactgctatgtagtttaaggagtcctgcgaagaagttcgccgagtaactgaatgcactctcctaataaagggttatgaattattagcaaagcgaatgtaaacatcccgaagtcacccgccggaacttgcaaaagtaaaacaaatgcatgcagcatgtattttttaaaaataatggcatcaagtttcttttggatcatcgaactcgataccgaccctcttgagacgctcaactaatggcatacctaaaccagttgcactggttagaacaccaccatagtttttgccaccgggtagttcgttagcattttgaataagacacattgcgctttcagctaaaagttttgaagtaactttataacccgggtcaccttctccgcgtattgaagagacaagcctttttcctgtagcagttttcaaaataaacttacaatcaaaccaacccttatctctaatgtctttagaaggtccatcaccgggctgcctgaacattgggcgtaacaacttacgcagaggagaaaaaagtatccctcctatcatggccatgccaaacataccttttattgcttgccaccatgaagagtgataagaatattcattataaacaaaattagctccataaggctcctgcacaagctctgataaagcggcagagcgacgaactacacgcgtgtttacgccagccatgatgaatgggctaccataacctttaatttctggcctagaaattatactgtatttatctttactattttttttcatttcgggtgtaaatgtaccgactggattgagcaaaaaagggttcgtcatatcatcgatttgagccacatctggcatagaaaacatagtctccagcgtcccgcccgaagcctcacctttataagaatggaaagcctctatttggctaatctgaactcctgcttttttaatggcatagaaacttcctaagtcagatggaattgagtcaaaaccgcaagatgggatgattctaacaccctttttacttgccgcctcatggtgtttctcaatgaggcctttaatccaaaagttctccccagttatatctacataatgagtggaattcttcacacaagcagctactaagtttgaaccatatcgatgaaacgggccagcagttgaaagtacgacatatgacctcgcggtaaaagcctctaaaccatcaacatcatcagaatctgcaacgatgacttcaacatcaacaccaattgatctgacaagtttttcaagttttgaataattacgacctgctacagcccacttaatttgcccagagctttttgccagatattcagcacaaagggtgcctgtaaatccagtagcgccatataaaacaatatctaagtctttagagatggtcacttaccttttgctgggggaataaagagagaagattttttatcaaaactccctttaatccatcgatgagtaaggtttgaccagtaactcatccctccctcatcttctggtaatagttcaattagattatttttaccttttttgggacgagtacgatttttagtaatctcataaagttcaaaaattttttcattttctaaatcgggatggtcttcatcaatatcttcaaaaaacttccgcatagcccccagcgccattaatgctcttttttgtggaacgttttcaattttatcaacgacaccacctggccaccaaagaaaaacgtcaaaatgagaaatagaagttttataagtctgctgcaggtttttcgggtttgatttttttacagtatattccttccgataacttggcacttcaatttgatttaagaattctatagaaaaaattacctcttctagcgcaatggtaagatcttttttaaatacattatgttttaatccaggattttcgccgcgcacaccggcaaatggatcgaggtgtttattgcgatcatatgttaagtcggaacctggtataaaaggttcaaagttatagttttgagccgtttcattaaaacatttgataatatctgggtgagttaaatcaggatctagaggattaatttttttataaaacgattgcattcctactaacgcgacacgcacctcacgcttagggactttgtatattgaggctattttttttccagaccatttaaagtggacatcagcaaaggatttatcgtttagttttatataactccagttaggtggctctttaccaagaagttttgtctttgctctgaaacgttcaagtaatgaagcacgttcaatctcaggaggcatttttccatcccataaatcaatagaagactgaatgtctgctagtgcctgttgcttatcaacttccattggagaaagtttttttgcactttcttcagtaaattttttatcacccttaattccaccaaatggatctaaatttttagaggacataacccagcctataaaatttatctcttaatttattgttattggagtataaccaatctctgaagtgaaacaactttaacctttataatgattttctatggggggattccatttatgggatgataatttatggccggtgatgaatttctcaaatcaattgaaaccaattttagcaatgctgttgcagcattaaatacaactgataacgaagaaagaattagtagtgacctagctaatcaaattatgctcgcaaattctacatatgtggttcgctttggagtaagacttcgagatacgcttacaacttttactggtttcagatcagttcactctgagcattttgaaccagtaaaagggggaatccgttacgcgcctgatgttaatcagcaagaagtagaggctcttgcagcactaatgagttataaatgtgcccttgtagaagtgccttttggtggatctaaaggggggctaataattgatccaagagactggacgtcggccgaattagaaagaatcactcgtcgttttacccaagagcttgctaaacgagaccttattcatccatcacaaaatgttccagcgccagatgttggaactggtgaacgtgaaatggcttggatggcagacgaatacaagcggcttaatcccgcggagattaatgcatgggcttgcgttactggcaagccagttgcgaaagggggtatttcaggaagagcagaggccacaggaagaggggtggtttatgctctccgttctttcttcgattgtccaggggatgtaacaaagtctggactgaagccagggctaaagggaaaaagaataatagttcagggactaggcaatgttgggtatcatgcggcaaaaattctttctgaagaagatgatgcactaatcactcatgtcatggagcgtgatggagcagtagtagacgaaagtggaataaatattgagaccctgaggtctcatatatcttcaactggaagtgttttgggttactcaggttacgttgaaagcggtttagagatgttggagtcagatgctgacattattattccagctgcaatggaacttgttatcacggaggaaaatgcaaagaatatcaaggcgccacttataattgaggcagcaaacggaccagtctcagcaaaagccgacacaattcttcgagatcgaggggtaataattattcctgacctttatgccaatgctggtggtgttaccgtaagttattttgaatggattaaaaacctaagtcgtattcgcttcggccgtatgcagcgtcgagctgatgaaagcagatatggcgcattaattgaaggcatcgagggcattacaggtaagtcgtttcctgatgagcttgcaagtcgtgcaattaacggaggtgcagagattgatcttgttcgttctggtctagaagacactatgagaagcacttatgatgtaataagcgaagtttggaatagggaaaagtctgcaattgacctccgaactgcagcgatgatggttgcagttcaacgcatagcccagggctatcagtcaattggtatataggtaacctcatcgctactttcagcttagtaattgaccaaacctccctgctgttctatttaggagttctgcgtagagaggtggccgagtggctgaaggcgctcccctgctaagggagtatgcgttaatagcgcatcgagggtaaacatcccgaagtcacctgccgaaacttgcaaaagtagaataaagtcagtttcttctaagtatgttcagcctaataaagttgttgccaaaaggctatccccaaaatgttgcagatcttgattatgtctgtttatcgatctaactggacccatattggacccgaatatatttagctagcagggggcacacatgggccacccggggtagcccgtatatgtgcatataaagtccagagtgatttgttatttttgtggttaatcgtcccaagtagctaacggttacgagtacgcagaggaccagtggagcggatcccaagatccgcggaggtgggacgatgtttctattagtcattaaacttaaaaccataatgtttcagaagaacatttcttttagtacacttctcaagattatttgcctatatctttgaacaaaaatataaaacttttaaagaagcaaaaacgttaaactaaaacttatgagagtgtacaaatttgaatcttaacatttaaaaataacgtattaagaaaactttttgtgcggggtgttaattatttacagcttctacgattatttgaaaaacttcccaacaaaccattaaatcttctcgaaatgcttcaggtgaagaaaccagtaatctgttgtagatagcttcgtttgatctgatttcatagtctgagacaacgctaccttcttttcttgccagtaacaaaaaacctgaacccatcgattgtgataatttatataaaggttctgataatttgttctctggcgctagtaacaccatatcagatactactttattcaaagcagcacatcttccgttaataattgtaagaagggcactatcatcagtagttctatcttcaaggcgtgaaaatatatttctgagagatccttctgggaaagtggtataagtttttttgttttctgtagtagaacatgcaaccagaaatataagaccaatactgaatatgaaaaatttctttatcattttaatccaacaaaagaactcactgatttgtattcgagatgaccaaatttaaaaaaatgtaaataactcgaataccttaaccgctaattagctttttttaaacaaattaaattataaatctgagccttgttagcagcgccagatattaatcctctctcagcttctaaccgctctttatgcaaatctgattgaacgtaaacttgaccgccttcagttaagccatcttccatcaatcttctatatcgctgtgcagctacttggaactgcttaatttctttcattagaagttcgcaatctacctcctctgcagttgcaggcagtgaaaatagaaatatcaatattacaactgaaaacttagagaagttctttacaaggataaacatctgctaactcatataaaatagctaaggttgcgttttcttttctattacttgggtctctattaaccgctctttccatcatttcaattgctaggtaatagtcgtaagctgtctcctcaggggtgcagatttttttcctatattccttatcttgaaagtaaacctctgagaataagatgccatgcatcgtaccaattatccgataaaatacatcactcttgtctttgttttccagcatgtaaccaacggttaattcttcagcgaattcctcatcattttctgcgtaactatcagatacaatcgagaaaagcagggcgatagttagaagaagtggtttcattcctttatattctctctttttttataaaatttatcacatacttttttggagaattattgcttctattgtgttaggagtcgggcggaatgcgtaactttcatataccgttacgtatactatttctccatttatcttatggcgacttaagggtgtagcacccgctgctcgagtcataaataaaccgcaacgaccataataatattctacatctgaaaaacttttagaacccgaatctttatcgataaattcgtgtaggacataataaagaatgtatctatcttctattaaagttggctcaaaaccaacacggaaagtgtctccttcttttccctccaccattatttcccactctgcccaagcaggcgtcgagaaaagcaatgcgataatgaggagaagtggtttcatttatttacctttgagtctttggaagggttaataattgacttcttccgcctcttcatcagcagcataatcatgaccgcaatttggacagcatctagaaaagtccatatcctttggaggcggagcaattgtactgaagctgttcattacatttatgaaaaataagtgcgaacattttgaacaaataatatcttggataacgatagtagtcataagcttattcgtatagacctcgctcgttacatgacactaagggaaatattgaaataaatgcgatggtgaggagtagtggtttcattcctttatattctctctttttttataaaatttatcacatacttctctaagaatgattgcttctaatgatttaggttttgggcggaataagagactttcatatatagtaaggtatcttatctctccatttatcttatggtgacttaagggtgtagaccctactgcttgagtcgcaaatgaatgacagtgacctttgtaatataatacttctgaaaaacttttagaacctgtgtctttatcgataaattcgtataagacataatagagtatgtttccgttttcatttaaagttggctcataaccaacatggatagtttctccttcttttccctccagcgttatttcccactctgcccaagcaggcgtcgagaaaagcagtgcgatggtaacgacgagagttttgagggtgtgtttcataattttagattaagcacttcacaattaaaattttcaactgaggactttatgtcctttttttgagacgcaacagtgtatcttaaggtcagagctgttctattaataaataatgaaactttgaaaccatcagtatttgaactgcgtaagcactcgtagaaaaatggctctatagttctgcatcgaaattcttcgccattgaacgttgcagtctttgcaacatcattttcataatctaacttcagattttgtttgattgttccacttttgcaaataagtgctttagtatttgcccaaattggtgtcgagaatagaagtgcgatgattataaaaatttttaacaaattttatgctctatgcgattattaaattttaatttccgtatcgtattttatcccaaaaagttggtgcttttgaaattttacgacattttctaaaggcagatgctttataatctttatcaaccagtttattaggcatcagagaaacgacgcaattatcaaaaattgcctctttctcctcaatatcaagaacctctttttctgaataaaaatccaagcaatttgtcttggattcagactggtaaaatagagttaaatcatcatcatcgtcggggggatatctgccatcaaagccttctttaaatgaggatgcaggaggtatatcgacgttgacggtatgaatattcccccctctatcctgccaagacaattttttaattgtagtattgagtgggttaaagaaacttatctgaatcccaagtccatttcctgaccggaatacaccagtagtatagtatgatagcttatattctttccaaacgggctcggcccaagtcttacatagctttttatcgtttttttcgtaactgtcagatgctgtcagtaaaagcagggctaaggtgaggaaaagaggttttaaataagagttattcaatatcaacttcgcaatcagcccagtaatatgcagtaacaatatgcctaccacctagagcggtttcaggattgccagtagaacggacagcataaagttttttttctgagacatctaagttagtaatccaccactgaaacccatactgaccaaaagatcttatcaaccccttatcggcagccatgacaaattcctcatcccattttgtgccagccaactgcgcaacttctttagcactaataccatcggattgtgtgctttgtgcatacacttttaatttatctggggtgtctgtatcaaagatgtaatgccatgatgctcccgtgtatgcatcagggttatctttgtttatctgtccaaatgagtatgaactacttttgccttttggttcaaaacaagttgcataaacagttgcagcagaagcatttctagctaatgcagtaataaaaataactaaaattaaaaatatcagatttttcatttttgactccttaaacaatccttttttccatcaatataaccatcattgaaacctttagcgtagtcaggattatcaaaataaccatatttctgttcacaccaaaagaaaaaggcgtcccgtaggacgccctatcaatggtgtaaattcttacttgttaaccctagcaataatttacctattcccaagtagttctattttgataatctactctcatctttttgaataatcaaggtggtgttgggatgtccgaaaaatatcgactagggctcgatgtgggaacaaattcacttggatgggctgttattgggctgaaagaagatgtgccatccagcgttttagcaaccggtgtaagaatattctctgagggtcgtgatgcaaagaccaagtcaacattaaaagccagtagaaccgagaaaagatcagctcgccgtcgtcgagacaggttccttcaaagacaaactttcctcatatcagaaatggtaaagtctggtttatttccaaaggatatagttgaacaaaagaacttagaacttctagacccatacgaaattcgttttaaagccctcacagagcaagtacctctccaccatctaggccgtgctttatttcatattaaccaaaggagaggttttaaatcttccagaaaagacaaaagtgaggagacaacctctggggttgtgtcgaagtcagttcgtgcactttatgaagagatgcagctcattaatcctgctcctgttatcgatgatcctaaagccctttctaaggaagagcggagagaaatcagagttcaagaagcgtctagtcgagaagaggctttagtgacgcttgctgaacaaaaaggagttactttcggggcttttctataccgaaggctgcaatcaggtaaatctgttcgagcgaggaaagacgcagatagtcaattatatgatgtgtatccaacccgagaacttcttaaggacgagtattcgaaactgatgcaacatcaggctcaatactatccaaatgttatcaatgaggctctgatatcaagacttcatgatgtcattttcttccaaagaaaactgaaagaacaggaaagagggttttgtacctattatccttctgaaagacggacttttaggtgcatgccgagttttcaacaatacagaatggttcaagagctaaatgcgcttgagtgggttgacgcggcaggtaaacattgccttcgagattatccagaatctagagacctcatacttagtgaattggagaatatttctacaaaggccggagaattcacctttgggaacatgaagaaaattctaaaaaaaatgggagttattgacggagaagtttccttcaatttcgaaggtccaaaaagaaaaggttttcaaggcaatgttacatctcgcgaaatgcgacacgaggattgttttggaactcgttgggatgaattatcgttagatgagaaagatgacatcatagataaaattaatgatgaccatctagatgatgaagacatggagcgttatctcatagatacctatggtctgtcttctttctcagtgggtaatgccataaatgcccgcctactagaggggactgctaatgtctcccgaaaggctgcgcgcactctttatgaaaccatgctatctgcaaattgtcttcaatcagatgccgtgatcgcagtttctgagcaagatgacacctttgtaaatccttacagcaggacaggtcgtggtgagttgctttctgagcttccttattatggagaagcctttcaggatggtcgacacatcattccgggtaaacgagaaccaaaagtctcgcatgatcagttaaaattttacgggggggtatctaatccaactgttcatattgctctcaatcaaattcggttggtcgttaacgaaattattaaaagatatgggttgccgtcttctattagcatcgaactcgcaaggaacttgcctgagggacaagatgggcgtcgcaaaattgagaaaatgcaatcggaaaaccagaaaaataacgaacgatatgaccagatacttacagaaaatggtcaatctccaaaccgagataatcgtctccgcctagctttatgggaggaattgggagaaggccctactgatcgattgtgtgttttcaccggcaaacttatagagctcgcagatttatttaatggttccgtagaaatagagcaccttatccctttcagtgtgtctttagatgacagtaaggccaataaaactgtctgctggaaagaagccaataggtttaaaggtaataagacaccttatgaagctttcgcaaataattctggcgactattcttgggaagaaattatggagcgggtcagggcactacccaattctaaacagtggcgttttcaagaagatgcattgaaaatttggaatagcgatcattctgatttttcaggacgacatcttaatgatacgcgctacatcagtcggctggcgcgagagtacttagaaaacatatgcccattcaataagatcgatgtagtaactggacgcctaacagccctactaagaggtcattgggggcttaacaatattttacgtgggcacaatgagccagaaacggcaacgccaaaaaaaatgcgagatgatcacagacaccatgctattgacgcggttgtaattgcaatgacgtcgctcacgatattgcaaaaagtatcaagtgctgcgggaaaagctgaagaactagatgttggaaaattatttgctaaagatgaaagtggccgctcggtgatcgacccgtgggatggtttcagagacgaagtggctgagaaggtcagaaacataattgtttctcataagaccaaaaggaaaacgattggaaatagcggcaaatcaaccgatagggcccttcataatgaaacagcttatggcttgatagatggacctgatgagaaaggtttgtattctgtagtcacgactaagccaatttcatattttgataatcgtgataaaattgaaaaaatccgtgatgaaaaattaagggatgattttctaacagcatgggatggtgagggtgataacaaagcctctcaattagcagtattagataaggctagtggtctgaatgtaaaaaaatgccgctatgttgaacgtaaaaaagtaattcctattaatgggcccgatggtcaaccctataaagcttatgacggcaacagtaattggggtatggaaatttatgagtttccaaatggtcacccaaaagaaaaaaagtggaatggcgtagttatctctacatatgatgctaataaaagcgagtttaaaccgggagaaaccttcaggccccatcctgctgccaaacttgttatgcgacttcacattaatgatatagttgaggtgcaaaacgacggcgagccaattctttaccgcgttcagcttatttctgcaggaacacttaccgtatcacctttacatgaagctaatgttgatagccgtaacagagataaacacgacgaattcaaatataaatctttaagtgttacgccgatgcaaaaaatgggcgcaaaaaaagtgaatatcagcccaactggcttaaaaaattatagcaggtaagcacggccacttgggaatagctagggctagagcaaccctgttcatggagtgcccacttgaacctttagcttaccacttgggaataggtagggctagagcaacctgtctttaatgccacatcattagaggaacagcttaccacttgggaataggtagggctagagcaacaggttacgagcaataatcttttggcgttgcagcttaccacttgggaataggtagggctagagcaaccttatcgggtgaatacatctgatttcggttagcttaccacttgggaataggtagggctagagcaacagggttacttgagtgccatcctgtaatgtgagcttaccacttgggaataggaagagctagggcaacattcaaggtgtacggggaactagcgagttcagcttaccacttgggaatagctagggctatagcaaccctgttcatggagtgcccacttgaacctttagcttaccacttgggaataggtagggctagagcaacgaaatctccataaggtcaacctctttcaagagcttatcacttgggaataggtagggctagagcaacctctcatctttaaccatctcgccagcgtaaagcttaccacttgggaataggtagggctagagcaacatcgccgccaagcacaataaacgtgaccttagcttaccacttgggaataggtagggctagagcaacttagcttgcatacccgcgaccttgcctttaaagcttaccacttgggaataggtagggctagagcaacgaacactgaaagcaggactaaatactacgtagcttaccacttgggaataggtagggctagagcagctctaccccacgcaattactctaatctaattaatcaaatgactttctttttggggtgatgcattaaggcttcagctaacggttacgagtacgcagaggaccagcggagcggatcccaagatccgcggagatgggacgatgctgtagggggggcataatttatttataacaaataaactaaaccattgaatatattgaaaataattgccttgcagggttgtaatcggttgtatcgttccccacatatggagcatgttaaactccaaagaaacacttaataaagcagtcagccaaattaccgacgaacttcaaacccattgggctaccaatggtaagaggcgtcttggaccggctgacgtggatgcttttcatgcatcccttacacacataattattgacgccttacaagcacataactcatcacgagaacagagtatggcgtccatacacaagacatcaggtcattactcacaaggccggtattggtctgcgccttatggatataaaatccatattggacgatcttataatggcctatgtgaactaggctatatccaagaatgtaagaagggggtttacactgattatgcccgacttcttacccgttaccgagctacggataaacttatcaaaatgttcgatgcggaaaccattgatgatctccacattatatttaggccacgaacaaatgctgagacgatcaggctcaatatattacaacctgatggctacaaattgcttgttgattatcaagacacacatgagaccatttcgatgcgtgaggacatggaaatgattaataattgtttgtccagatcatgggctgatttggaactcgatgatgatcagctgcgtgaactaaagttgcgaatgttgccagatggtcctgatcaaacatcaagcaacaatggtgacggcatattgcggcttcaggaccggacattataccgtgtgtttaatgataccgacttctcctctaatggccgcctttatggtggatggtggcagtccattcctaaggaataccgtccctatattttaattaatggcaagcagacaattgaactcgattacagcggccttcatccaaatcttatttatgctttatccggtcaaaaattagatggcgatccttatgagatcccacagtctcatcgtgactggtcacgtaaaaaatacttccgcaaggcaataaagcgcgcatttaacgccatgctaaacgcagatcacgagttgatgcgtgagccctcaggcgtcggcattaaggatttaaatatgagttggaaggaagttaaggctgcgattatcgagagacataaacctatatcacatcaattttttacagccattggttcaaagctccagcttatcgacagcaaaattgctattgccgttttaaaacattttgcagctatgaatgttgccgtcttgcctgtccatgacagcttcatcatgcattcaggatatgagaatgagcttaaagatgttatgcgcgaagctttacgaaaagaggccggtatttctgttccagtgatgctgacagaaaaaaagcaaatgacttcacataaatcagatttaagtgaagaagacgaattgcttgaactcttgagtccgcaaccatttactagaaggctggatgcgttttatgcgctcagatagttactttaggggcacttttttatagttataaatatacaataaatgattgctttttttatcactatttagtgtccctaccaaagctttttaactattgagtttaggtcagcatgtgcataacgaaacaactggctgggtgttctgtggccgcttattgaggcgacctctggaacgctcagccctttttcaaaaaagcgacttattgcttcgtgacgcagatcatgaaacctgatgtcaggataacctgccctgtcgcgtaatcttatccaagcattcgcaaccccgctgggggacaggccaaaaaccagcgcttcttgcccatcaatttgttcaaacacgaataaagaagcttgagacatgggtatgtagcgcgaatagccatttttcccctctcgaacggttattaatcttctctgtctatctacatcctcccattcaagacgtaacagttcgctgcgccgcatggctgtctcaagcgcaagttttgccaataaaaatatctctggctttgtctcttctgagtaaattgcctcgatggcatcccacgcacctctcggcaggcgtcttacagcgggtctgccaattgagggcaaccttaattgttcaacaggattaacttctattggaacgtgccattgggttttggcgatattgaacagatggcgcaacacgccgaaatcctttcgaatggtttctggcttgtagcgtttttggtaatcgttaagtacaggcgtcaatcgggcacttgttaccgcccctatgggtagtttcgagatctcatgtttttgccatttgccgataatatatttttcaacatcatagcttgccttaaaggcggatatatctgtcttataacggcttaaataagcccgtagaggcgtgttcagagcttgcttgtctacaacccctgcaatggccttatcttgggcttgttcgacttgtatagcccattttcgggcatcagattttgatataaatgttttcgaacatgttggggcaccagcacgccgaatgagagcttgccacttaccatttttacgtcgaatagttgccatttttttctcctaactggacctatattggacccagaaggaactgacttacgtatctcgctgttcaatacacggcgatagacgagtaacctcatcgctactttcagcttagtaattgaccaaacctccctgctgttctatttaggagttctgcgtagagaggtggccgagtggctgaaggcgctcccctgctaagggagtatgcgttaatagcgcatcgagggttcgaatcccttcctctctgccagctttacttaaagagctatcttttagaagaaatggtacagacgccccgatttgaacgggggacctcctgatccacaatcaggcgctctaacctactgagctacgtctgcactgctttcgcgacttattggaagtgttgggaaattaatccttaaagctggatgtttcaagcggttaatttgaatttccgatagagttgtccaaaatcataaataagccttataaagtgagtataaaccatcaggagatgacgcatgggtattaacacgccttcagaaatcatagcggatttgagcatagggccaaccgatcagggcatggtgcgtatttacataacctccgaggaaattgatttgccgatggatttttcgcctgaagaggctgaggaaatttctcgggaactacttgccgccattgccttgattaaggacaaaagcgggtgatcggaaaatcattatcgcgccctattggctttcttattgttctggccatgcttgcgcctattctgggcattgcatggcttaccgtcgtgccacccgaaatgtctgacagcacgaatgacggcttaatgtcgtttttgatgacaactgtactaccctatcagtttggtcaaacacttggcctcatgctgggtgttgcagtttttaccattttggctggcgttccggcagcatggtttgtgacattcatcgactttccgggtcgcaggcatttacaatggttgctgttactcccccttgcaatgccgacctatatcgccgcctatgtgtttgcagaacttctcgacaaagctggacctttttatcagctatgggtttcaatttttgggagtcatgcatggtatccttcgctcaatagtcttggcggtgccatctttacgctctctattgtgctttatccttatgtttatatgtcagcacgcaccggcttcataaaccaatctgcagaattaatgcaggcagggcgcctattgggtgcgtcacaatgggtgagttttcgtcaaattgcactcccgctatcacgacccatgataattgtcggtgttgctcttgcactgatggaatgtctgaatgatatcggcgctgtcgagcatcttggtgttaaaacgctcaccgtcggggtttatgaaacatggttgtcacgcggcagccttgaaggtgctgccagaattgcaatgctgctgcttagcttaatggcactcttattacttttagaacgctatttgcgcgctggtggcatagaacaaaaatccaaacacgacctcacccctgttttgcacaaaccttcgccacttatgcagggtgtcgttctaacgatcagcagcctaccgtttttaatcggcttcgtggtgccggttatgttgctaatcgtgtttgcagtagggcgttttgataatgccaccaatctattctctcctgctatcagaagtattttactcgccagcatcacagctgttattgttgtaggtatcgggctttttctggctttcctgacacgcattaatgcgccggggtggtttaacagatcaattcaatctgcttcattgggttacgccataccgggaaccgtccttgggcttggggttttgatcgtactgtcgcaatttgacaatttctcatcccaatttcttaatctgtcatttttgccgatattaagcggcagtgttttcgccgtgattttcgcctattcgctacgctttctctcgatttctttcggcacattcgaagcagaattgtcccgcatccccaaaaccaccgatatggccgccagcacccttggcgctcggacatttcaacttctcagacttgtgcacctaccgatgttgcgcccagctcttgtaacagcgtcggttctcgtctttgtggatacgatgaaggaactaccggcaacacttattttacgaccgtttaatttcgagacattggctacacaagtttacaattatgcatctgtcggtcagatcgaagatgccgcactccccgcccttatcatagtcggcataggtattattcctgtcttcattgcaactcgtaagctgcataaacactaaatcagcttagacgttagcttccaacaacagctttagactcgagaaactcctccagcccatagacaccccactcacgcccattaccagattgcttgtatccaccaaatggggcagcaatatccgagctagcaccattcacacttacattaccgacacgtaattgcgcggcaattttataagcatggtcgctgtcgccggattggatataagccgcaagaccataaaccgtgtcattggcgatctcgactgcctcatcctctgtttcatagggaagaatagaaagcacagggccaaaaatttcctcacgggcaatccgcatatcattggtcacattgccgaaaacagttgggcgaatgtaataccctttatctataccctcaggcatatcagtaccaccacacacaagttcagcaccttcatcgatccctgcctgtatcagcccacgaattctatcgaactgaaccttattagacaccggcccaatagtcgtgccttcggcatctggctcaccagcgacaactttttcggcagtcgccttggcaatttcgagtgcctcggcatgtttcgaggctggaacaagcatccgtgtgggtgcattacaggactgaccggagttggcaaaacatgtcatgacaccttgtctgacagcgcgttccaggtctgcatcatcgagaacaatgtttgctgatttaccacctagctcttgcgacacacgtttgactgtatcagccgcagctttggcaatcagcacaccggcacgcgttgaccctgtgaatgacatcatatcaatgtcaggatgagacgataaatgcgatccagccgtcgcgccgttaccattgatcatattgaatacccctgcaggtacaccagcttcatccataatttcagcaaatataaccgcgcttaaaggcgaaacctctgatggcttgagaaccattgtacaacccccagcaagcgcgggcgcaactttacaggcaacctgattaagtggccaattccagggtgtaatcagcccgcaaacgcctacaggttcacgaataatttttgcaccccccagttcaccgccaaagtcaaaatcttcgagtacttttttaatctgaataaaatgcccaaggccggcaggcacttgtgccttcgccgccaacattctaggcgcccccatctccatcatgacagccgcaatcagatcctccatacgcgctgaataaacctcaatgatcttgtcaatcagcgccagcctttcctcacgcgaggatcttgaataagcaggaaaagcagcttttgcagcagcaacagctttatcgacatcttcaatactggcgagcgtaatctgtccgcaagccatttcagttgcgggattagtaacatcgtgagccgtaccattatttgaggcgacccactcaccattaatataaaattgtttgttatgatccacctgaccctcctgaaatatgatttgagatgcctgcaaacaccgtaattgacacctcaattgagtctttaattaacaaaatttaagcttgcatgacaagctgtgaccaaaactttgcaactacagatagaaatacaacaatttttgttgttaaaagacaacgcctgggtaaacaaacccttaaaatcataaagttattgaacctatttttaacttatcttttaattacctaaagcgtggcatagttgtgtgaagtagcaagtgccgtagcgtaatatttttgtctagttacgccatgcaaaccggcaggcgtccctcccaagccggtttgccacgtctccccatttcggagtcgtggcccaatttttccaaatatttgacatctcagattttcacgccacatacactatatgaagatgcgaaaaaaatctgaccttccggaaaaaacatgtgtggtttgcggacgtccttttgtctggcgaaaaaaatggataaaggactgggagcaagtaaaatattgctcagtcagatgtcgcaacagcaaataacttttctggagatgattatggcacgccccttaccctttaccgccattaccgataccggcgacaaatttgatgttgatttcccactccatgaggcaacggaagctccaatgcgcgtgcatcaattacttgaagatattctcgccgttgtcagtcgggaagcacgacgtgacggaatggcaaatggcgacgtgctacaagcttgtgcgatggccttggcgataagagctcgtgtcatcgtggctgacccagaagtaacaaccaatttggcgaaagaccttacgctcgccgcattggaagcagtccaacgtgctgatgttagttcgccaccttcaggattagcttaagctatttctaggccggtatttcttgtccatcccaagcaaatactgctccactctgcgcgggtgtcagattatccatcacgtcaaggaggtaatcagctgattgcgatggactaaaaagcttttcaggcgacacatttcctctaaaaggggccgaaagatttgttgccaccgtccctggatgcaacccaacaatcaccgcttgtttatatttcattcgcgcttccagcgaagctgttttaataagcatgttatgcgctgccttggatgcacgataggcataccagccaccaatcttattatcggaaatagaaccaacacgcgcagaaagagacgcaaagaccgacctttgatctcgtggcataaatggcaagaaatgctttatcaaaagcgctgggccgaagctattaatcgcaaaaactttttggaatgcctcattggataaatgccgaatgcttctttccggctgaaggtcgttttcttcatcatgcaaaataccgctggcattaacaaacagctgaacaggcgcatcatcatttatatgttcaccaagttgtgcagccacgctagcgatagagtcctcgtcgcagatatcagcctgcagcatttgtatgtcagtatcaccaatggcgttaacattctcttcaattttagagatatttctgcccattagggtcaaacgtgtacagctcggtaattcggttagtcgagaagccattgccgcaccaattccaccacctgagccgaaaataacagcatgaaaattgggtaaaaaacttttcattggcctttacagtctctattaaaataatacctatctaataataggtcatttaaacttaaaacaaactaccgggagcgacattgtgacaacagataacccacgcatcgctattttaggagccggggtttcgggcatttgtatggccatcaagctcaaggaagcaggttttacaaatctggttatttatgaaaaggccgaccgggttggcggcacctggcgcgaaaatacatatcccggtgtctcatgtgatgtgccaacacatttatattcattttcttttgctcaaaaatccgattggccaagactatacgccggcggcgccgacattcaggcatatcttgaagatgtgtcagaaaaatcaggcattattcccttgtgtcattttcatacaaaaattaccggagcaacttatcaaaatgatgaatgggttgtcagtctcactgatgcatcaggtaacaacaaggaagagaaatttgactatgttatctctggtctaggcggcttacacagcccggcctatccgaacgttcccggattagaggagttccaaggggcttctttccatacagccaaatgggaccatagtgtcgacttgaccggaaaaaatgttgccattatcggcaatgccgccagcgccgttcaagctgttccggaaattgacgacaaagtcgcttccctaactgttttccagcgtacacctaattggatgatggataggcaaaataaagaatattcagggaaaaccttaaagttgatgcgatggcttcccattataccccttttgaaaaggttgagaatttttctttgggcggaatttgttctccatcccgctttccgtgaaaatagtttaatgcaaaaattcgcccgcatgagggctaaggcctatttgagacaagaagtgaaggatcctgaacttctaaaaaaactcatgccggactattcagttggatgtaagcgggttctgtttgtcgactcctatcttcaatctttacaaaaagatcatgtgaaactggtagaccgtgcggtcaaagctatcacaaaagacggcattattgatgtag

SEQ ID NO: 480 - DNA, 23315 bp, synthetic construct
  misc_feature 1..23315: note = Synthetic
  source 1..23315: mol_type = other DNA
acaagtggattccgtagatgcccgacacgaagagcttcgagaagcctatctcgaacaggaacgcaccgttgtggaactccgcacactgaacgcggagttggaaaaccggatcctggaacgaacgcgctccctcgcagtcgccaacgaacggctccgggaactcgatgaacgcaaatccgccttcgtctccattgcgtcgcacgaaatacgcacgcccctgacctccataaaaggcttcgtggaaaacatgctgaccggcgtgaccggggatttacgtgagcgacaagtcttgtatctcacgcgggtcaaatataacatcgaccgattgacgcgaacgctgaacgacctgctggacttgtcccgtatcgaagccggtcacgtggcattacggttgactgacgtctcgctgaccgaagtgaccgctgaagccttggacaatctgcgcccccaagcggaagagaaatcccttgtgctggaggccacgaccccttcgcagcttgcgccggtacagggagaccgggacaagattcttcagattctaacgaatctcattcacaacgccataaaatttacgccttcatccggtcgcatttcgatttcactcgtgccgttgcaaaactccacgatccaagtgtgcgtcgctgacacgggctgtggcatcgctcccgaagaggcgcccaacgtcttcgatcgcttctaccggagcgacagcgggacgacggagacacggggagcaggcttggggttggcaattacgaaaagcctggtggacctgcatcgaggacggatttgggtggaaagcacagtaggcagcgggacccgattttattttacgcttccggccggttgacccgggaagctgccctacttctcgtttttgcgattttctgcctgtttctgtttgagaacgcgcgcgaggtaggagcgctgaagtccgagcgcttcggcagccttggtctggttgccgtgagtgcgtttcagcgcctgttcaatcagaaaatagcgataccgttccatggcctgatggtagagcaacgcgccggactccctgacctggggctcctcttcatgaacttgggactttgcttcgtaatcctgtgggagacgtaaatgctcgggaccaatttcgcggtccgtggacaggaccacggcccgggccacggcgttctccaattcccgcacgttgcccggccaccggtaccgctgcatggccccgagggcggcttccgtcagccgcatgcccggctttcccatctccttggtatagcgccggaagaacaggccggccaaatgaggaatctcatcgggtcggtctcgtaagggaggtatggaaaaactgatcacgtttaaccgatgaaataagtcctcacggaacttgccttctctcacagcctttgacagatcgcagttcgtcgcggcgatgacccggatgttgacctgaaccaggtgcgtcccgcccacgcggtgaaattcccggtcctgtagaagacgcaacaatttagcttgcaggtccagtgccatgtccccgatctcgtccagaaagagggtgccgttatcggccagttcgaccttgcctttttgttgcgcggtcgcgcccgtgaacgcgcctttttcgtgaccgaacaattcgttttcgagcagggtctcggtcagggccacacaattgagcacgacgaagggattctcaatccgcctgctccattgatggatggacctggcaaagagttccttgcccgtcccgctttctcccagcaacagcacggtggcatccgaatccgctgcccgtttgatcaatgcaacgagagacgccatggccggcgtgtccgctacgatggtgccgtaccgtgaatcgacgtcctcgcggaacacggcgtctggatcatcatcaaccactggaatgtttttctgcatcggcaacccaacgaatgttggtcctgacaaacaacgtttcttctttcatgccgaaacggccagaagcgattctaggcccactacttcctaaatctcaactatattatacctattggtctataaaattacccctgtcttcatcactccccccttgagggggagtcggggagccaagggcgcagcccgccggcgaaccggtggggagctataagaacaggtccctgtacctgccttccggccaattcgggacggcacccttcgacttcgctatcgctacgctcagggcgaacggagggagggaaccgccaaactgaaatcgttgtatggccccctctccgttcaccctgagcctgtcctgagcttgtcaaagggcgtaagttgccctgcgcctggagtcgaagggtcagggcaggcacggggccgtcccctacacagtcggcgcttggagtttgccggaaggcgatggtatagtttcgcggtcatgagcggggaatatcggaccaaagccttactcatcgcagtgtcagaggaccctattccggtgcaagcctgcatcaaccggctcgccccggagtttctctgtttcgtcgtctccgagtcccgaaaaggctccatcgaaaccgaagttcaaccggccatcaccaccatgccgcaacggtgggattggatttttgcggaagagtccgagagttttaccgcggtccatcaaacgctaaccaggagccttcccgagatgctgaagacctggggcctgcaacccggagagcttgtcgtggacttcagccggaccacgccggccattgccgcagcaatggtgctcgcctgcaggccgtggatgtcgcaagtcgtcggcttgaccgcgccaggaagcggcacgggcaagcctgccctgcctgtcctgagcggagtcgaagggagtaacgtgatcgaggccggagaccgggccttcgcctggcaggaaggaaacccctggaacgaagaagccgtaccggcacggcaggaagcagccctgttattcaatcaaggagggttctcatcggcagccaaacggtttcgacgcattgaatcgttggtcgggggaagcctcaaaccgctgtatcacggcctcgcagatttagccgacggctatgccgcctgggaaagcttcaagtaccgggacgcctgggacaaactcaaaaccgcgcacaaggccttggagttggcctcggtctgggatgggccggccggcatgtcatcactactgtccagggtcaaacacaacctgaaatttttggaaagcatcgtcatggaccccgatgacgtcaagcttcccgtggcgcatgatctgcttgcccatgccaaacggcgtgccggagagcagcaaatcgactctgccctccaactgttgctgcgagccttggaagcttatgcccagtaccacttgtggaaacagtatcgcatcaagagttgggacgtacaggttgaccaattgccgaaggatctgcaggaagcctgccggacctgttatagcagcgacgtggacggcaagtttcacctgccgcttcatgcccaatttcgcgccctgtcagggctggggcatcccatggggcaaaccttcgtcaacgagtggaccaagctcaaaacgctgtgggatgcggcccatcagagcgtcctgggccatgggtttcacaccacgaaagccgaccggtttcatcagttctatgccgcggccatcaaactgaccaacgtcaccgactccaacttgccggtcttcccgaagatgacgctgtaacgccggtgaacgtcaaaatctattatgaggacaccgactgcggcggcgtggtgtattacgccaactacctcaaatattttgaacgggcgaggaccgaatacctgctcacacacggaatttcggtcgcggaatttcaacggcaaggcatctactttttggtcacccatgcggaaatctcttaccgctcggcggcgcattatggagaaaccctccacgtcgaaacggtggcctcggcatcccgaaaaaccgccatcaccttctcccacgtgatccgggaaacaatcagccaacgcctgatcgtcgaaggatcagccacccttgtcaccgtcgacgccaagggaaaaatcatcaagagaccgccccaattgcaggcaatgtttcagtagcccatgcctctgtagccgcaccatcccatggcgctcttcaccctctccccaacgagggagagggctggggtgagggggaactttctcaggccttgtcccgaaacacccaagccaaatacatcccgccaatagcgaccgtcaccagttccacggtctggaggatgcgactcaccacggcctcaggctccgggggagacaggataaaatgcatgcccagataggcaggaggagaacctggcggcgattcccacggcggaaacagcacggccaacaccaacagccccgccatggcgtacaagatcctaatgttgaggatctccttggaccgagcctcagtctgcgactcctgaaccagccgcttcccacaactgttgcaaaagcgggcatccgcagccgactcatgcccgcaagcctgacacgtctcttgaccgttcatgggggtaggaacaaccggcactctgaagtggttccagattcttggatcgtccaattggtactataaaacgcattcgggttggttgtcacctctcagagccattctgattctgctgtccaagcaagcaacgcgtagagacattctcggtttatattgacaattgacaactgttcatgaccagtgcacataatagttgtgaattctaaatatcggcatctgcatttggctgtttcccattagaaataggcaggttatgggactaaaccatccaccacatccgggccgctcgatcaggcaggactgtctcgaagctttcggactgaccgtgactgacggtgcaaagatactggggattacccggcatatgttgtcgaggatcttgaatggtcaagcaggaatttccccggagatggccgtacggctggaaaaagcatttggcggaaccgcgcagagttggctcgcgcttcaacaagcgtatgatctcgcacaagtagaacggagaaaaattaaagtgcgcccggcttcgtcattcctggaagaagcgagagtttaagggaccccccttttctaatatttcgttgaggaagtctgatgactatgacgagttttctgaatgggagtgtctggcttcgagccgattttcacttgcatacaaaagccgacaaagaatttcagtacgatgacgaagacaaccaattcgttcacagctatattcagtccctgaaaacggctggaattcaagtagccgtcatcaccaatcacaacaagtttgacctcaacgagtacaaggcgttgtgcaaggccgggcgtagagaagagatcctcgtgttgcctggcgttgagctttcagtgaaggacggcagaagtggggtacacaccctgattgtatttgagaatgaatggatcgaggatagcactaatcacattcagagctttctgactgccacctttgcgggacaatcaaacttcgaaaatgagaatgctcggtctaaccatgacttactcgaaactattcatagactggatgagtttaatcgagactattttttcgtttttgctcatgttgaagcagaaaatgggctttggggtggcttgtcaggtggccggattcaggagttgggcgggaatgaatcctttaggcagagatgtttaggatttcaaaaagttcgtacgcaagagaaacgcgatacggttaagaattggttgagagactggtatcctgccgaagtcgaagggtctgatggtaaggcattggacgaagttggtcagagcaaacagacctatttgaagcttggagactttagtttcggagcggtgaaatatgccctaatggattaccaaaaccgcgtctctgctaaacccaagaaacacgaatcctcccatatcatcagcgcaacattcgaaggtggcgtgcttgatggaaagaccatccatttttctcctgaactgaatacgctcattggtattcgcggtagtggaaaatcttcgattttggaagctgtccgctatgtccttgacattccttttggagagaagtccctggacacggattacaagaaaagccttataggacatgtgctcgggagtggtggaaaaatcactgttcaggccattgattgtaggggacaacggtacgaaatccggcggatttacaaggaaaggcccgacgtgtatgtggaaggcattcttcaacctggcgtatcgattcgggaaaccatcctacgaaaaccgctttatttcggccaaaaggatctatccagtacaggtgaaggttttgagaaagatcttgttgaaaaattggtctgggagaaactcgctgatattcggacgcagattgatgcacagcgacaaaaagtatctgaagctgtcacccaattgaaaaagctctccactactgcagaaaaaaagaaggagttcgaggcgaagaaacaggatgctgaattcaaactcaaattttacaaagagcacggagttgaagaaaaactacaaaagcaggtggattttgacgcagattcgaggaaatgcgcacaggtcatttttttcgtgaaaagctatttgtctgacttggaggcatttattaatcaatacgaggatggtctgaagaatcagcgtgtgtacaagtcaagacagaatcaagagtttttcgatggctttttcacgatttacgacgaattgatcagatttctcgaaaatatcagtgcagctctttcagaaggccgaaaaagccttgtggcattacaggataaagccaagcaattcgagaaactgaaggatggccttaaggaagaattcgcaaatatcgagaggacgttgactgaagaattaaaggtctccgggattaaggctattcgtgccgatgagtttcgcgagtttcgccgcaccgttgatcaggccaagcaaatgctcaaggtcctggaacaccaggagacacaacggattacattgaaccgggaactattacaagaactggcccggctgaatgatttttatcttgcagaatacaatgcaatccaggatgaactgaatacggtaaaccaaagtcattcctctcttgagataaaggcggagtttaaggcggacaaggattcgttcgtggattacatgaaggatatattcaggggtagccggataagggaagcaacgtttagttccttagctcgggaattttccgattttggagccatgtacaaggagttcgataaggtgagaacgttggtgggcggttctgccaaaattttcgaagaatatttcctggataacctctcagcgttgctgacgtggcaagtcccaaaccgcttcattatcgaatatcgtggtaaagagttgaaacatcactctttagggcaacgggcttcggctcttatcctgtttgtcctgagtcagggagaaaatgatgtgattatcatcgatcagcctgaagacgatctggacaatcagaccatttatgaagatgtcattaagctggtccggagcctgaagcctacgacacagttcatttttgcgactcataacgcaaacttccccgttcttggagatgcagaacagatcctttcttgcgcatattctgacgatgtcatcagtatgaccagtggcaatattgattgtccggccttacaaaaagagattgttgacatcatggaaggcggagaagaggctttcaggcaacgtaaaaagatttatgaaatatggaaaccgaagaactcctagcaatcgtcgcccgtgacgaggatagcaaatatcagttaaaggcgaattttaccaacgtcgacgccatagctgcggaattagtcgcattcagtaattcaggtggcggcacgatcttaatcggtgtgagtaaagagggttcatttgccgggctcacccgtgaagacatgagtcgtttaaaccaacttctctcaaacgccgcctctcagtccgttcgtccaccaatcaatccacagaccgaaaacgtctctacacctgatggtcttgttatggtcgttaatgttcctcagggtttgagcaaaccctacatggacaagaacggagctatttgggtcaagagtggctcagacaagcgtaaagcaacttcgcgcgaggaaattcaaaggatgtatcaaagcgcgagattgattcatggagacgaaatccctgcggataacctcaccattgctgacatggataccgactacttcaaacagttctttgaagacaatatcggggaacctctagaagaacaggacgtaccattactaaaaatccttgaaaatatgaacctgatgaaagatggggttttgaacatcagcggtgcgttgctttttgctaagaatcccagtttcagattatcgatctttatcgtgaaggcggcttcttaccctggaactgaagttgatcaaaagcactatattgacagtcaagatatcacgggcaagatgtctgacatttaccataaaagcatgagtttcatcctcggcaatatcaaacacatacaaagggaccggggcgtcaatgcaccaggagaacctgaaatcccgaggattgtctttgaagaactgctcgtcaacgccttaattcaccgggactactttatctctgcaccgatcagaatatttgtttttcaagaccgcgtggagattattaacccaggacaccttccaaacaatctgacggttgaaaatatcaaaagtggaaactcaaacatacgtaaccctattctgacatcattcgccacaaagctccttccttatcgaggtctcgggagtggtatcatcagggcattgcgagcctaccctgatattgggttcgaaaatgatcaggatggcaatcagttcaaagcgattatcaagcgccgcctggaaatggatgaattgaagtaagaccgtctgcagtctacaaggaaaatcttaaacgcttatttggcaatagatttctcaagcagtctcgaactctcagaaactccacgaatgctgcattgtttgagttcttgtcttgcgtcggcagtccaaatcccaaacccatttctctcgctaagcgaatcgcaaaccacatcttggagcacatgtagccatgtcaacgcagtctaacatcgaatggaccgagactacgtggaacccggtgacgggctgcacgaagatcagcgacggatgtaagcattgctacgccgagcgaatggcgacacggctccaagcgatgggcgttgaaaaataccgaaacggattcgacctcacccttcatgaattcgtactggaagagcctctcagatggaaaaaaccgcggctcgtgttcgtgaactcgatgagtgacctgttccacgaatccgtccctgctacatttatcgagtcggtgttccgcgtcatgaatcaggcagctcagcatacgtttcaggtgctcaccaagcgtccggcccgtgtcatggaactcgaccttggactgacttggacgccgaatatctggctgggcacgagcatcgaatccaaagagtggctcgaccgattggcgaagctgaaagaagtcagcgctctcacaaaattcctgtctctcgaaccattactggggccgttgcccaagctggacctgacaggaatcgactgggtgatcgtgggcggagaatcaggacccggtgcccggcccatgaaggcagattgggtgcgggagatacgcgacaattgcctgcgaagcgatgtcccgtttttcttcaagcagtggggcggcgtgttcaagaaacagacaggccgcgtgcttgacaaaaaaacgtggaatcaaatgcctgctttcaagacgacctgatccaggcacaaagagggaaaatcaaaatgcgtcaagcgtcttcggttctggaaaaagcgaaggcgtacgagaagccatacaaaaagggcgacccgtaggtcgccccctgaatgttgcgaattctcacttgttaatcgtagcgaaaaccgcctattcccatgtgctaatatgctcgttagagtattacaggagctttgataaaatcaacacaaaatagaggagcagtttgagatggcggcttacagaatgggattggatgtcggcactaactcccttggatggagcgtgttggaactcaacgaggcgggagagccatgtgcggtaacagataccggtgtcaggattttcaatgatgggcgcgttgacaaatccaaggccactttaaaagccaaccgtcgcgtggctcgttcagcccgccgtcgccacgaccgctataaacaacgacggacctttttgctggacgaactcatcaaggctgggttgtttcccaaaaaccctgaagaacgtcacaaactgcaaacacgtgatcctctgaaattacgcgccaaagcactgacggaaaaactggaaccacacgagattggccgcgccttgtttcatctcaaccagcgacggggattcaagagcaaccggaaagacagaagcaaggaaacaacaagcggaatggtcagcaattccgtcaccgctttgttacaggcaatgggattgatggaaaaaggctacagcactgaagcatttaatggtctgtcaaaagaggacaagaaatttgctcgagagcaagaacgacaacagaaaaaagaggcacttaaaaagttagggaaacaagatactctgacgttcggactgtttctctggaaacgacgagaaaaaggtaaaccgactcgtgcccgtcagaacagcaacagcaaaatttacgacgcctatccgacccgggacatgctggagcatgaatttgaggtgatatggagagcacaggcaaagtatgctccggaattactcacgaaacaaaagcgtgaacgaatcagaacggttattttcacccagcgtccgctcaaaccacaaaaaatcggaaaatgcgcgtacctgccgtccgaagatcggacatttcaagccatgccgagttttcagcgttaccggatctatcaggaagtgaacaatctggaatggacggcaagtcaaggcaagaatcggctgatcgatcatcccgaagcacgcaatgcaatcgtagacatgctagaacaccctacgaacaaaaggggcaatgtacccttcaacaaaatgaagaaagttctgaaaaataagggattagtcaatggcgattttcagttcaattttgagacatcaaaacgcacaggctttgacggtaaccatacgtccaacctgatgcaagatgaacgttgcgttggaccagaatggcataattggtcacttgagaaacaggaccaatttatcagcgttattctgaatgatgaactggatgaccagaaggtccacgatattctcatgcaaaactatgacctcagcgacatggcggcaacggagtgtaccgaggctccgctaaaagacggaacagcatcattgtcaggtaaggctgcgctcttgatcctcgcaaaaatgcgtgatgacaggcttatccagtcggatgccgtaatggccgtagcgaaggaggaggcaaattttgtcaaccccttcaagcgagccggtaacgatacgttgctggatcgcctgccgtactacggcgtagccgtgcaagggcacatcattcctggcaatggtgatgaaagagatgaacaaactagaattggtatggtcaccaacccaaccgtgcatatcgcactgaaccagattcgccacgtggtcaatgagttgattgaccattatggtcatccagcttctatcgccattgaattaggacgtgaattgcctgctggacaaaaaggtcgcgcagaaattaccaaggagcagagagagaatcaggataacaaccaacgcttggacggaatcctgcacgagaatcgtcaaactgccactccagacaaccgcttgcgtttacggctctgggaagaattggatggagacccgaatggtcgccgttgcccattttccgggcagaaaataggcatttctgacttgttcaatgggcaaactgagatcgagcacctgataccgttcagcgcttcgcttgacgacagccgtgccaacaaggttctttgcacgagacaggccaatcgcgataagggaaacagaacaccgtttgacgcattcgggaatagcccagacggatatccatggaacgaaattcttgaacgctccaaacaactacccaaacgaaaacaatggcgttttcagaaggatgcactggaaatatggaaacgcgattactccgactttaccgaacgccatttgaacgatactcgctatatcggccggctggccaaggaatacttggagaatatctgcccgttcaacaagattgacgtcctgacgggacggctcacagccttgttgcggggacattggggactcaacaacatcttgcagaaccgcgaagaagaagcaaaaaagaatcgagacgaccaccgccatcatgcggtggatgcgattgtgatcggcatgacctcgcgcgccatgttgcaaaaggtttccaccgctgcaaaccgtgccgaagaactcaatcttccccgcctgtttgaaaaaaaatcgaacggtaaaagcacgattgatccgtggcccggattccgcgatcatgtaaaaactgcagtggacaacattgtcgtttcgcacaagccaaaacggaaatcccttaacaagaactcaacggacggccaactgcacaacgacacggcctatggcatcatttccggtcctgatagaaatgggacttctgaagtggtggtgcgcaagccaatcaaagactttaaaaaccgtcctgatgtggaagctatccgtgataaacaattgcggcacgaatttttggaagcctttgatgcggatggaacggttggtgttacacgtcttgcaggggacaaaaaaataggacgtttaagacaaaccgaaactttgagcgtcattcccatcagggataaattcggcaaggcctataaagcttataagggtgatagtaactgggggatggagatttacgagtatcccaacggtcaccaaaaagccggcagttgggacgggaaggttatttcacgttatgaggccaatcaaaaagactttcggctcgggcagactcaaaagcctcaccctgccgccaggctggtcatgagggtccaaatcaacgactgtgttgaaattgagcaagacggggtcaagcaaatcatgcgagtacaaaaactgtcgaagaacgggggtctagatcttgcaccgcataatgaagcgaacgtggatgccagaaatcgtgacaacaatgatccgtttagatatctcaacacagcagcgagcaaactgaagaaactcaacgcccgcaaggtgcatatcagtccggcaggacggacgagttacgaacaacggcgcaagccccaacagaagaatgaataatgcccgggcagattgtcgaaatcaccacgcctggcctgcatctcgccaagagtcgaggattcttacaggtcaaagaaaaagacagtctcgtcggccaggtggcactggatgacctactcgccgtaattgtcggcgtgcagggctgttcaatctccaccacgctcatggatgaactcagccagcgtaacattatgctggtggtgtgcgggaaaaatttcctgcccaactcgttcatcctgccggtcgtcggtcatggtcggcaattccaggtcatgcaggcacagatgaacttgtcggaaccgcgacgtaaacgcgcatggcaaaagatcgtccgtgccaaaattcttaaccaagccgacttactcacccacgcggggaaaaacaacatccagctcattcgtctggcaaagatggtgaaatccggcgatctggaaaattgtgaggcgcaggccgcacgcatctactggcagcgactgttcggcaatgacttccggcgcgaccacgaagccatgggcctgaattcgtcactgaattacatctataccgtcatccgcgcctgtgtggctcgcggggtaagcgctgcaggcctgcatccgagtttcagcctctgccacaagaaccctcaaaacccgctgaacctcgttgatgatctggtagaacccttccgtccgatcgccgactatcgtgtttggcagaacaaggcctgccgcctgcatgatctctcaccggaaataaaggcaagcctgtcgtcgattacaacattgatgattcccataaaagatgaaacgtcacctctctcactggcagcggtgaaggtctgccgttcattcgccggttactgccttggcgaagcggatgagttgttgttgccaaccttgcccatacagttagacgcttcaactccatgaagcgtagagaacatctcagcccctatcgcattatgtgggtcgttgtgatgtttgatttacccgtgggaactaaacaggaaaggaagcaggcgacaaattttcgtaataacctgctcgaccttggttttgaaatgtcgcaattctcagtgtatttgaaatattgcgcgtccagtgagaaagcggaatccatcggtagccgtatcccgcactatttaccgcctggagggaaaatcgatattttgacgattaccgacaaacaattcgctaatatgaaaagattctatggtactgaccgaattaaaaacgacggaaaagttgatcagttgcacttgttttgaaggagttttttctgcagtctgcagaaaaaactccttcaaagagaatgctttacggaagtccgagtctagcacatgggaataggcggggctaggacaacccgcatggcttacctcaccagttccttataagtctagcacatgggaataggcggggctaggacaaccatcgggcgtgacgattgacgggcgtgcgaagtctagcacatgggaataggcggggctaggacaacggcgcattcggtcacattggtcatgtccgtaaccaatcctcaaccggcatggagaggaaggtttccacggcgagcccgtcgccgcctacgagcagttttctggtcggctgaaaggcttgggcaaaagcggttattcccggcagggcgtggcgtgcgtgtccgcctttcacttcgatcgctacgatgtgcttgcctgcctgcacgacgaaatccacctcgcgggtggcacgcacttcggccagggtcatctcggaactggatgggtgaattccggttcactcattatggtgagtaattttactcaacgatgccagtaaaatgaaaattcttcggaggggacatgggtgacggcggagggttcctaattcgttctttcaggaatccctcatgcagagttgccgcctgcacctccaaggtatgaaaatggtgttcctgagaaccgttttcgtaacaaggacatccttctgtcatcctcgacatttttaatcgaggatccagggtctttgcttttttcttcgtccgtgaagagaacgacgctggattcccgattactaacgtcgggaatgaccgattgggactattttcatatcaattgacagtcccgaaaggccgttcttataatccggcacccgtttttgccttgccatattgaaagccatgatgacttctttgcccgccattcatactgcctcggttattggagcgggggcctggggcaccacgctcgcccggcatctggtgaaccaggggctcacgatcaagctctgggcttatgaaaacgaggtggtcgagagcatcaatctgaaacgggaaaatgccttgtttttgccggacgtcacgcttcccacggcgctctcggccacgcactctcttcaggacgcggttgcggccaccggcctgatcgtgctggccgtaccttcgcatgtgatgcgagctgtggtccggcaactgatcccttttctttccgaacctcttccgattgtcgtggcatcaaaggggattgaggaggattcgcatcaattaatgtcccaggtgctcgacgaactgctgccctccggctgggcgaatgggatcaccgtgctcacggggcccagttttgccgctgaagtaagtcaggacaaacccacgaccatattgttggccgggcaggatgccggccttacggcgcacttgcaaatggtgttcatatccgcagcttttcgggtgtacaccggcacggacatgatcggggcgcaattgggcggggcgctcaaaaacgtcatggcgattgcagccggtgtggtggatggcctggagttgggattgaatgcccgggccgcactgatcacgagaggattggccgaggtgattcgcctgggcgtcgcgcttggggccgacgtgcatacgttctacggcctttcagggttgggggatctggtgctgacctgtacgggcgccttgagtcgcaaccatgccgtgggactgcaattgggccaaggccggcggttagaggatattctgcatgaaacggtcacggtggccgaaggcgttcggaccaccaaagccgccatggcattggcgcggcagtttcaggtggagatgccgattgttcaaggcgttcacgcgatgctgtttgaggataaaccacccaggcaaatcgtcgccgatctgatgtcacggtcagccaaagaagaaatctctttcgcaaattccggacgctcgcgctgatttctctacccgtcatgcaccctttggtcctcgagtctctgctgcagtcggttcaagccgggtccacgtcgattgcgaacgcgcttgaacaactgcgcacccttccctacgaagatttggaatttgccaagctggatcaccatcgcacgttgcgtcacggctcaccggaggtgatcctgtgcgaggggaaaaccgagaagcagattgtcgcgctgacccgtggcctgctcaaacacaaacagccggtgctcgccacgcgcgctgatgccgccgtcgcgcgcgcgctcaaacgagtaagccggaaggccgtgtatcatcaagcggcgcgagtcgtggtcattcagccgtccacgcccaaccccttgaagggcgacatcgtgatcgtgaccgccggcaccgcggatatcccggtcgcggaagaagccaaggtaaccgcaatgacgatggggagcgccgtccacacgattttcgacgtgggagtggccggggtccaccggctgttcgatcaggttgatcgtctccaacgcgcgcgcgtgctgattgtcgtcgcgggcatggatggcgtgctgcccagcgtggtggccggtctggtgcaaacgccgctcattgccgtacccaccagccggggctacggcgcgcacttcggggggcttgccccgctactcacgatgttgaatacgtgttccggtggaatcggcgtggtgaatatcgacaacgggttcggagccgggcatctggcccatcgcatcaacaccctggtcgatcggccatagtcgccgccgggttctcttcacgtccctgagtcgcggtgtgccgggctgagggcacgaggagaagacacgtcaagcgtccctctcgcaaacggcgaaacgatcttggccttggtaaatccatcctcatgggccatcaacttggctctggcttcataggaatacgtgccttccggtacatggtttcgggtctggtctttcccgtcccagagcagggtggtcgtcatgcgaggcttgccgcccctgatgatgacggtatccaggacctgccgtttaaccaggaatcgaatagatcgcctggtcggcacactgatgagcgaggagacttcgagcaaatcgaactgatccagtttttcaggcaactccacggtcaccgtgatggccatgggttcatgacccggagcaaaaggcacgggtgaggtcgtgatgtccacgatcttgagtggagacggcggggtccgccttttccgcttggcatcgagggccgccggagccagcacaaaagccagaagggtcgccagggtgatgaaagtcagacgaacggactgcatgggggatgtggaagaggggagaacgttgcgtaatgcctactccatacttgtcatttcatgcaaatctttgtatgtgcttacataccgtgacgcgagtagatcgtcaagtggtccggcacgggagccggaccctacacgaagcgtgaaggattgccgtgcatcttcacttcgattgtttttccggtatcagcggagacatgacgttgggggccctcgtggacgtcggactctcgccgagagccctgcgccaaggtctcaaggcccttcctgtttccggataccgtctcaaggtctcagaagtccaccgcggggcgatccacgcgacgaaggtggacgtggtcatttccaagatcgcggaaaaacgccgctcttggatgcaaatccggcggctgctgtccacgagccgtttaccgtctcaagtcaaaaaacaagctcttgcggtctttgaacgcctggccacggcagaaggaagggtccatgggcaagaccccgccaatgtctcgtttcatgaagtgggggccattgatgccctggtcgatatcgtgggtgggttgctcggatgtcatgaactgggagtgaaaacctttagcgcgtctgccgtcaacgtagggtcgggcacgatcgacgcgacccacggcgtgtcgccggttcccgggcccgcggttgccgaaatggcgaaagggtatcccatttattcccaaggccccgccatggaattgaccactccgaccgggatggccctgctgaccaccctgacgcagaacgttgaccggctaccgcttgtggtgccaggctccgtcggatacggggcaggcacggctgatccgccagattggccgaacgtgttgcgcgtgtttcttgccgatacagccctcacaccttcctccctcaccccctttgccctcacccctacccctcttccggggggagaggggtttgaagcggaccaggttatcctgttggaaaccaacatcgacgatatgaaccctcaactgtacgaagcggtcatggaacgcctgttcgagaacggcgcccttgacgtctgcatgaccccgaccatcatgaagcggaaccggccggggatcatcctcacggtcttgacccatcccgagcatgccgggcggctaacgcaactgctctttcatgaaacgaccaccctcggcgtgcggagccaacccatcaaccggaccacgcttccccggtcaatgcaaacgatccgcctgccgcaaggtcgcgtccgggtgaaaaccattcgcgtgggcaaggccgtcaaacatcgacccgaatttcaggactgccaggccatcgccaaaaaaaccggaatgccgattcaagaggtcatcgaacgggtgatgcaagcgatccgggacaggaaccggggttaacccatgccaaatacgccgacacaccacaagcccattttcgccgtgaccatgggtgacgcggccggcatcggtcctgaggtgattgtcaaggcactggcgtctcccgcggtgtggcgtgcgtgtcggcccatcgtcatcggatccgtgccagtgctccaacgggaagcccgtcgtctgtcctcttccctcacgatcctccccttagagggtaatcacggacaagggtcagccattcgcaggggtcacgttccggtgtttgaccctttgaaaacgccactgggccacattcgagcaggccaacctgcccaaggtccaggagcggcttcagtcgagttcattaaaacagccgtccggtgggcgcagagcggctgtgcctcgggaatggtcacggctccgatcaataaagaggcccttcaccttgccgggtatccctaccccgggcatacggaacttctcgccgatctaacgggcaccaaacaggtcgggatgatgttaatgggcgggccactgaaaatcctctttgcgacgacgcacctggcgctccgggacgttccaggcgccttgacgaccccacgcgtgttgcaggccattcgactcgcccatcgcgccatgaaagagtatttccggattccgaggccgcggatcggcgtggcggccctcaaccctcacgcgggcgagcacgggttgttcggcaatgaggagcaggactgcattgcgccggccgttcgcctcgccagacgcgcccgcattcaagcatccgggccgcttccggccgataccctgttcggcgccgcggtccgcggagcgtatgacgtggtggtggccatgtatcacgatcaagggctgatccctctcaagaccgtggcattcggacgctgtgtcaacgtcacggtcggcttgccgatcattcgcacttcggtggatcatggcacggcctatgacatcgttggcaaaggcaaggccgacccccaaagcctcgtggaagccatcaagctggccgcggatctggcaaggggaaccggctgattgctgactgaaagcattcgcaatccataatcgacaagccgaaatgtgtgcatggacctgccgaagcctgacccttcaaacccttctggccgtggaacgggaaacctgttttgccgatgaggcgtttgcccgcttcgccgcgcgcgcgaagctgtctcacgaagaccaggccctggcttttgaacttgtgtacggggtgctccgccaccgagcgacattggattggcaattgaacgccgtcgcaagtcgtcccgttcaccggctgcccgcggttgtagctgcgatcctgcgtctcggggcctatcaaatgcgatatctggatcgcatcccggtttccgccgcggtgaacgaatcggttaaactcgccaaaggaatcaaaggccgggactggcgcggggtggtgaacggcatccttcggaatttggaccggacggaagtcgagtggcctgacgtgtctcacaatcccgtgaacgggctatccgtcacgtactcctgcccccactggttgacgcaacgctggatcgaccgatgggggctcgagacgacagaagccctgtgccgccacaccctcacgattccacccttgacgttacgcaccaacacgcttcgctgttcccgcgagcaactcgaaaccaggctcggcgaagaagggtatacggtatcccggacgtccgtcagccccgaagggcttattctggagaagtgcgggtcgttgcaggccttgcccgcgttgcaggaaggctggtgttacgtcgaggacgaggccgcccagttggttcccctgctgttggacgtccggcccgggcagcgtgtcctggatgcgtgtgcggctcccggaggcaaatgttcacacatcgcggcgttgatgcagaacaacggggagattgtggccaccgatccggaaccccgccgccttgaacgcctggaatcgaatctgcgcatgctggggatcacgtgcgtggaaacgtgcgatctctcgcacgagacggaccgtgtctccccatggctccatgcccaagaagcgtttgatcggattctggtggatgcgccctgttcgggattaggcgtgctccgtcgccatcccgaagcgaaatggcagaagaccgccttgcatctcgattggcacggaaaacggcaatcaggcattctggaacgcgtagctccttacttgagaacgggcggcatcctggtctatagtgcgtgctcaacggagcctgaggaaacgacacaagtcatttctcgtttttgtcaagaccacccggaattttgccatgaatcaacggcacagtggcttcctccacatgcgcattccctgacgaatccggacggagatttcctcacgtccggcttccgttacaatatggacgggttctttgccgcacgacttcgacgaatgtagacgatgagtttcgcgaccgtacagattgctccttcgattctctccgcggacttcgcgcacctggcggacgaggtcgccgcggtggaagccgcgggagccgacctgctgcacgtggacgtgatggacgggcatttcgttccgaacctcacgatcggcccgcccattgtcgaatcgttgcgaaaagtcacggccctgcccctcgacgttcatctcatggtgacgaacccggatgccgtgattcccgactttgcccaagccggagccaactatctcacggtgcatacggaaacctgtccccatctgcaccgcacgctccaaagcatcaaagagcagggtgtcaaggccggggtcacgctcaacccttcaacttctttgaacactgtcgaagaagtcgtcccggatgtggacctggtgctgatcatgtcggtcaaccccgggttcgggggacaaacctttatctccgcctgtttggataaactacgacgagccagacagctcatcgatcgtacaggaagccaagccctgctcgaagtggacggtggcatcaaagtcgagaacgccgccgaggtcctcaaagccggggccaacgtcctggtcgcggggtccgcgattttccacagcccgaactacgccgacacgattgccgcgttccgcaacgttgcccgagagctccaaccgcgtagtatcccctctcccgttgggagagggtcagggtgagggtgactgggtccatgcaggcctcggctgtgtacgacagtttgcatcctctcgaaatcaacctgctggcggcattcagccaatccgcggatcagccggtctctgattcagttttacaggaacgctcccaattagagccgtctcaggtcagcatggccctagggtggcttcaagccaaaaaactggtcggcatccattccgaagtcgtcacggcttgggtggggttgaccgaggtcgggcaccggtatctggctgacgggtctccctctgaatggatcatcaggacgtgcaaacaaggggccgaggaggggcgatcattcaccgtgaaagacttgcagagcctgaacgcgttcccccccaccgaactgagccgggccattggcctgctcaaaaaagaaggcgccatcgcgttgggagccggcggtcgcattgaagtgaccgagacgctgagtcccactgtcgagaagctgtacgcgctcctgcacgagttgaagaaggaccgtcgggaacttctctccttttcgccggaccaacaagccctgttacgccagtacgcggtcaaacggggcagcgcccaggagccgtttcggatcgaggaacggattcaacgcgaatacatcccgaccgggacgggaaaggccgtagcgaaacgctgtcacgccggctccacggaagaagtctcccaactgacgcccgacatgctcaaggacggctcatggcggagcaggcgtttccggaaatacaccattaccctgagacccccgcgggtcgcgccgggacggcggcatccgtacagggaatttcttgacctggtcaaacacaaattggtcggcatgggctttcaggagatgcgaggacctctggtcgaaaccgaattctgggacatggatgccctgtatatgccgcaattccatccggcacgggccattcacgacgtgtacttcgtgaagaccccaacccatgcaaagg

SEQ ID NO: 481 - DNA, 22124 bp, synthetic construct
  misc_feature 1..22124: note = Synthetic
  source 1..22124: mol_type = other DNA
aaggtggggacaaattccgcttgcaccattcccgggttctggctaaggtctgataaaggctccgttcgtaggaaactcgtatggccacgtatgcaatcggcgatattcaggggtgcctgactcccctcaagaaactgttggatcgcattcgattcgatccatcctcggaccggctgtggtttgtcggcgatctggtcaaccgcgggccccagtcattggaagtgttgcgcttcgtcaaagggctcgaagatcgttgcgtggtcgtgctcggcaaccatgatttgcatgtattggcggtgcattgtggaatcacgcgactccggaagcaggatacgcttcaaccggtcctggaggcacctgatgccgaggagttgttggactggcttcgccgccaagccatgctccatcatgaaggcgagtatctgctggtccacgccggcatccttccccaatggtccgtcgaacaggcgatgcaattggccggggaagtggaggacgccctcaggtccgaagcatatgacacgctcttaccgttcatttaccggagcgaggagacccgttggtccgataccatccccgccccggcccgcctcggtgtgatcacaaacgtcctgaccagaatgcggatgtgttcccgggatggcctcatcgacctttcattcaagggcccgccggagcaggcccccgccggcctgaccccatggtttcgcctgccgcctcgcacccaacggaccgcaacggtggtgtgcgggcattggtcggccttgggcgtgtacatggacgaaggcgtgatcgcgttggacggcgggtacgtctggggaaacgagctggcctgccttcggttggaagacaagaagctgtacacgatcgcgtgtcgctgatgctggctgcactcgagctacctgcaggcggagaacccttatccgacgtcctggcgagtgactcgatggacctgctctcgaaagatcattccatccttgaacggcctgtcatgctgtttcgcccgttcggggtgacgccggccggtgaaaaaattcgtgacgtcagtgggattacgatcaaagcgaacgtcgaatatttggaagaagtcgtcagcaggaaaaacggagacgccgcgggtcgtcacgctattgaccgcctctgtgattccctgaatgcccggatcagcgatccttcgtatcacgtcaccccggaattcctgcaaaatatctggcacagttattcctatgaattcacgtgttaccttggtgagttctgcatcctgatctccgaggatccgaactttcaattcgaaatgggcaaacacaaatttatttctcccgtcattcaaacgctgggccgcccattttccgtcgcgcaaatcttcaaaatgtttccgcgcttcggagagaaatttgccaaagattccttgcggttcagcgtgcgtagcgtgaccaatggcgcagccgttctgggcatgaccctgaccgaacatgtggctcaacagttcgggccgtaccgcaaagggtgcgcctccagcatctgccaggcagcgaagggcggccttgtggccgtgccgcaaaaggttcaccacctggaatttgccgacgtccgggacctccaatgcatggcggacggcgacgaatcctgtgaatgggaattccattggccgccccaaccgctctctgaaacccgtggctgggccgtgaccggagctgcggtctgcgtgagcatcatggccttcatctacgttcgatggatatacccggagttgtcctggctggagacccttgcctggacggtcatcccggggatggcctcctggttcgccggtcagtggcaccgtctcaagaagaaggcggaagagcgggaatccctgctgacggaacaagtggcttccggggatgcccgccacgaggagctgcgagaagcctatctcgatcaggaacgaacggtcgtggaactccgcacgctgaacgcggatctcgaaaaccgggtacgggaacgaacccgatcacttgatgccgccaatcaaaagttgcgtgagctggatcaacgcaaatccgccttcgtctccatgacatcgcacgaaatacgcacaccactcacctccatgaaggggttcgtggaaaacatgctggccggagtaaccggcgatttacgagagcgccaggtcctgtatctcacgcgggtcaactataatattgaacgattgacgcgaacgctgaacgacctgctggacctgtcccggatcgaagccggccacgtggaattgcgattggccgacgtgtcgctggccgaagtgaccgcggaagctcttgagagtctgcgcccacaggcggaggcgaaatccctcgtgctggagaccatggccccttcgccgcttaagccggtacgtggagaccgagacaagattcttcagatcttgacgaacctcattcacaacgccatcaaatttacgccgtcatccggacgcattgcggtctcgctcacgccgatggaagattccgccatccaggtgtgcgtcgccgacacgggatgcggcatcgctgccgaagaggtgcctcacgtgttcgatcgcttttatcggattgaccgtgagacgacggaggtgcggggatcgggtttgggcttggcgattacgaaaagtctggtggacctgcatcaaggccggatctgggtggaaagcacggtgggtagcgggagccgattctattttacgctccctactggttgacccgggaagccgccttactttgcgtccttccggtcttccgcctgtttttgcttgagaacgcgcgcgaggtaggagcgctggagccccagcgctttcgcagctttggtctggttgccatgggtgcgtttcagcgcctgctcaatcagaaagtagcggtggcgttccatggcctgatggtagggcaaagcactcgcctcccggacttggggctcttcttcatcaacttgggacttttcttcgtagtcgtgtgggaggcgtaaatgctcgggaccgatctcatggccggcagccaagaccacggcccgggccacggcattctccaattcccgcacgttgcccggccacggatacgctcgcatggtccggagggcggatgccgagaggtgcatgccggcttttcccgtctccttggtatagcgttgcagaaagagctcggccaaccgaggaatttcatcgggtcgttcgcgtaacggggggatggacacaccaatcacgtttaagcgatgaaacagatcttcacggaacgcgccttgtttcacggccgttgaaagatcgcgattcgtcgcggcaatcacccggatgttgacccgaacgacgcgcgtcccgcccacccgatgaaattcccgatcctgtagaaggcgcaacaatttcgcttgcaggtccggggccatgtccccgatctcgtccaggaagagggtgccttcatcggccatttccactttgcccttttgttgcgtggtcgctcccgtgaacgcgcctttttcatgaccgaacaattcgttttcgagcagggtctcggtcaaggccacacaattaatcacgacaaagggtttctcgacccgtgtgctccattgatgaatggacctggcaaagagttccttgcccgtgccgctctctcccagcaacagcacggtggcatccgaagcagccacctgtttgatctccgcaatgagtgacgccatggccggcgtgtccgccacgatggtgccgtaccgggattcgacttcctggcgcaacaccgcgacgtgccgtttcaggccttcgcgttccagggccttttgcatcaccagggtcaggtgatccatatccaggggtttcgtgagaaaatcggccgctccacatttcatggcttccacggccgattgaatcgtcccgtgggccgtcatcacgataatcggggggcgattcgccaggatcgcctgctcttgccgggccaatcgttccaggacttccaggcccgtcatccggggcatttgcaaatcgagcaacacgaggccggggtcctcggactccaggagttcaagggcgcgttgcccgtcaccggcagacagcgtggcatagcccaacgcctccaggcgatccgtcaacatcaacacgatgtcgggatcatcatcgaccacgagaatttttttctgcatgggcaacccaacgaacgttggtcttggcaaggaacccgatggtgaaacgagaacgtggcccgggtttcgtcccggcccgtgacgtccgccatgtcgaaacgaccggaagcgattctaggcccaccctccggaaatctcaacagattttataacgattggtttataatgtgtgccgcctgtctttcactccccccttgagggggagtcgggaagccaagggcacagcccgccggcgaaccggtgggggctatagggacaggcccttggacctgccttccggctgattcgggacggcacgggggccgtcccctacacagttaacgcttggagtttgccggagagcgatgctatagtctcgccgttatgagcggggaatatcggaccaaagcgttactcatcgcggtttccggggaccctgtcccggtgcaggcgtgcatcaaccggctcatcccggagtttctctgtttcgtggtgtccgaatcccggaaagcctccatcgaagccgacattcaaccggccatcaccacaatgccgcagcgatgggattggattctcgtggaagagtccgacagttttacggccagccatcaaacattaaccaaaagccttcccgacatgctgaagacctgggggctgaaaccaggagaattcgtcctggacttcagcagggccacgccggccatcgccgcggcaatggcgctcgccggccggccgtggacctcgcaagtcgttggcttgaccacgccggagagcgacacggggaagagtgacgtggttgcggtcggagaccggaccttcgcctggcaagaagggaatccttggaacgaagaagccgtacaggcccggcaggaggcggccctgttatttaatcaaggggcatttccctcggcggccaaacggtttcgacgcattgaatccttggtcggaggaagcctcaaaccgttgtatcacgccctggcgaatttggccgatggctatgccgcctgggaaggcttcaagtaccgggacgcctgggacaaactcaaaaccgcgctcaaagccttggaattggcctcggtctggggcgggccacccggcatgtcctccttactggccggggtcaaacaaaacctgaagtttttggaaagcatcgtcatgaaccccgacgacgtcaaactccccgtggcgcatgatttactcgcccatgccaaacgacgcgcggaacgtgatcagcaaatcgactcggcccttcaactgttactgcgagccctggaagcctatgcccagtaccacttgtggaaacagtatggaatcaaaagctgggacgtgcaggttgaccaattaccgcaggatctgcaggaaccctgtcgcacctgctatgccagcgacgtggacggcaagtttcacctgccgctcgaggcccaatttcgcgccctggccgggctgggccatcccatggggcaaaccttcgtgaacgagtggaccaagatcaagaccttgtgggatgcggcccatcagagcgtcctgggtcatggattccaaaccacgaaagccgaccggtttcaccagttctatgccgcggccatcaaactgaccaacgtcaccgaacccaacttgccggccttcccgaagatgacgttgtaacgccggtggacgtcaaaatctattatgaggacaccgactgcggcggcgtggtgtattacgccaactacctcaaatattttgaacgggcgcggaccgaatacctgctctcacacaggatctcagtcgcggagttccagcagcagggcatctacttcctggtcacccatgcggaagtcttttaccgctccgcagcgcattacggcgagaccctccacgtcgacacggtggcttcggcatcgcgaaaaaccgcggtcaccttctcccacacgattcgagaagcaaccacccaacgcctcatcgtcgaaggatcagccaccctcgtcacggtcgacgccaagggaaaaatcatcaagagaccgccccagttgcaggcgatgtttaagtagcgtgcgcctcctgtcatcctcgacatccttaatcgaggatccagtgtctttgttttttcttttgtaacggcgccatccctgttcaaagacagggacatgccgcatggcgcttcctatttcctcccctttgtaagtgggcgcatttccgaagagggaatgcgggtggggtagaggcattcgcaccctctgggagagggcaggggtgagggtgatgcgagggttgagcgaggacacaacgccgccatgcgccccatagtgccataaatcagcggttcctcagggtttctcccgaaacacccaagccaaatacatcccgccaatagctatcgtcaccagttccacggtctggaggatgcggctcaccacggcctcgggctccggtggcgacagaataaaatgcatgcccaggtaggcagggggagaaccgggaggagactcccacggcggaaacagcacggccaacaccaacagtcccgccatgccgtacaggatttggaggttgagaatctccttggaccgggcctcagtctgcggctcctgaacaaactgctgcccgcacccggtgcaaaagcgggcatccgaagccgattcatgcccgcaagcctgacacgtcttttgaccgttcatcacgtcagattataaccatgaggagagaaatttccagcggggaaaatctgagccggcactttatgtgttcactaattcgttgactgtttctactccacaactccctcgccccttgagggagagcctgtcctgagcgtagtcgaagggggctggggtgaggggggggcgggccttggaggaagcgtagtcgaagggtacggacgggaactgtttccgaagagggaaaagttcggagggagaggcatctattcccctcctttgtaaggaggggcgaaggggaggtagaggcatttgcaggcacccgacgttcggactctaccccacccgcattccctcttcggaaatgcgcccacttacaaaggggagggaacgaaagaagaagacccgccaggggcgagggagtttttgctgaatgggtccttgtggatcattttctgtcaatgaagcatccattaatgctttttgtgtcaccctcagggcatttactgtcatttttgtgtcacttttgtgtcacggcggcatcagaagcgccatgagatggcgccgctacaacgataacgataaagcaaagacactggatccccgatcgagccggggatgacaagagggggggaatccctcacccagcacccactaccaaatggtcatcctgagcaacgcgaaggatctcgtagttgaagcgttcggttgttgaacgagagattcctcgcttcgctcggaatgacaattctagtgtggtcaactcctcattctggcaactcggcacatgccagtaaacggtttcaaaagagacccctggcaaggtaagattgcgacacgatcgtgaaatgcgatccggtaaatatccaaatcgcaaaccacattctgaagcacatataaaaatgtcaacgcagtcgagcatcgaatggaccgagactacctggaacccggtgacgggttgcacgaagatcagcgacggctgcaagcattgctacgccgagcgcatggcgacacggcttcaagcgatgggcgttgaaaaataccggaacgggttcgacctcacccttcacgagtccgtactggaagaaccgctcagatggaaaaaaccgcggatcgtgttcgtgaactcgatgagtgacctattccatgactccgttcccgccgcattcatcgagtcggtgttccgtgtcatgaatcaggcatcccagcatacgtttcaagtactcacgaagcgcccggcccgagtcatggaactcgaccctaaactcacctggacgccgaatatctggctgggcacgagcatcgaatccaaagaatggatcgaccgattggcgaagctgaaagaatccaaggccctcacgaaattcctgtctctcgaaccgttactggggccgttggccagcctcgacttggcaggaatcgattgggtgatcgtagggggtgaatcaggacccggtgcccggcccatgaaggcggcttgggtgcgggaaatacgcgacaattgcctgcgaagccgcgtcccgttcttcttcaagcagtggggcggtgtgtttaagaaacagacaggccgcgtacttgacaagaaaacgtgggatcaaatgcccgctttcaaaacaatctgacgcaatgtccaaaacttctcccagagcaccgcatccgggccgctcgatcaggcgggattgcctcgaagccctcggactgactgtgactgatggcgcaaagatactggggattacccggcacatgctgtcgaggatcctgaacggccaagcagggatttctccagagatggccgtgcgggctggaaaaagcctttggcggaacagcgcagagctggctcgcgcttcagcaggcgtatgacctcgcacaggtggaacgagggaaaatcaaagtgcgcccggcggcgtcagttctggaaaaaacgagggtgtaagaaaagtcatacaaaaagggcgacccgtaggtcgcccctgaatgttgcgaattctcgcttgttaatcgtagcgaaacccgcctattcccatgtgctaacaggttcatatagtattatagagatctctctaaaatcaacaagcaaaaaggagacttttttgtgatgttttcttacagaatggggctggacatcggcaccaattccattggatggagcgtgttggaactcaaggcaggcaagccatgtgcagtgagagatgctggtgcccggattttcagcgacgggcgcgttgaccaatccaaagctaccttgaaagccgaccgtcgcgcggctcgttcggcccgccgccgccacgaccactacaaacaacgacgggcctttttgctggacgaactcaccagggccgggctgtttcccgaaagccccgaagaacgccacaaactacaaacacgtgatcctctgaagttacgcgccaatgcactgacggaaaaactggagccacacgagattggccgcgccctgtttcacctcaatcagcgtcggggattcaaaagcaaccggaaagacagaagcaaggaaacgacaagcgggatagtcagcaattccgtcaccgctttgttgcgggcaatggggttgatggaagaaggctacagcgccgaggcattcaaggatctgtcaaaagaggccaagaaagctgctcgagagaaagaacagcgacagaaaaaaggggcgcttgagaaattagggcagcagaatgctctgactttcggactttttctctggcaacggcgagacaaaggcgaacctacccgcgcacgccaaaatagcgacgttaaactttatgacctctatccgactcgcgacatgctggagcatgagtttgatgcgatttggacggcacaggccgggtatcaccccgaattactgacggatcaaaagcgcgagcggatcaggacggttattttcacccagcgccacctaaaaccccaaaaagtcggaaaatgcacatacctgccgaacgaagatcggacgttccaggccatgccaagttttcagcgctaccggatttatcaggaagtgaacaatctggaatggacgacaagccgtggcaaaaatcggctcattgcgtatcccgaggcgagggacgcaatcgtggacatgctagaacaccctacgaacaagaagggtgatgtaaccttcaataaaatgaaaaaagttctaaaaagcaggagattggccgaaggcgattttcagtttaactttgaaacgctgaaacgcaaaggacttgacggcaaccacacgtccaacctgatgcaagatgaaagccgtgtcgggccaatttgttagcgtcattatgaatgatgaactggacgaccagaatgtccacgatgacctgatgcggaattatggcctcagcgacgcggcggcaacggcatgcgtcgaggctccgctgaaggatggaacagcgtcattgtcaagcaaggccgcacgcttgctacttgcaaaaatgcgtgatgacaagcttgtccagacggacgccgtacagaccgtggcaaaagaggaaactgatttcgtcaaccccttcaaacgagccggtgcaggcacattgttggaccgcttgccttattacggcatggccgtgcaaggccatatcattcttggcaaaggtgatgaaaaagatgaacaggcacggattggcatggtcgccaaccccacggtgcatatcgcactgaatcagatccgccatgtggtaaatgaattgatcgcccgttatggccatccggcttccatcgctattgaactgggacgtgagctacccgccggacaagaaggtcgcgccgagattaacaaggaacagaaagcaaatcaggacaacaatgagagactggacaaaatcttacacgagcaggttcaagccagcacccccgacaaccgcttgcgtttgcggctctgggaagaattggacggggacccgaatggtcgctgctgtcctttttccggacagaaaataggcattgctgacctgttcaacggccaagccgagatcgaacacctgatcccattcagcaagtcgctggatgacagccgggcaaacaaagtgatttgcacccgtcaggccaaccgcgataagggcaatcaaacgccctatcaggcttttggctttagcccggatggttacaattgggacaaaatttttgaacgtcgtacaaagctgccacagagtaaacagtggcgtttccagaaagatgcgttggaaatatggtatcgcaaacatgccgactttaccgaacgccatttgaacgatactcgctatatcggccggctggccagggaatacttggagaatatctgcccgttcaacaagattgacgttctgacggggcgacttacggccctattgcggggacattggggattgaacagcgtcctaggcgaccacaaccaaactcaaggaacaaaaaagaaccgcaacgaccaccgccatcatgcggtggatgccattgtgatcggcatgacttcacgctccatgctgcaaaaagttgccgctgctgccaaccgcgccgaaaaacttcaccttggccgactgtttgagagaagtgccaacggtaaaaacccgattgacccgtggtccggcttccgcaatcacgtgaaagaaatcgtgaacaagatagtcgtttcgcataagccgaaaaggaaaactctgggcaagaatacaaccgacggccaactgcacaacgacacagcgtatggcatcatttctgggccggacaatcaaggatgttatagagtggttgtgcgctgtccgattaaagaattcgaaaagcgtagtgatgtggaagctatccgtgataaacacttgcaacacgaatttttgcaagcttttgatgcagagagaacggccggtgttgcccgtcttgcaagggacaaaaaaataagacgtttaagacgaaccgaaaccttgagtgtcattcccatcagggataaattcggtaggacctataaagcttataaaggcgatagtaactgggggatggagatttatgaatatcctaaaggccacgaaaaagccggcaaatggcgtggggaggttatctcgcgctatgaggccaatcaagaaggctttcgaaccggtcagactcaaaagcctcaccccgctgctcggctggtcatgagggtccaaaaagaagactgcgttgaaattgagcaaaacgggatcaagcaaatcatgctggtgcataaactgtcgaagcccgggcgtctagatctcgcaccgcataacgaagcaaacgtagctgccagacatcgtgacaagaatgatccgttcaaatacctcaacataccagccagcggactcaagagcagcaatgcccgcaaggtgcatatcagcccggcggggcggttaagttacgaaaatcgccgtaacccacgccggaagcagtagcattcatgcctgaacagattgttgaaatcaccacgccgggtctgcatctcgccaaggaacggggctttttgcaaatcagggacaaggacggtctcatcggacaggtttcgctggacgatatccttgcagtgattgtcagcgtacaaggctgttccatctcgaccgtcctcatggatcaattcagccaacgcaacatcatgctggtagtatgcgggaaaaattttcttcccagttctcttattctgccagttgccggctatgggcggcaattccaggtaatgcgagcgcaggtaaacttgtcggaacctcgccggaaacgcgcttggcagaagatcgtccgtgccaaaatccgcaaccaagccgacttactcacccatgccggaaaaaatagccgccagcttgtcaggttaatggaaatggtaaaatccggcgatcctgaaaattgcgaggcacaggcagcacgtgtctactggcaacggctattcggcaatgacttccggcgcgaccaccaagcaataggcttgaacgcggcactgaattacatttatgccgtaatacgggcatgcgtggctcgtggggtgagcgcagctggcctgcatcctagtttcagcctatgtcataagaacccacaaaacccgctgaaccttgttgatgatctcgtagaacccttccggccgattgccgactatcttgtatggcagagcgatgccagccgctttcaggacctctcgccggcaataaaggcaagcctctcagcaatcaccacgctggtgcttcccctaagagaagaggcttctcccctgtcattggcagcagtaaaggtctgtcgttcattcgccagttactgtcttggcgaagcagacgagttgttgttgcccgcgctacccgcgacgctagacatttcagccccatgaagcgccgggagcacctcagcccttatcgtatcatgtggctctttgtgatgtttgatctgcccgtgggcaccgaacaggaaaggaagcaggcgacgggttttcgcaacagcctgcttgatctcggttttgaaatgtcacaattttcggtttatttgaaatattgcgcctccggcgagaaagctgaatccgttggcagtcgtatccagcaccggataccgtctggtgggaaagtagatattctgacgattaccgacaagcaattcgcaaacatgaaacgattttatgctacaggacaaactaaaaaagacggaaaggttactcaactgcatttgttttgaaggagttttctctgcagtctgtagagaaaactccttcaaacataaggccttacaatggacccagtctagcacatgggaataggcggtgctaagacaactgatgtcttccaagggcacgccgccgtagcagtctagcacatgggaataggcggtgctaagacaacgatgcctggacgaatgaagaagtgattgtcagtctagcacatgggaataggcggtgctaagacaacattaaaagcagtgtgtggttgctgtgatttagtctagcacatgggaataggcggtgctaagacaacagaattgaccgccccgaaaggccgttcctataatcccgcacccgtttccacgtcgcaagaacgaaagtgatgacgacttctctcccagccattcacacggcgtcggttattggagcgggggcctggggcgccacgcttgctcgcgactcggcattcggtcatcttcgtcatgacagtaaccaatcctcaatcggcatggacaggaaggtttccacggcaagcccgtcgccgcccacgagcagttttctggtcggctgaaacgcttgggcaaaagcggtcattcccggcagggcgggacgcgcgtgtccgctcttcacttcgatcgccacgatgcgcttgcccgcccgcacgacgaaatccacctcacggttgcggtcccgccaataaaagacctgacacgctccgccagccgatgcgttgaccaagtgggcacccacggcggattccaccagtcttccccagaactcgcggtttgcgcgcgcttcggccagggtcatcccggactgggccgtcatcagcgccgtgttgaacacctgaagcttcgggctcgatcctcgttgccgtgccgctgagccagcatacttttgcagaccggtcagcatccctgcacccgctaacagttcaaggtagtgggccaacgttgtggtgttgcccgagtcctgaagttgccccaccatcttggtataagacaagatctgccccgaatagacgcaaccaagttcgaacagacggcgtagaagcgcgggcttatccacacgggatagtaacaggacatcacgagcaatagtcgtttcgataagcgagtctcgaatatagcgggaccagcgggccggttgtcttgtcaacggttcggcaccggggtacgcgccgtaaaaaatgtacgtgtccagcgtccaaccaaacgcttctcgcatctcagggaaactccagtgcggcaggtatagaatctcgaaccggcctgccaagctctcggtcaacccgcgctggatcaggagcggggccgaacccagcagcaccactttcagcggcctgcggaaacgggtatcttcgtcccacaggcgcttgacggtttctgaccagcgcgggaccttctgtatttcatccaggaccagaagcgcaccttcttttcccgccttcgcggccagcaatcgcgcagcctcccactggacttctatccagtcgaagccccgtaacgtcggctcgtccgcactggcgatgtgatacggtagtccggctttcgccgccacctgtgcaatcagagtgctctttcccacctgtcgcgctccggcgataacttggaggaagcggcgaggttcatcgagacggcgcaacagttcggtggcatgagggcgaatgaattccggtttactcattatagtgagtaattttactcaaacaaactcgtaaaatgcaaattcttcggagaggacgtggtcgacgcaagcgggtatgatgcagacgatggatggttcttgattcgttctctcaagaattgacagtcccggaaggccgttcctataatcccgcacccgtttccactttgcaggaacgaacgcggtgacgacttctctgcctgacattcacacggcgtcggttattggagccggtgcctggggcaccacgctggcccgccatctggtgaaccaggggctcacggtcaagctctgggcctatgaaaaggaggtggtcgggagcatcaatctcaaaggggaaaatgccttgtttttgccgggcgtcacccttcccgaggcgctctcagccacgcattctcttcaggacgcggctgccggcaccggcttgatcgtgctggccgtgccttctcatgccatgcgaccggtgatccgggaattgacaccctctctgtccgagcctcttccgattgtcgtggcatcgaaggggattgaagaagagtcgaatcaattgatgtcccaggtgctcaacgaactgctgcctcccgactgggccagaaagatcaccgtccttacggggcccagctttgccgctgaagtgagccgggacaaacccacgaccattctgttggccggtcaggattccggcctcacgactcacctgcaaatggcgctcatgtccgcatccttccgggtgtacaccggaacggatatgatcggggcgcaattgggaggagcgctcaagaacgtcatggccattgcggccggcgtggtggatggcctggacttggggctgaatgccagggccgcgctgatcacacgcggattggccgaggtgattcgactgggtgtcgcgctcggggccgacgtgcatacgttctatggcctttcagggttgggggacctggtattgacctgcacgggcgccttgagtcgcaaccatgccgtgggcctgcaattgggccggggccggcggttggaggatattctgaacgacaccgtcacggtggccgaaggcgttcggaccaccaaagccgccatggcgttggctcaacgggttcaggtggacatgccgattgtccaaggcgtccacgcgatgttgttcgacggcacaccgcccaaacagatcgtcgctgatctgatgtcacgatcggccaaagaagaaaccccgttttcgagttccggcccctccggctgacctcttcaccaccatgcacccttcgactctcaaatctctcctgcggtcggttcaaaccggatcgacctcgattgcgaatgcgcttgaacaactgcgcacccttccctatgaagacctgggctttgccaaactggatcaccatcgcacgctccgccacggctcaccggaggtgattctttgcgaagggaagaccgagaagcagatcgtcacgctgacccggggcctgctcaaacacaaacagccggtgctcgcgacacgcgccgatgcctccgtcgcgcgtgcgctcaaacgagtgagccggaaagccgtgtatcatcaggtcgcgcgagtcgtggtcattcagcaatccactcccaagcccttgcagggtgacatcgtgatcgtgaccgccggcaccgcggacatcccggttgcggaagaatccaaagtgactgccatgacgatggggagcgccgtagagacgattttcgacgtaggggtggccggggtccaccggttgttcgatcaggtcgaacgtctccaccgcgcgcgcgtagtgattgtcgtcgcgggcatggacggcgtcctgcccagcgtggtggccggtctggtgcagaccccgctcattgccgtgcccaccagcaggggctacggcgcgcacttcggggggcttgcctctctacttacgatgttgaatacgtgttccggtgggatcggcgtggtgaatatcgacaacggattcggagccgggcatctggcgcatcgcatcaacaccctggtcgaccgcccgtaatcgccgttggttcacggcacaactttcccggcgtccgcgccattgtccggttgacccttcgcactggcatctttgccttcctcttgcaagagatcgggacccgtttcatccgaaacgaacggcacgtgttccaaatgcggaggttgcttggcgagggcttgaggggaagacacgtccagcgttcctctcgcaaacggcgagacgattttggccttggtatatccttcctcacgggccatcaacttggctcgggcctcataagaatacgtgccttgacgcacgtgctgccgggtctggtctttcccgtcccagagcagagtggttttcacgtgaggtttgccgttctcgatgatgaccgcgttcagaggttgccggctcaccaggaatcgaatggagcgccgcgtcggcacactgatgagggaagagacttcgagcagatcgaactggtccagattcttcggcaactctacggtcacagtgaaggccatgtgcccatgccccggagcaaaaggcacgggtgaggtcgtgatgtccacgatcttgagtggaggcttgtaggccggctttttccgtttggcatccaatgccgccggcgccagcccaaaagccagaagcgtgatcagggtcatgaaggtcaggcgagaggggatcatgggaatttttgattgcggacttttgattttggattgctgattattgattgaggactgctgatttcggagtgtgaattgacaatccacaatccacattccacaattcgccacgtgcttacataccgtgacgcgggtatcgcgtcaagcgtcttttcacctgtacgtgacatgaagggtcgtcatgcatcttcactttgattgtttttccggcatcagcggggacatgacgttgggggccctcgtggacgtcgggctttcgccgagagcccttcgacaaggcctcaaggcgcttccgcttaccggatatcgtctcaaagtctcgaaagtccaccgcggaccgatccacgcgacgaaagtggatgtcctcatccccaagatcgcggagaaacgtcgctcctggccgcaaatccgacggcttctgactgcgagccgtctgccgcccaacgtcaaaaaacaggcgctgacagtcttcgaacgcctggccacgtcagaaggaaccgtgcatggccaggatcccgccactgtctcgtttcatgaagtcggggcgatcgatgccctggtcgatattgtgggtgggctgctcggatgtcatgaactgggggtgaagaccttcagtgcgacgcccgtcaacgtcgggtcgggtacgatcgacagtgcccatggtcttctgccggttcccggacccgcggtggccgaattggcaaaggggcaccccatttattcccaagggccggccatggaattgaccactccgaccggcatggccttgctcaccaccctgactcaaacctttgccccgcttccgctcgtggtgcccggcgcggtcgggtacggagcaggcacggcccatccgcccgactggccgaacgtgttgcgcgtgtttcttggcactcctgacctcacaccttcctctgggggagagggcgttgatgcggaccaggttatccagttggaaacgaacattgacgatatgaaccctcaactctatgaagcggtcatggaacgcctgttcgagcgcggcgcccttgacgtcagcttgaccccgaccatcatgaagcgcaaccggccggggatcatcatgacggtcctggcccaccccgagcaggccgggctgctgaccgaactgctttttcgtgaaacgacgactctcggggtacggagccggctcgtcaaccggaccacgctgtcccggtcgatgcagacgatccgcctgccgcaaggccgcgtccgggtgaaaaccgttcgcgtgggcaacaccgtcaaattccggccggaatttcaggactgccaagcgatcgccaaaaaaaccggcctcccggttcaggagatcatcgaacaggtgatgcaagctgtcagtgaaaggggccggcgttcgtaactcatgccgaatcgcccgacacgacaacgacccttgctcgccgtgaccatgggcgacgcggcagggatcggccccgaggtgatcgtcaaggccctggcgtctccagtggtgtggcgcgcgtgtcgtcccatcgtgatcggatccgtgccggttctccaacaggaaacccggcgtttgtcctcttccctcacggtgacccccttgcaggaggaccacggatgggggccggtcattcgcaggggacgtattccggttttcgatcctttgaaaactccgttgggtcgcgttcgcgcaggtcaacccgccaagggccctggaacggcttcggtcgagttcatcaaaacggcggtgcagtgggcagagaccggctgtgtctcggggatggtcacggctcccatcaataaagagtcccttcaccttgccgggtatccctttcccgggcatacggaactcctggccgctctgacgggtacgaagcaggtcgggatgatgttgctgggcgggccattgaaaattctgttcgtgacgacgcacttggcgctcagagacgttccggataccttgacaaccccacgcgtgtttcaggccattcgactcgcgcatcgcgccatgaaagaccatttcaggatcccgaagccccggatcggcgtggcagccctcaatccccacgcgggcgagcacgggttgtttggcctggaagagcaggattgcattgcgccggccgttcgtcttgccaggcgagcccgcattcaagcttcagtccctcttccggccgatacgctgtttggcgccgcggtccgcggagcgtatgacgtggtcgtggccatgtatcacgatcaggggctgatccctctcaagaccgtggcgttcggtcgttgcgtcaacctcacggtcgggttgccgatcattcgcacctcggtcgatcacggcacggcctatgacatcgtcggaaaaggcaaggccgatccccaaagccttgtggaagccatcaagttggcgagccgactgagcgccaccaggggacgagtgcggaacatttcttaatctcggcggcgctcacccttcaccaacactgctgaaatggaggaaggactatggcacgtgaatatagaattgaggttgtggtcgaaggcgtcatcgggagcctgttgttcggggccagtaaactcccggttgaaatgatggaagaacggatgaacgaactcggccggcagggatgggagatgacctttatggtcattgaaaagaaacggcttttcctgttttgggaacgcgaagcggccattatcacgttttcccgtcctttctaatcctatgcgatggtgaagcgtattcatgacttccccacaatcttcctctgcccggcataaagcgtccggccggctgctggcccttcaaaccctcctcgccgtcgaacggcaagactgctttgccgatgatgcatttaccaggttcgccgcgcacgcgaacctgtcgcacgaagaccaggccctggcgtttgaactcgtgtacggggtgctccgccaccgggccacgctggattggcaattgaacgccgtggcgagtcgtcccgttcaccggttgccgaaagtcgtgaccgccatcctgcgactcggcgcttatcaaatgcggtatttggatcgcatcccggtatccgccgcggtgagcgaatccgtcaaactggccaaaggggtcaagggccgggactggagcggcgtggtgaacggcattcttcggaatttggacaggacggaaatcgaatggccggaaatggctcaggaccccgtgaacggtttgtccgtcacgtattcctgcccgaactggctgactcgacgctggatcgaccgatggggtttcgaggcggcggaagcgatgtgccggcacaccctcaccatcccacccctgacgttgcgaaccaacacgctccgttgttctcgcgagcaactcgaagccaagcttggtgaagaagggtatacggtgtcccggacaccgggcagcccccaggggctcatcctggagaaatgcgggtcgctgcaggccttgcccgcattacaggagggctggtgttacgtcgaggatgaggccgcccagttggtgcccctgctgctggacgtcaagcccgggcatcggatcctggacgcgtgtgcggcccccggaggcaaatgttcacatatcgccgcgttgatacaggaccagggggaaatcgtggcaaccgatccggaaccccggcgcctgaaacgcctggaatcgaacctgcacaccttggggatcacgtgcgtggaaacggttgagatctccggcgaggacgcctttgcctcgtcaacgtttcacgatacctggagccggacggggttcgatcggattctggtcgatgcgccctgttcaggcttaggtgtgctccgccgccatcctgaagcgaaatggcagaagaccgactcgcaactcgaccggcacggagaacgccaatccggcatcctggcacaggtggctcgtcacttgagaccgggcggagtcttggtctatagtgcgtgctcaacggagcctgaggaaaccacacaggttgttgctcgtttttgcctggaccacccggaatttagccatgagtcgtcggcaggttggcttcctccccatgcgccatccctgacgaacccggacggcgatttcctcacgtccggtttccatgacaatatggatgggttttttgccgcacgacttcgacgaacgtagaagatgagttccacgaccatacacattgctccttcgattctctccgccgactttgcgcacctggcggacgaaatcgccgcggtggaagctgccggtgccgacctgctgcacgtggacgtgatggacggacacttcgtgccgaacctgacgatcgggcctcccattgtcgaatcgctacgaaaagtgaccgccctcccgctggacgttcatctcatggtgacgaatccggatgcctgcattcccgactttgcccaggccggcgccaactatctcacggtgcatacggaaacctgtccccatttgcaccgcaccatt

SEQ ID NO: 482 - DNA, 16309 bp, synthetic construct
  misc_feature 1..16309: note = Synthetic
  source 1..16309: mol_type = other DNA
ccacctcggcctgagccatcgggaagtgttggccgaattggaaaaacgatttaacatgtcgggtcacgaagagaaatcttcacgaaagcaatgattttcggccggacagccttatcgtccgtccggaatggaggtgtagcatgggtatcggcggaataggcatctggcaattactcattattctgttgatcgtggtgatgctgtttggcacgaagaaacttcgcaccctcggctccgaccttggcggcgcgttgcggggcttccgcagcgcaatgaaggatgacgacgagggcaagaaggacgagatcgaggaccaaaccgaaaccgccggcgccgagactgtcagcgccgcatccgaaaccgcagaaaacaagtagcgccctgtttcaccgctccggcgcggggcttgtaaatgcccagtattcattctactgaactgctgctgatcctggtggtcgcattgctggtcatcggaccggagcggctgcctgcgaccattcgcaccgtgagcttgtggctgggccgcttccggcgcagtttctacaaggtcaaggccgagatcgagcgcgaaatcaacgccgatgaagtgcgccggcaattgcataacgagtcggtgctggcggatatccgagacacgaaatccgaagtgacgaaggcagccggcgaggcgcgcgattcggtcaacaagatcgtcaactcgaaggacttcgatcccggcgcctcggccgcgaccgaagaacagttgcggaacgccgcggcggaacgcgaagccgccgtgaccggcgcgggagcggacaaggagaattccgattccggacagccggaggctgcaactgcggaaaaagaggaaatcgcgagcgcccccgatcccgagccaccccccgcggaagcggcgcaaccgtcgccggcaggcgagtccggcagatgacctcggctgaagacgaaaaagagctgaccctgatcgaccacctggtcgaattgcgcgatcggatcatgaagtccctgatcgccgtggtggtgctgttcctggccctgttttatttcgccaacgatatctacacctatgtcgccgccccgatggtctccgcgctgccggaaggctcgaccatgatcgcggtcgatccgacctcgccctttttcgcgccgttcaaattgaccttctacgtcgcgttgatgatcgcgatgccctacgtgctctaccagatgtggtccttcatcgcgccgggcttgtacaagaacgagaagaagctggccatacccctgttcatttccagcgtcgtgctgttctattcgggcatcgctttcgcgcgttacgtgctgttcggcatcgtgttccgcttcttcatatccgtggcgcccgaaggcatccaggtggcgcccgacatcagcagctttctcagtttcgccctgaccatattcctcgctttcggtctggctttcgaaatccccatcgccgtatacctcagcatctgggcaggattgacagaaccggaaaccctgtcgaaaaagcgaccttacgtagtggtcggctgcttcgtcgtcgccatgctgctgactccccccgaccctttcacccaatccatgctcgccatacccatgtgggcgctgttcgaagtgggcatcgtcgccggcaagatggcgcgcagacgccagcaggagcaggaagccgaagaagaacacgccacctgacaatatccggatttcgggcgcctagcggagaatgaagcttaccggcccgtcgttttccagggagacttgcatgttggcggcgaagacgccgctttgggttgcggggtggcgttcggttgagatctttaccatttgagcgaacaaccgctcggcttcggccggcgccttggcgccggagaaaccggggcgcaggcccttgctggtgctggcggcgagcgtgaactgggaaacgagcagaagttcgcctgatatcgtcttgaggtccaggttcatcctgccttcggcgtcggcgaatacgcggtaggaaagcaggcggtcgaccatgcggccgatgccggcctcatcgtcctctcgttcgaacccgaccaaggccagcagacccttgccgatttcggcatggatttcgccttcgatgcgtatacgagcccagttgacgcgctggatgaggacgatcatcgctcgtgtcggccgcgggggctaactgaccggcgacaggtcgcggccgatttcgtccgtcgcctttatcagacagtctgtaatcgccggttcgccggcggaatggccggcctcgcggacgatgagcaattccgagcccggccagtgtcgatgcagggtagtggcgttgtcgagcgggcagagcatgtcgtagcggccgtgaatgatgtggccgggtatgtcggcaagccgttccatgttgtcgagaatctggttctcggcgatgaatcccttgtttacgaagtaatgcgcttcgatgcgcgccagcgccagagcccgatggggggaggtaaagcgagccactccggcggggtcgagccgcaaggtggcgcaacttgcttcccaggtcgcccaggccttggccgcgcccatgcgcgccagttcgtcgtcgccggtcaggcgttcgtaataggcttcgagcaggcaatggcgctcttcttccgggatgggtttcaggaaatcctcccaaccatcggcgaaaacgcggttggtcccgtcccggtacacccagtcgaggtcgcgctgacggcacaggaagatgccgcgcagcaccagggtcatcacgcgctgcggatgcgcctgggcgtaaagcaggctcagggtcgaaccccaggagccgccgaacaggacccattgctcgattcccagatgcgtgcggatcttctccatgtcggcgatcagctcgcccgtatcgttctcgcgcaattccccgtggggggtcgagcggccgcaaccgcgctggtcgaaggtgacgatgcgatagagttcgggatcgtagaaacggcgcgaattgccgtcgcaggcgccgccggggccgccgtggacgaacaggatgggaatgccgtcgggattgcccgcctcgtccaggtagagttcgtgcaggtttgaaaccttgaggctatgcctccggtagggcttcagttcgggaaatagcgtcagcacttgccggtccgttttcgtcgcttacgccatgttagggcaattcgggccgcaatcgccacaaacgggcgaaaattgatggtaggggaaccggtcgggtcaatcgggatcgagcaccgcgacgttgtcgaaaccggagtccatcaggtgggcggcgtgcaggcggctgatcatgccgcgttcgcaatacagcaggtagcgcgggccccggtcgagtttttcgaagtctccgcgcaggcggtaaaaggggatatgcagcaattgctcacccgccgcttcccgcagcgccggcggccgcgccccctgctcggattcatggcggatatcgatgacgatgtcctccggtccgggttccgaagtcacggtgatctcgtcggtcctgccgccttcgtcgcccccgctttcaaaaaaggcaatttcggtgatgagttggatcgaggcgttggcgagagccgcgtcgagcacggcgaaatcgaaacgggattcctcgcgttcgatacgccccggccgcgctttcgtcgtcggcttgtccgagatcaccgcgcaatattcgggaatgtgccgggagaattcctcggtgccgatggtgcgggccaggtcgatgatctgctgtttgtccgttgtcgccagcgggcgcaacacgagattgccggcgacactgtcgatgaccgagaggttggtcagggtctggctggaaacctgggccacgctttcgccggtcaccagcgcttcggcgccgacctcgccggcgatgcggtcggcggcgcgcaacatcatgcgcttgagcacgactcccatctgcgagttctcgaccttttcgaggatctcccgaaccacgtcttcgaacggcacggtgacgaatttcacccgatgcgaagcgtgatatttcatccacaggtacagcgccaactcctgcaccgccaggcgatgggtgtcccctcccaggttgaagaagcagaaatgcgtctgcaagccgcggcgcatggtcagaaaactcgaaaccgccgaatcgaatccgcccgaaatcagcgacagcgccgaaccctgtccgcccaggggaaatccgccgagccccgggcgccgatgcaacacgacatggaactcctcatgcctgatttcgagcgggaccagcacttccggcgcgcccagatcgactccggcggactcggtaagccgcttgagcccggcgccgacgaaggtctcgacatcgaccgaacgaaaggcatgcctgccgctgcgtttgcaacgcacggcaaaagtcttgccgcgcaattgctcgccgtaatgctccatggccagctccagcatgccttcgaaatcgggcagcggatatttcctgacctcgagaatggaggcgattccggggatgtggcgcaacttgtcgagtacttccgggccgtcagcggcgcagtcgatttcgacttcgatgacgtcccattcgccgctgacgcgcaactgatcctcgaatgcctgcaagaccgacctgatgttcttgcgcaacagccggacaagccggcggcgaacggcgcggctcttgatggtgatctcgggaaacagtttgaccaggaacaacattgcgactagcgaaacgtcctcgtttgccgttcggaagctttgccccgaaacagagcgcttgattcggaaaaacttagaaatcgcaccggaatggtgctaatatccgccgcaacgcacaagtttggtgcattgcaggcgcctgattccgagaaattgaaccaaaaacgggctttcgacggctgccgaatggtggcacatatcttgctgcttttcttgctgcctgaaagggtcaacgtaagacacaacccggaaccacggtaaacccatgataaccgaaggggccggcggtctggcggctcagcaatccataaacgaggagatagttggaaaatgaaatcgaaactggaatacatctggcttgacggctacacacccacgcagaatctgcgcagcaagaccatggtgcgggaggacttcgacggcaagctggaaagttgtccccagtggtcgttcgacggcagttccaccttgcaagccagcggagacgattcggattgccttctggagccggtagcgatcatccccgaccctgaccgggccgatggttacctggtcatgtgcgaggtattgaacgccgatggcagcccgcaccgctcaaacggccgcgcgaccatcgacgacgatgacgacgacttctggttcggcttcgaacaggagtattttctgtgggatcccgcgaccaatgcgcctccgggatttcccgccggcggctacccgggaccccaaggcctctattactgctccgtcggcgcgctcaactgtcatggccgcgaagtcgtggacgaacatctcgacctctcgctcgaagccggcatcaacgtggaaggcatcaacgccgaagttgccgcggggcaatgggagttccaggtattctccaagggcgccaagcgcgccggcgacgaaacctggctttgccgttatctgctcgagcgcacggccgagcggcacggactcgcgatcaactgggagcccaagcctcttggcagagagctcgactggaacggttccggcatgcacgccaatttctccaatgaaaccatgcgtgaagccggagacgaggaagtattcacgaagatctgcgaaaacttcggcaagaatatcgatcgccacatttccgtatatggcgccggcaacgatcagcgcctgaccggcctgcacgaaacccaggcaatcgatgtattcaactacggcatttccgaccggggcgcgtcgatccggattccggtggccacgatccaggcgggctggaagggaagactcgaagaccgccgcacggcgtccaacgccgacccgtacaaggtcgccgcggcaatcatcaagacgaccaaggaagcgctggccgcttaaggcgtttggcgggtccggcgccagccgggcccgcccggtcgcgccttgcgcgggatatacctgtggaagggcgaatcgattacaggcggctgctggacagcctgaacacggcggtgctgctgctggatgagggtctgcacatccgcatggtcaatccggccgcggaagacctgatggcgatgagttcccgcaaggccgccgggctcttcctcggcgaggtattcgtgaacggcgcggaagatatcgaagcaatgcacgaagccatgcgcgagcgtaacggctttaccaagcggctcgcgcaactgcatctgtcccatggcaaaacggtggaactcgactactcgatcacgcctgtcgatctcgacggggaaccgctcgccctgctcgaaatgaactccctggaatactcccagcgcatcaatcgggaccagttgttcagttccacgcaggagactacccaggaactcgtgcgcggcctcgcccacgagatcaagaatccgctcggcgggctgcgcggcgcggcccagttgctggcgcgggaactgccgaacgcggaactgattgactataccaatgtcatcatcgacgaagccgaccgcctgcgtaacctggtcgaccgcctgaccggctaccgcaaaccgcttgagcttcgcagcatcaacattcacgaggtggtcgaacacgtgcgcaacctggtcgaagccgaaatcgacggccgcggcatccatctgatcagggactacgatcccagcattccgccgctgacggcggatcccgaacaactcatccaggccatgctcaatatcgtgcgcaacgccatgcaatcgctgtcgagcccggacgtgaaacacgacctcggcacgattaccttgcgcacgcgcgcgatacgcaaggtgaccttcggtccgcgctcgcgccagcccgcgatttcgatcgaagtcatcgataacggcccgggcattccggagcatctgcgcgaggccatcttcttccccatggtgaccagccgccctgaaggcacggggctcggtctcgcgatagcgcacagcatcgtcagccgccatcacggactgctcgaatgcgaaagcgaaaaggggcgcacctgtttccgcctgctattgccccgtggttcaacaaagagccgacgtgaggcgcaggccgacagccggggagaaacaagctcatgaacccggcccaatccgtctggattctcgatgacgaccgctcgatccgctgggtgctggaaaaatccctgaacaccgcgggcctcgacaccgtgagtttcgacaatggcgaggaactgctgcgccgcctgcgtcacagcatgcccgacgtcatcatcagcgatatccgcatgcccggaatcagcggcctggaactgctgtccgcggtcaaatcgacgcatcccgaactgcccgtgatcatcatgaccgcgcattcggacctcgacagcgcggtgacgtcctacagccgcggcgcattcgaatacctgcccaagcccttcgatatcgaagacgccgtcgcggtcacccggcgggcgctcggacacgccagggagaaagaggaagaagccgcggcccgcggcggacaggcggaaccggtacaggaaatcatcggcgaagcgcccgcgatgcaggaggtgttccgcgccatcggccggctgtctcattccaatatttcggttctgatcaacggcgagtccggcacgggcaaggaactcgtggcgcgcgccttgcatcagcatagcccccgcggcgacaagccgttcgtacccttgaacgtggccgccattccggcggacctgatcgaatcggaactgtttgggcacgaaaaaggcgctttcaccggcgccacccagcaacgcacgggccgattcgagcaggccaacggcggcgccctgtttctcgacgaaatcggcgacatgccgccggacacacagacccggctgttacgcgtgctgtctgaaggcgagttttatcgcgtcggaggccatacttcggtgaaggtagacgtgcgcatcattgccgccacgcaccagaacctggaagacctggtgcgcaagcaccgcttccgggaagacctgttccaccgcctgaacgtgatccgcattcatgtgccgaaactgagcgaaaggcgtgaggacattccgcggctggcgcggcatttcctcggccgggcggcgaccgagctcgacgtgccggccaaggtgctgcggcccgagaccgggcaatatctgcaaggcctgagctggccgggcaacgtgcggcaactggagaatttctgccgctggatcacggtcatggcctcggggcgcgaggtgcacatcaccgatctgccgcctgaattcgcggaacagcgcgaacagccgggggcggcgcgcaattggactcaggcgctcaaatcctgggccgacgagcagatcaagcagggcaatacgggcatcctggacgaagcgactccggagttcgagcgcgcgatgatcgacatcgccctgaaacacacggccgggcgcaagcaggacgcggcgctgctgctaggctggggccgcaacaccctcacccgcaagatccatgaactcggttccgggtaagggccgactggttattgtgtagtcgccggagcttctccggctccgttcccgccggactgcgcgccgggctgttgttccgcctgccgccgtttttgttcggcgtagactgcgtcgaagtttatcggcgcgagcatgagcggagggaaactgcccttggtgacgatggaatcgatggcttccctggcgtagggaaaaagaatattcgggcaaagcgaagacagtatctgctccagttgctgagactccatgttggcgcaggcgaagatgcccgcctgctgcacttcgaccaggaacgccgtttcttcctcgaccttggcttcgacagtcagggtgagaattacctcataggtgttttcctggaaattctgggagcggcttttcacttcgaaattgatgttcggactccattgtccggtgaagacgccggggctgcgcggcgattcgaatgaaaaatccttcaggtaaatgcgctgcaaggcgaactgcggagcgttgggatccgcctgtggctgctgctgcgccgccgcctctggcggcgccgcttcctggtcgttctgttcgctttgctcgttctgttcgttctcagccatgatagctccatgttgaacggcggcgggctcgcacccggacgaccgttatttctgaataagcggaaaggaccgcgcggtccactccgaaatgccgccggccagtttggcgacgttgccgtgcccggcctcctcgatgctcttgaccgcggcgccagactgctggcccatcttgcagacgaccagcttgggcttgtccttgtgcttgttcaattcggccatgcgctgtttgagtttcgccagcggaatattgatcgcgccggcgatatggccctgatcgaattccttgcggtccctcacgtcgacaacgacggcgccctcgcggttgatcatcatgactgcctgctgcgggccgatcgagcgggaagcggcgcgcgaatgataaacgataatggccagcagggtaactacccacatgcccgacagaatcgggtgattgcctatgaattcaatgaattgcgccattcgggaaacggtttgccgacgggtctgggcagcgaaagaccgggccttgagaaacgggcaggaagtatacacttcccttggcgcatccggtagcagctgccgctgccgctgatgccgatgtgctggcgccgatgcgttcagatgtcattctgcgcggagcgaagcgcagtgacgcggggcatccatgcccctcgcccctgcggggcggcgctgtgcgccgtccaaaatggcaatcctgccattttgtcgcagaatccgcggagcatttggcaatttcgggcaagtgagtggatactacgcacctatcgcttgaatgaactggaacgaactgcgaatggataaaaagaagtatcggcttggcttggacgtgggcacgaatagcctgggctggagcgtgttggagttggattccgattcccaaccccgcgccatcgtggcggctggctcccggatttttgcggagggcagggaagcgaagacaaaggcaactttggccgccacccggcgggaggcaaggtcggcgcggcggcggcgcgaccggttcaagcagcggcaaacattcttgctgagcgaactggtcaatgccggcttgttcccggaagctcccggcgaccgacaggagttgcaaaagcgaaatcccctgcaactgcgctccgatgcgctgaagaggcagttgcaaccctgggaggtcggacgcgctttgttccacctcaaccaacgcagaggcttcaagagcaatcgaaaagaccaaagtgaggaaaccaaaaacggagtcgtctcgcgttcggcgcgactgctgcttgaggaaatggggctgattggacctgagctagacaacgaagagtacaagaagttgtcgccggcagagaaaaaacgtatccgcggagacgaggcgcggacgcgcaaggaggcattggagaaactaaacgaacggaaggatttgagctatggctcgtttctttatcaaagacagcttcgcggcgagcgcacgcgcgcccgcccaggcgccgcccgcgacgacaaactctacgatgtatacccgacccgcgaattgtacgaggacgaatttcagaaaatctggcagtcccaggcggcatttcatccggaattgatgactgtcgccgcgaaagagagaatccacagggcaattttccaccaaaggccgctcaagccgcagaagcgcgggatatgcgcctatatgcaggatgaacaccgcacttttcgcgccttgcccagttttcagcgctatcgcatccatcaggaggtcaacagcctggaatggtggtatctcggcgagatcaaaaaggtgcgcgactatcccgaagcaagggatgaaatcgtccacttgctggaaaacgtttccaccgcaaacgggcaagtaacttttggcataatgaaaaacgtgttgaaacgtttgcgtatcgcagagggcgttttcaagttcaactttgaaacagaaaaaagaaagggattcgatgggaattcgaccagcaaattgatgagccacgaggacaggattggacccacatggcacgattggccgcttgaaaaacaggatgaattcatcgataccatcctgaatggaacaccgcaacaccaggaacgcgaccgcaacaggttggctggaattgagccgacttcctcgccggacggagcgaaagacgatgtggaggttcgcgcctatctgtgtgaacgattcaaactgcccgagcacattgcggataactgcgtaaattcacggctaaaggacgatacagccagcatttcgttgcgggcggcgacgctcatgcttgcaaagatgcgggatggtttgatcgatgccgaaacgggggaagtattcctgccgctgcaaagcgaagccgcctccgccgtggcgcgggaagagcagaatttcgtcgatccgtttcgaagcaaaggcgatgacgggaaataccggttgctcgaaaagttgccttattacggcgaagctttccgggacggcaggcacattattcccggtacggggaatcctgaagacgacgacaagacccgctggggcggagtaaccaatccgacagtgcatatcgcgctgaatcagatcaggttggtcgtaaacgagttgatagaacgttttggccgtcccgagtccatagctatcgaattgggcagaaacctgcctttgggggcccagaagcgcagggaaatcgaaaaggaacaatcggataatcaggccagaaacgagtcatttgacaaaaaactccgggaactgggtcagaagccaaacgcggaaaacagattgcgcttgtttttatggcatgaattgagcgatgacccgaacggtcgctgttgtcctttttccggccaaacgataggaatcgccgacctgttcggcggcaatgtcgagattgagcatctgatacctttcagccgttcgctggacgacagccgggccaacaagatcgtctgtacgcgcgacgcaaaccgattcaagggaaatcgcacaccgttcgaagcgttcggcgacagtccggcgggatacgattggtccgagattgccgcgcgggccgaagccttgccttcgtccaaaggctggcgcttcaaaccggacgcctgggaaatctggcggcaaggcgcggacggcgatttcacgaaccggcacttgaacgatacccgctatatcggtcgcctgacacgcgaatacctggagacaatttgccatgtggacaggatcgacatcgtcaccggccggctgaccagcctgctgcgccgccattgggggctcaacagcgttttggacgatggttccgaccgcaagaatcgcgacgaccatcgtcaccacgccgtggatgccattgtggttggcatgacaagccaaccattattgcaaacggtcgccgcaaaggcgaaagaacttgaatcttgcgagatcgaccccgccagcaatctcaatcggtttttcgcccctgttgacggccacagaaatgctatcgatccgtggagtggattcagaaacgatgttgcggaagttgtttcgcgaatcgtcgtttcgcacaaggtgagacgcaagagtctctatcagcgtaccactgacggccagttgcacaacgatacggcctacggattggtattgaacgaagacggtttgtggacaggagaagttgtttcgcgaaaaccgatagccgacttcaaaaaattaaaggacattaagtccattagagattcacggctcaaagaaattttcaaggcaaggtttgaagccgccgaaaaaaatgacccaggttcggggccgaaggctgtccaggacttggcaaagaaaaagaaattgaatatccaacgcttgcgccatattgaaaagttgagcgtcattaagataacagacagattcgacaatgcctacaaggcatacaagggcgacagcaactggggcattgaaatcttttcttggccgaccgggcaaaaaaaggctggcaaatgggaaggcgtcatggtctcccgtttcgatgcgcaccagaatagattcaagcctggcgagactttcagaccccatccggcggcgcgtctgataatgcgcctgcggatcaatgattgcgttgaaatgctagtggcaaaggagagagaggagaggagaatttaccgacttcaaaaggtttcgaaaggtcgaatgacctttgcggaagttcacgaagccaatgtggactcaagaaaccgagataaagaagagcaattcaactacacaacaatcgctacgggttccctgcaatcgcgcaaggccagaaaagttcatatcagccccacgggtttggtaagtttcgagcaacgtcacccgactcgccaaaccggatagcggttgggaaaccattgagatggccacgacaagaaacgacaagctggcggggctgttcgtgaatccgttcaggcccggctacggccagcgtccgccgcatctcgccggacgcaagaacgagatttacgacatcttcaagcatgtcggcgccacggcgaacggcgaattggtcgcccgggacgtggtgatatacggcccgagaggctcgggcaaaacagcattgctgcgcgtggtcggcgaggagcttgaaaagcttggagtaaacgcaacgctggaactcatgacggcgaccgacatgcaaagcgcggaggatgcccgccgggaactaatcggagtcgtgggccaaccgctgtgggaagcgctgaaaccccaagagtggggcctggactggcgcggagtgcaggcaaagtggcagcggggcgagctttcgagaagcgaggtgcgcaagggcctggtggcgaagtgcaaaagcaaacccctgatacttttaatcgacgaagcgcacctgatgtcacctggcgcctgcggcgaactgctcaatgaagtgttgacaatcagaggcaggggcggtccggtcatcgtcgtattggctggcaagccgaaattggcggaactgggcaatctctccgaggtatcgttcctggaacgaggcgaaatcatgagcctcggcctgctcgacgaacaaagctcgggcgacgcggtgcgaataccgttgggcgaaactggcatcgggatttcggaaacggcattgcgtcgagtagtagatgactgtcagggctaccctcagttcctgcagttgtggggcagcgccttgtggcgaagagccagcgaatccggcacaaacaggttagacgactcggatgtctccgaggtcgagccggcgatgaggctggagcgggaagaaatataccttggcagattcgctggctggaaaggagcggaccgagaattgctcgtggatactgcaaacgatctggcgcgcaatggatgggtggaaagaccgaaactggaagccatggtgaaaggactcctgattcggcaaaatcgggagcccgatgactgtggggccttggtggaccagatggtggagtccgattttctgtggcggccccgaggccagccgagaatgttgcccgccttgcccagtttcgtctcgtttgttgcaaatcagggaaggtcgagataaagcggctgaaattccgatggttggtcaaattgtggaaataaccgagccgggacattggctgaagaaatcgcgggggtttctgcaagttcacaactcaggagaaatgctcggccaggttccgctggacgacattcaaaccgtgctggtgtcggttccgggttgcgcggtttcgagcgtattgatggatcaactggcgcagcgcgatataccgttggtgatttgcggagaaaactaccttcccagcagttggactttgccgttgcaaggcgcggttcgtcagtttcgggtgatgcgcgcccaggcgcagctttccgagccccggcggaaaagattctggcagaaaatcgtcagggcgaaaatcgccaatcagtcggaggtgttatcgcgggcaggcaagccgtgcggggatttgtcccgtatgatccgcaaagtcaaatcgggcgacccggaaaacgtcgaggcgcaagccgcgcgggcatattggcaacgattgctgggcgaggaatttcgacgcgaccgcgaggcgccgggactcaatgccgcgctgaactacgggtatacgattctgagagcctgtgtcgcacgaggagtttcgggcgccggattgcatccgagctttagcgtacaccacaagaatccgcggaatccgatgaatctggttgacgacctcgttgaaccgttccggcccattgccgattttgtgatttggcagcaaattcaggaatactcgaaagaactgacgaatgaaggcaagttgcgtttggcttccttgtgcacgctacccttgccgactgaagatggcttctcgcctctgtcgcaggtagccgtcaagtcctgccgttcatttgccggatactgtctgggggaaacggttaacgaagttgtgccttcactgccgacaacgctcgattcgatatgaatagcggaatcagcctcagtccctatcgcatcatgtggctattcgtcatgttcgacctgcccgttggcacaagcagagagcgtaagcaggcgactcgttttcgcaatgacttgcttgacctggggtttgagatgtcgcagttttcgatctatctcaagtattgctcttcgggtgaaaaagccgatgcgataagcggcaggattccgcccttgctgccaccgggaggaaaggtcgatgttctgtgcattaccgatcgacagtattcaaatatgcgcagataccacggtcgcagagccaaaaaaaccgatggttcgccgcggcagttgcgcctgttttagccgattctcgtccatgagaatcggtttttccctaataaatcagccagttgcgtcgtcttcagtctaacactcaggaataggtggcgctaagacaactttgtagctgcacttctggaacagcggatgaagtctaacactcaggaataggtggcgctaagacaactgcaaatcgaggcggccgccgacgctgaagagtctaacactcaggaataggtggcgctaagacaaccatccggttaggatttacaacgatatagacagtctaacactcaggaataggtggcgctaagacaaccgcatacgatccagcttctcccggtaactcggctggcgattgcctgaagccggaccgggcc

SEQ ID NO: 483 - DNA, 9696 bp, synthetic construct
  source 1..9696: mol_type = other DNA
  misc_feature 1..9696: note = Synthetic
ccgtaagctatctggcgcattgaggaaagatcggctgtggcgatctcgggtgtttgcatcaaaaacaggatgacggcggggacaaacagtgccacagtcaccttgtcctgttcaatgcttcgcaggatggcgaccggatcgacatcggcatgaatcacattgtatgcaccggcgaacaagcccagaatcgccatgaagattccggcgatgtggtacatcggcatacagaccagattgacctcttcgcgctcccagtcgtaccagccaaagccgtccttctgttgcagtatgtcaaaggttcccgttgcgttcaggtgggttatctcggctcctttggggtgcccggtagtgcctgaggtgtagagttgaatcagtgtatcgccgggttccgtctggcaatttggcgggctatcgctctcggcatcgcacaggccctcgtaatgcagccattcaggatgctcaaagtccgtcgctatgatcgtcttcacacactccaggtcgtctcgaatgctgtcaatcaaccccttgaaggcatcgccgcagaacaggatgggcgcgcgtgagtcgttcaacgtatagagcacttccggcggtgccagccgccagtttacgccgacgggtgccgcccgtaccagtgtgcaggcgaacacgagttcaacgtagcgatgggaattcttgtccatgatggccacgcggtcgcccggctgaacaccgagggcgagcagggcgtttgccagtttggcactgcgttttgccagctcgctgtaagtgattctctcgtcaccgaaggacatggccacctttgtgctttcggtgacgttggggtgacgaatccagtctgcgagggtttcttcctgacccagtttaacgagcatctgttctctcctgtcttattggggtgttttgatttttatcctaccctcagcattgtatataaggaagagacagaacgctgccgaaccctctgttgccaagatcatcctacagaactgatgagtcatgccgggaaaaacgaaatatcgcctgcggtgctcaaggcaacctgtatagtcgattttgcacgagaaggcggacgttaaggaacggaaagtcgggccagctgtgtcagccaaacagccgaacatgctcgatgtcgctacctgggtggaagaccctcgaactcattccaaagcccctacgcgatctcttataggctcgaggatgcctacatccacctgcgcttgaaggcagacccttttcaacgagtgaaccagctataaaaagcaaaggcgagttcgaccagtccctgtgcttttgaaccagccccataaagcaagggggcaacccgaaggtcagccccctgaatgttgtgaatgcacttgttattcgtagcaccacttattccaatcgctgagtataatgattttcccttgatttgcaaggaaggttgctgatggattacaggcttggacttgatgtgggtaccaattcgctgggttgggctgtattggagctggatgagaatggagaaccctgcgccattgccgatgccggctcacgtatctttaacgacggcaggaatgccaaatccaaggcgacgctggccgcgacccgtcaagaaaagcgttcggctcgccgtcgccgcgatcggttcaagcagcggcaaacattcctgctcagtgaactgaccaaagcaggcctgttccccgaagatgagagtgagcgagaggcactcaaaggccttgatccgctcgaattgcgtgccagtgcactcaccgaacccctggctccacatgaaatcgggcgagcattttttcacatcaaccagcgcaggggcttcaagagcaaccgcaaggacaccagtgaagaaaccaccagcggcaaggtagcagattctattcacaagctgctggcggatatggagttgatggagcagaagctcagcaaagaggagtacaaggaactgagcaaagaagagaagaaggaggtccgtggccaaatcattctgggcaagaagcaggcactggaataccttcagaagaatgacctgcttaccttcggcagcttcctctggcagaggcgaaggaataagcaaccaacccgagcgcgaaccggcaacgacaagctgtacgagttttacccgactcgtgaattgctggaggacgaatttcacaagatttggcgcgcacaggctcgccatcatccgaacctgttgacggaagaggcgaaagagagaattcatcatgccatcttctcgcaacggccgctcaagtcccaagaaatcggtttatgcacctatatgtctatgtctggacaaaaacgagcccatcgcgctctgccgggttttcagcgttaccgcatctattcggaagtcaacaatctgaactggcgcacatctcagggcctttcagaagtcaaggcttatcccgaagcccgcgacgcaatcgtggaaatgcttgagagagtcagcactagaaatgggcaggtgagttttaacaagataaagaatgtactcaagcaacaaggcctggccgaaggcaatatcgaactcaacctggagtcagacaaacgcaagggactggatggcaatgccacttctcggcttatgcagcaggaagattgcgtaggcgaacagtggcatgagtggccgccagaccagcaggatgcgtttgttactctcttgctgagcgacaaggaggatgaggaagttctggcggttatgcagtcggaatatggccttgacgatgtggatgcccagacctgccttgaagccagttccagacttcctgagggaactggcaatttatccctgaaggcggcacagctactagaagaaaagatgcgtgacgactgccttattcagcctgacgcagtctgtgcagtggcaaaggatcgcgaggaacagggggattttcgtaatcccctgaaccgcaccgctggcagcgaggagcttctggacgaactcccttactacggagaagcctttcaggagacgggccatatcatccccggtgacaataagctacaggaatacgaaagccatggagacaaacgcaaatattacggaggtgtcagcaatgttacggtgcatatcgcgctgaaccagattcgtgctctggttaatgagctgattcgccgatacggcaggccggcatccattgccatcgaaatggcgcgtgagctgccgatgggggttgaaaaaaagagagaggaagagaagcggcagagagaaaatcaggagcaaaacgagagatttgatcgaatactgcgggaacacggccgatctcctaatagggagaaccggcttcggttaaggctttgggaggagttggatgaggatccgtctgggcgcatgtgccctttcagtggctcacgaattggcattgctgatttgttcaacggtaacactgaaatcgaacatcttttgcctttcagccgttctctggacgatagccgagccaacaaggttctctgtactcggcaagcgaatcgggacaaagggcagcagggcccttatgaggcttttcacaacagggcgggttataactggggcgaaataattgagcgggctcagaggttgccgaaagcaaagcaatggcgtttttatgaggatgcctggaacaaatacgatgagcaggaagggtttcttaaacggcatctgaacgataccgcctacattggtcgtctggccaaggaatatctcgaaaatatctgcctttttaacaagattaatgtcctgaccggcagtcataccgcgcttcttcgtcgctactgggggctgaacagcctgttgcgcgattccaaccaacccgagcagcagaaaaagaatcgtgacgatcatcgtcatcacgctctggatgccatggtcgttgcaatgacaacgttctctatgctacagaaaatgtccaaagagagctcgcgagccgaggaagtggatctggaacacttgttccccaaggaccacaatggaagaagtcccattgatccctgggatggttttcggagtgatgcaaagaagaggctcgaccgtgttgttgtgtcacatcgggtcagacgtaaaagggcggtgttggccgaatctggaaaatctgtcagcaaccgcaccacgggtcagttacacaatgaaactgcctatggaattatcagcggacccgacaagacgggtaaatacaaagtggtcagccgctggccgattgacaagcttaagaaaaaagatcatctgaagaatattcgcgacccctaccaaaacaagaggtttctggaagtctgggagagagcagaagaggcagggaaaaagggtaaggatgcaatcaaacaattcgcagtgaaagagggcattcgcagcctacgctgcacaaaatccttgtcgggggttgtcgtaaaaaaccgtcagggcaaggcttataagtttcttgagggggacagcaactgggcggcggaaatttatgagtatcctccgggccattccaaggctggtaaatggtatggcgaggttattaccactcacgaggcgaatcagcctggcttcaggcccgggcagacttaccgcccgcatccgggagcccgtctggtgatgcggttgcagatcaacgactgtgtgcggctggatgatcagatcatgaggctacaaaaaataagcaaaggatttcgcctagtttttgtaccggctctcgaagccaatgtggatgcgcggcacaatgacccgcaagatgactttagtttcaaggagacggggattcgaagactgcaggaccagcaggctcaaaaagtgcatatcagtccaagcggtcgcatcaattcagaagtgcgcttacgcaaaccctgatgtggtgtgccggatcaaattgttgaaattactcagccagggcactacctgagcaagcaccgaggcttcctgaccgttcactccaagggagagcagatcggtcaggtgcctttggatgacatcctcgccgtgctgatcagcgtaccgggttgcagcgtttctacaatgctcatagatcaactttgccaacgcaatatcccccttgtgatctgtggaatgagctatcttcccagttgctacactctgcctgtacagggatacgggcaccagtttcaggtcatgcgagcacaggccgaattgtcgcaacctcagcgcaagcgagcctggcaacagattattcgggcaaaactgcaaaatcaggcagaggttcttgcctgtgccggccatagccccgcttcactgaaacggcttgcaaacaaggtcaaatcaggcgacccggaaaactgcgaagcacagggggctcgcctttactggcaaaagttgtttggctctgagtttcggcgtgaccagaatgggattggcctgaatgctgccctgaactacgcctatgccattgtacgtggctgtgttgctcgcggcattgctggtgccggcctgcatccaactttcagcattcaccacaagaatccgcataaccctgtcaatctgatagatgatctgatggagccgtttcgacccatcgccgattacctgatctggcaacatggttatgccgaagacgttgaactcactcccgagatcaagaaaaggctggctgccattgtctcgttaccggtgccactgacggatggtgcttctccactgtctctggctactgtgaaggtttgccgctcctttgctaactactgtcttggtcaggacagtgtctgcctgttgccagggttgccgacatccttgagcgtagctgcactctgatgacagcctggttgagtccgtatcgcatcgtgtggcttttcgtcatgtttgacctgccggttggtaccagcaaggagcggaaggaggcggcgaagtttcgcaatcatctgctggacatgggcttcgaaatgtcccagttctcggtatatttgaagtactgcgcctctggcgagaaggcggaagcggtcggcaagcgagtagagccttgcctgccgccaggcggcagagtggatatattgaccgtgaccgacaagcagtttgccaacatgaagcgattttacagccgctcccgccaaaaaatgatcgaaaggcctggacaccttcagatattttgacgctttctaaacgactgacacgcaaaaaaagcttgtatgtcagtcgtttagtgttttcctagtttagcagttcggaataagtggtgctaggaaaacggatggcacactcgaggccggcaagtcaatagtttagcagttcggaataagtggtgctaggaaaactctgacgcccgatgagtcagcaccagagatagtttagcagttcggaataagtggtgctaggaaaaccacaataacaacgcctcgtctgggtgcggtttatccgcacccagacgaggcgtttgcgcaaattgcgccgtcagttcaccgcccgactgcgccccttccagtacttttcacgaagttcccgcctgaggatctttcctgaaggattgcgcggcagcatctcggcgatttccatcgagcgaggcaccttgtagccggccaggtgttctctggcgtagttttgcagttccagcagctccatcggctccttgccgcctgccatgacgaccactgcatgcactgtctctccccatttctcatcgggaatgctgacgatggcgacatcggcgatgtctggatgagaaaagagagcgttttccacctcagccggatagacgttttcgccccctgagacgatcatgtccttgatgcgatcatggacatagaggtagccgtcggcatcgaaaaagcccacatcacctgtgtgaagccagccattgcgtatggtttcggcggtcttctccggcgcattccagtagcccttcatgatgccgatcccacgcgtaacaatctcgccgatttctccctgaggcagtgctcggccctcggcatcatgaatttccacatcgacatcgcggttgggtcgcccgcacgagcgcagcaaatctccgccttttctgtgatctgagggcgacagatgagaggtggagccaaaggtttctgtcatgccatacacctgaacgaaatcgcaatcgaatttggccattgcctgtttgaggaggtcctcggggatgggcgaagcaccgtaaatgacctggcgcaccgaggaaagatccgttttggcagcctcgggtgcctgcatcaaaagcaggataatggcgggtacaaagcctgcgatattgaccctgtcctgctcgatggtttccaggatggctggtatgctgacatcgacatgcaacaaattgtttgtgccggcgcacaggcccagaagcgtcatggaaattccagagatgtgaaacatgggcgtacagaccagattgacctctctttgctgccagtcgtaccagccaaagccgtctctaaatcgcagtatgtcaaaggttcccagcacgtttcggtgggttatctcggcccccttggggtagccggtcgtgcctgaggtgtagagctgaatcagcgtatcatcgggttccgttcggcaatctggcgagtcatcactctcggcatcgcgcagggtttcgtaatgcagccattcaggatgctcaaagtctatggctatcgtcgtcttcacatactccaggccgcctcgaatgctgtcaatcaaccccttgaaggggtctccgcagaacagaaccggtgcgcgtgagtcattcagcgcataggccacctccggcggtgccagccgccagttgatgccgacgggtgtcgcccgtatcagcgcgcaggcgaacaggagttcaaagtagcgatgggagtttttgtccagaatggccacgcggtcgccaggttgaacgccaaagccgagaagggcgttggccagctggccgctgcgttttgccaactcgctgtaggaaatcttctcatcgccgaaggatattgctatatccgtgttttcagtaacattcgggtggcgaatccagtctgcgaaggtttctacctgattcatttttacgagcatgctgtgcctctcctgtcttcttagggtgctttgattttttgtctgagtctggattgtacataaggaagagacagaacgccgcccaacactctgggtgtactcatttgaccgatgacaggcggaggcgacataatcgttgaaatggccggtcgggacagttggccgaaaccctttgaaaaaaagcggagcctgccttcggtggcggcctgtgaatgcagggctgtggcgcgttcaaatgaaccttgtcgcaggtctgttggcaaaagagccttgtccgctctctgctactctcgcttttcgtgaatggaacaggacttctgcccgaagaggatgccgacacctgtcggactttcgatcatcggctccgcctgactctcaagaaaccacatctatgacgaaagtcctcgggcaagcttcaagagcggttgtcgtcggcggcggcatcggcggattgacggcggccttgtgtcttgaacgcaagggctggcgagtcagagtgctggagcaggctggcgaaatcagcgaagtcggtgccggtattcagatcagccccaacggtgtcagagtgctgcgtgcacttgaccttgaagctgctgtttcagccaacgcctttcgtcctgaagccagcgagatgcgcttcggaacctcgggccgccttctctttcaccactccatggccgattacgacacaaggttcggtgcaccctatttgcatattcaccgtgccgacctggtgagtgcccttctggcagcactggaggctcggcagccgggtgctgtgcagaccggccaagcggtcagcggttacggccagaacgacaggtccgtctgggcccagttagccgacggcactcaagcggagggcgatcttctcattggtgccgatggcatcaaatccgttgttcgtgaccagatgctgggtgtgaaagcacctcgttttaccggcaatgtggcctggcgaatggttctgccgatggccagactgaccgctcaaccgccaccaccaaccgcctgcgtctggattggcgaaggcaggcatgccgtcacctatcgtctgcgtggcggtacgctggccaatctggttggcgtggtcgagtgcgatgactggcgagaggaaagctggacggcagagggcacgcgcgagcaggcactggctgattttgccggctggcatccggtcattacagaggctatcggcagggcggatactcactaccgctgggcactgttcgaccggcctccgctggatcgctggtttgatggccgagtggttctgctcggcgatgcctgtcaccccatgctgcccttcatggcacaaggggcggttcagtccatggaggacgctttcgtgctggccgatcagttgaactcggctgatgatctcgccgccgggttagccgcctatgtctcagcgcgccacagacgtgcgaccagagtgcaggccgccgctcgtagcaacacgggcttgtttcatcagcaaacctggctcgaccgactaaaggcacaggttttcttgtggctgcctgacaagctactgtctgcttcggccgccaaacgttttggctggctgtatggatacgatgtgacttcgggcaaataagcctgaggaacaggggtcagccgaaaaaggcgtcaggagcggcgacgagtgaccaggctgtcgtttcgggcgatcagattctcgttgatctctgccatggaggtaaatccgccaggtcacaagacgggacgacagctggtgttcaggttcgacagggcaa

SEQ ID NO: 484 - DNA, 8796 bp, synthetic construct
  source 1..8796: mol_type = other DNA
  misc_feature 1..8796: note = Synthetic
cgaccccaatgttcgaacgatggtggaaccgaatcttgacatatggagacagcgaatgaaggattatgcttcttgcgccgatctgatgaagttcagcaaagaagatttgcagatactttacccgaaaatcgaaaatagcaaaacagcagaaacgcttctcgacgccggggttaaacttgttgtgataaccgatggcggaaggacagtgtcggcttggactcacaaggatcatgttgtgcaagtgacaccgcccacaacgtcagttgtcgacgcggttggtgcgggtgacagctttcaagccgctttacttgtaaagttgtcagaagaaggagccggtgatccaaaagaggctgtagacacacttgacgagaaacgcctgaagaaccttttgaacttcgcagttcaagcagcacgaattacttgtcggaggcgtggagcagatctaccgcgccgagccgagctcaccggacttgacatctaacgaatcctattcgcgagatgacagattgttgaaatggatggagaaccacatgatttgtaatctgaaaattattgtgagactgtctcgttgctgaaagatgtgcaattttattctgcaattaatcatgcaatgcatggtgaccaaaatagtgagagtgttcctgttcagactagaaataccaattaaaatgaaatttcaccactgcgcgcatgacgagagcatcggggaaaatctgcatcagtatttgtcgcccgcgctaatactcgaagtttgagagatgttcaggtgggttaggtaacaggaggaagaaatcgtgtacaaggctttccgaacggttaggagaagagtggtctatttgcatatgtatggattcgaaccgttttatcggaactcctcgcaacctttcgcgccacccaatgaaaaataatttttaccatttcgcacttctaggattgatcaagcgcgattcacaactaaacaattcgattccggtacaaatgatctgatttaaaaggcggtaaatgtacgcacagcaaaatgggtatcccaaatgcgcagtctgagaacactacaggaattcgccttgtctggaatttaaattgaattcgctcggataactgtaaatagctagctttcaaccaatttttcgattctagaactgacggaagaaatagttatggctgattttggcgtaataattaggcgtagggagttcctgcacgggaatttttcaattgcggcgggtacgtttgtgcgagtgcgttaccgattgccaaaattctgtccgattcttgaatccgctctagttcagcggcgacgaacggcaatgacacgattaccttgccagaagaattcgattagcatgctgtagcctcttcgtgagacccgctgaggagcggtatccctgagttcggccaagaaatctgccgaactgcggatagtcgggccaagtctttcggcgataactgaaatattgaattgaaataacagacaattatcagcaactgtttattcggaaattccaagtcgaaatcagcgagaaattcgagggagaacctattttcaatggatccaaaagaacgcctcacgaactagcaattctactttgaatcgatattttcgtaggattgccgaagagattactcttcacaaaaaagcggcccgtaggccgcttttcaaatgttgcgaattctcacttgttaatctcagcagtgagatcccctttttcctgaatggaatttataagttatctgaagttgtttgtcaagttgctgtcctggattcctggatcaataaatttaagacaaacatgcggcgagcgtgatttaggatgcgatctattcatagtgggtccatagacgcagtactttaacagcttttgctttttccaatacttggtaaacaagtctgtgctgaatgttaatccgtcgagagtatgcgccttccaaatcccccacgagtttttcaaatggaggaggcgattgaaatggattttcctgaactatcgtaatcagttcctcagcatttctcttcagaccggcatcagacagtttttttgcatccttcttagcttgcttagtgaaatgaagtttgcacactaccaatcaagttcctgatcacattcttcaagattggtattgattccatcaacaatagattcacgcattccgggaatggacaacaagtacaaagtctcattaacggaattccagtcttcctcagcgagaagcactgcattgcctcgcttacctgcgatcaccaccggcttgtgcgtttgcactgcttcgtcaactaggttatatagattcgtgcgagctttagttacgctaatcatcttaggttacctcacaatatcgtacgcaataacgtacgatatgtcaagtttgtgtcttggttagccacatgcttcgtcatattacataacgtaatagggaggcgcatactagacttgacctacgaaattcataaatttggtttacttgtgatttcggaaaaaatctatcgaaagcttttgagcgtgtcagtcaataaatttgtgaattcaaatagaaaatcacttcagcaatagtacagaatagttcttttaatttcgactcagcatcattgcaaattgtaagcaaacgagccagaaaatgaccaatatttgactgttataatctgtttccgcatgcaaattaatttgttcaaccgacgcatttgctttagagcattaatggtatcgaaataattgcgaagcaatagattttgattgtacgcactttgatggggtatatctcaattgaaatatagattaggtcttgatattggcactaattcaataggttgggctgtactggagttagatgaccacggcgaactgttgagcattgttgcaacgggggtaaggatctttgctgacggtagagagccaacatccaagtctactctcaaggcaacacgtcgagacgcgagatcaatgcgaagacgcagggatcgttatctgcagagacgtacatttttattggacgagttgaccaagtgtgaattattcccagaaggttctaatgagcgattgaagcttcagaaattaaatccgctgaaattgagagcgatggcactgaataccaaattaccgctacatcacattggtcgtgctttatttcatctaaatcaacgtcggggtttcaagagtaatcggaaggacaaaagcgaagaggtaactacaggaaaaatctcacaatcctccctaaatttgcttaaacaaatggacttgattgaagttcaagatgatagcaatactgatcaagaacgctctagcgcagagaaaaaggctatcggagaaaaagccgcgcacgatcgactatatgcactggaacaacttaaagaaagaagaaacctatcgtatgggtcgtttttgtgggaacgccatcaaacaggattgcctactcgtgcaaggccgaatagtgatagtaatctttatgacgtttatcctacccgggaattgttggaagacgaattctacaaaatctggaacgctcaagcaaaatactaccctcaccagctttccgatacggtaagagacagactatttcacgtgatatttcatcagagaaaacttaaaccacaacctttaggaaagtgtgtgtattttccagatgaatatcgggttcatcgagctatgccaagttttcaacgctatcgtatttgtcatgaagtcaataaccttgaatggcggcatgggctcgacaaggttcgcttaatcgacgatcgaatagatcgagatagactgattgaaatgctggaacgaccgtcgaaaaagaaaaatccatcagataggaatgctcaggtttcgtttaacgctattcgtaaggaactaaaaaagcgagaagcgatgattggagattgcaaattcaatcttgaatcagaaagacgtaaaggaattgatggaaatcagacttcaaatgtcatgcagcatgacaattacgtcggttcaaaatggcatgactggtcgctcgacaagcaggacaaattcatttcgataattttggacgatcaactagatgaccaagaagtgtgtgacaagcttatctgtgaattcggtctaactccaatttctgctgaatggtgcaagaatgctaaattggttaatggaaccgctcacatttcggttcgagcgacccgtattctgacgaagttcatgtttcaggacatgttgatagaatcaaaggctgttcaaaaagcgtgcaatctgaaccctgatttccggaatccaaatacgagccgtctaactggtaagttactgaatcgacttccgtactatggagaagctgttcaaggccacattatttcgggcactggcgatgaggacgattatcaagctcgaattggtatggtttcaaaccccacagtacacatcgcgatgaaccagctacgccttgtagtgaatgaactgataagtaggttcggacatcccgaatcaatctcaattgaattagcacgtgacttgcctgtcggaaaagacggacgtagcgaaattacgaaaggacaatccaaaaatcaaaaacgaaatgaagatttcaataaaacgctagatgaacttggccagaaaaaaaatcgagaaaaccgccttcgaatgcgattgtgggaggagcaggggaaaaggtgtgtctttactggaaaaattatcggattgaataacctttttagtgctgagatcgagattgaacatttgataccgtttagcaaatcacaagatgtcagtgtgccgaataaagtggtttgttttaggcaagcaaatagagacaaagcaaacagaacaccgttcgaagctttttcgaatagtccgagcaattacaactgggacgagatttataaccgcgtagcagaattaccaaaatcgaaacgttggcgttttgatgaggatgcactagaaaaatggcacaagaatagcgaaggtgattttagtgcgaggcatctgaacgacacgcgctatatcggaagaatggctaaggagtatttagaaaatatttgtgcgttcaataaaattgatgttgttaccggaagtcttacaagtctgttgagaacattttggggattgaattctgttttgtatgaaattcggaatgaagccaacacccaaaagatcaagaacagggatgaccatagacatcatgcgattgacgcaattgtagtgggtatgacttcaaggtccattattcagcgtgtatcgactgaagcgaattgtgctgaagagttatttgacttttcaagactttttcctaagaggaatcatagaagcgcaattgaaccgtgggacgggtttcgccgggatgtaattaatgcagtaaataaaattgtggtgtcacacaaagtgagacgtaaggatacgcaacctagatcggcacaaagggaaacaaggctcgtaactgatgggcaacttcataacgagaccgcttatggaataattgatggtccggataaacaaggtttaaataaagtggtagttcgcaagccgattgaatatttcacgacaaaaagtcgtctggaaaaaatccgtgatgaatatttgaaaaggaagtttctggcagtatttgctagagactcaaaacaaggtgttattgatctggcaagacaaaaacgaattcggagtttacggatgacggaatctcagacagtaatttccataaatgatcacgatggtaaaccttataaagcatacaaaggagattcaaactggggtattgagatattttcctttcctaaaggacacggtaaatttggaaaatgggaaggagttgtaatttctcgatttaaagcaaatcaacgaaactttcgaccgggattttcttgcagaccacatcccgcggcaaaactcgttatgaggcttcagattgatgagtgcatcgaaattgaggataaaggacagatcaacataatgagactgcagaaactcaataagaatggccaaatggtgttcaccccggcgaatgaagcgaatgtagatgctagaaatcgcgataaggatgattcatttcggtataggagtacatctgcaaatgtgttgcaaaagcagagggcaagaaagatacacattagcccaactggtttattttctcctccacgagtttgaaactaatttttagcagaaaacatataagacaatggttggtcaaattgttgaaattactaaatctggtcagagtctaaaaaaatcgtatggttttctcgatgtccatgctggtgaaagtagattaggaagggttccacttgacgacataattactgtagtaatttccgtaccaggttgttcaatatccacggtgttgattgatgaactctgcaagcggaatatcccacttgtaatctgtggtaataattttttaccctgttccattacaatgcctgtagccggttatagccgacagttccaagtaatgcatactcagattaatatgaagttgccgcaaaagaaacgagcttggcaaaaaattgtccgtgcaaagatcagtaatcaggcgaaagtgctttcaaatatcggtgaagacagcgcacaactcgcacgtctcgcaaagattgttcagtcaggagacaagggtaacatagaggcgcaagccgcacgccactattggcagaaacttttcggtagacagtttcgtaggaggcaaaactcaactggattgaattctgctctcaactatgcgtatgccatagttcgcgcttgtactgcgagaggcattgttgcggcgggattacatcccacattcagcgtacatcaccgaaatcctaccaatgcattgaatctggttgatgactttgtagaaccatttcgcccgattgtcgattacatgatttggagaattggggaagacaaattgaaagaacttagtccagaaataaaattgaaattggcatcagtcactgcactgaaaataccaatcaaactgggaaaggaaattatggacgaatctccaatgtccctggccacggtaaaaatttgcagatcgttcgcaagttattgcaacggaagttcaaatgatttttttgttcctgaattgccaaaccctatggattatttggagttgtgactagaagaattgaacttagcccctatcgaattatgtggctcttcgttatgtttgatttacccgtaggaacgaaacaggaacgaaaggaggcggcttcatttcgaaaaagtttgttgaaacgtggtttcgagatgtctcagttttccgtgtacctcaaatactgcgcgtccatagagaaagcggattccactagcaatcaagtagcggaaattcttccacgtggaggcaaagttgacattgtaacgattaccgataaacaattttccaacatgaagcgctactacgcaaaaaataaagttaaaaatgaccctcaacctaaacaattgcatttgttttaagggtattttttatgttaaaccggaattaaccctaataaaaacaatcacatctcagcaacctgattatatcagtcggaaaaaggggcgctgagacaaccgaaagactgcagtctgagattcgacattagattatatcagtcggaaaaaggggcgctgagacaaccaggctattgcgatttcctgtacgatcttagattatatcagtcggaaaaaggggcgctgagacaactgatcgagttctccgacggcagcgatacaagattatatcagtcggaaaaaggggcgctgagacaacaccggagcgaagcgacaaaagcagtcgttcggattatatcagtcggaaaaaggggcgctgagacaacttttctctgatagtaatgagcattacggatgattatatcagtcggaaaaaggggcgctgagacaacgtgatgtggtcttcaatgcaattccccccggattatatcagtcggaaaaaggggcgctgagacaacaatgttaatttattggacttggccaagatggattatatcagtcggaaaaaggggcgctgagacaacttgccacatccgcgctagcgctgtcagctggattatatcagtcggaaaaaggggcgctgagacaacgaatcaatatgacaattgtgatcgcctgacgattatatcagtcggaaaaaagggcgctgagacaacgtgcaattgattaagagtcaactgctctgcgattctatcaggcggaaagaaggaggctgagacaacgttagaggtcgacgatggagtcgatcagctggttcagctggctggtcatggatgtgaatagcgtcggtcggcgccatttcgcaacagaattaggttgaaagtacaagtcgccaacaatgacagcaacttaaatatgtgtttttggctttatgcaaaaccgcaattcacaatctgtcgaatcggcatgagcgtccgacagttgttggaaactgaatcggaaaggtaagaccggtgtgcgatgactaacataagtcggggtctgtatactattagattactgcaagtttaaaattccttttagtaatccgacgctcaaaacttataatactgaatcttcctgtgcatcgcgaaaactagcacggtgcaaaaatttttgatctttctctaaggttatgccttatgccgataatttcactgccggacgggtcggaaaaacattacgcgtccaatcctacgattgatcaggtcgctgcagatattggaaccggattgcacagagccgcaatcgcgggtgaattcgctggtgttctgctcgatacatcgcatgaaatcgatatcgatggcgaattaaagatcatcacgggtaaagatgaagaaggattggagatcattcgtcactctacggcgcacctgctagcccaggcggttaaacgact

SEQ ID NO: 485 - DNA, 7151 bp, synthetic construct
  misc_feature 1..7151: note = Synthetic
  source 1..7151: mol_type = other DNA
gtcattcctgcgcacgcaggaatccagcgtgccccggccaggtggcaactccaacgacatcggacacctactgtttcccgtcctgttgagccgtcggccaacgggtgtttcttccaaaagcccttcacatctcaccccagagtcccgtccgtcttgacgacacccccactacacacacacaatggagccatgacagacaagtcacctgcacagccccccgaggcccaaagctggataccacaatttcgagcgtgttacgaccaggccgtgcgtcggtttgaacgtggacatcgggggccggacaacgtcattgccccggagtctctagcgttgcttgattcgattgggacctctgcccgggaactgtatgactttgtcgaggacctggttgaagacggcgagccggatttcgacaccgttgcggccatcacagcaatccgccgagcgtactttttaacggttcagcaggggaagccatcttccaggcgagtcccgtcggcgacccttccatcgggatacgccgagttgggtgggtatcggtggctgccccgcatcatcgccaaggcgcgcgccaaacttcgtggagaactgtctccggacatgatgttcggctgcggtgccgaccggccgtttctgcggagggtacacatggagccggccgaattcctgcaggttgtatgggatgccggcacggacgatcaccagatcctggaagccgtgcggaacagggccaagtagcgcggggcttccattgacaagggagttgacatgacggagagcattcgcaaatccgacgaagaatggaaacggcaattaaccccggaacaatacgccgtcacgcgacagcggggcaccgagccggccttcagtggtgcctactatcaccacactgccacgggggcctatcattgcatttgttgtggggcttccctgtttctctcacgggacaaatttgaatccggcacgggctggccgagtttcacacaaccggcgaaggcggatgctctggacaccactcccgattacagccacggcatgacacgtgtggaagtcacctgccgtcgctgccaggcccatctcggccacgtcttcggcgatggccctccatccacaggccaacggttctgcatcaattctctcgctctggatttcagggaaacggccggggagtaggcagattcaggtctttgacggtattggaacgggggactgtcacgtagggtggagaatcctggctcttgtccagagctagcatggcacgaagcagggccggcggtttaagccttgcctacgctgaccaagagccttggccgctctgcaggaaatggctacatcatgctggagcttctctacgaacaccccattattacggtaaaggatgtccagcgtctcattggtacaacctacccgacggccaataaactgatcgcgcgaatggtggagtgtggtatcgtgcagcaattcaccggccatgcgcgcaactgctacttcgggtatcagtgctacatcgagttgttccacaatgacacagaccaggaagccaaaggacaacacacggccaccatgctacattcttgcggaagtctacgctgacacctgaggtcgtacctaccaaaagggcgacccgtaggtcgcccttcgaatgttgcgaattctcgcttgttaatcatagcgaaaaccgcctgttcccatgtgctaacagtccctctataatattacagagttttccagaaatcaatacacagggcaaggaggtttcccacgatgttttcgtacagactgcaggaagccaaaggacaacacacggccaccatgccacattcttgaggaagcctgcgctgacacctgaggccgtacataccaaaagggcgacccgtaggtcgcccttcgaatgttgcgaattctcgcttgttaatcatagcgaaaaccgcctgttcccatgtgctaacagttcccctatagtattacagagttttccggaaatcaatacacagggcaaggaggtttctcacgatgttttcgtacagactgggactggacgttggggccaactcgcttggctggagtgtgctggaactgaatgagcagggcgatccttgtgcggtgagagacgccggggccaggattttcagcgatgggcgtgttgaaaaatccaaagccaccttgaaggccgaccgtcgtgcggctcgttcggcccgccgccgtcacgaccgctacaaacagcgcaggacctttttgctggccgaactcaccaaggctggcctgtttcccgaaagtcagggagaacgccgggaactgcaaaaaaaggatcctctggagcttcgcgccagggcactgaaggaaaaactggagccgtatgagattggccgtgccttgtttcacctcaaccagcgcaggggattccagagcaaccggaaggacagaagtaaggaaacgacaagcgggatggtcagcaattccgtcaccgctttattgcgggcaatgcagttgatggaagaaggctacagcgccgaggcattcaaagccctgccaaaagaggccaagaaagaggctcgcgagaaagagcagcaacagaaaaaagatgcacttggcaaactccagcagcagcatgctctgactttcggttccttcctctgggaaaggcgtgccagaaaagagacaacccgcgcgcgtccaaacagcgacagcaaaatctatgactgctatccaacccgcgacatgctgaagcatgaatttgatgcgatctggaaggcacaggccgggcatcatcccgaattactgacagatccacggcgcgatcggatcaggacagtcattttcacacagcgacctctcaaaccagcgaaagtcggaaaatgtatgtacctgccggacgaggaccggatgttcagagccatgccgagttttcaacgctaccggatctaccaggaagtgaacaatctggaatggacgacaaacagaggcaagcatcggctgatcgatcatcccgaggcgcgagacgagattgtggatatgctggaacgtcccgggacacagaagggtaatgtgaccttcagcaagatgaagaacgttctgcaaaagaggaaactggccacgaacgattgtcggtttaattttgaaacgccgaaacgcaacggttttgatggcaatctcacgtccaatctgatgcaggatgaaagccgtgttgggaagcagtggcacacttggtcgcttgagaagcaggacagtttcatagaggtcattctggatggcacaccggaacaaaaacagcgacgagccgaagacgaaaggagaggcctcagggttatacgagacggcacacgtgatgacgaagaggttcaggcctatctacgacgcacctacaatctgtccgacacttcggcagaacagtgcatgtctgcaaattttgtacaggggacagccagcctgtcgaagaaagccgctgccgtgctgattgaaaaaatgagggatgacagattgatccaaccgaacgccgtacgcgaggcaaaagataaagaggtatttccttgcgacgaagaggtcacacgcaaagatcaactgccctattacggaaaggcttttctggatggtcgtcatattatcccgggcgaccggcaccccgcagacaaggacgatgacttgaaatattacggaggagtcaccaaccccaccgtgcatatcgcgctgaaccagatccgccatgtggtgaatgaactgattgaccggtatggtcgtccggcgtctattgccatcgaactgggacgtgagctacccgcaggccaagaaggtcgagccgagatcaacaaggcacagaaagccaatcaggacaacaacgagaggctggacaaccgtttacgcgaacagggtcaaagcacgatccccgacaaccgcttacgtttgcagctctgggaagaactggacaaggacccgaatggccgctgttgccctttttccggacagaaaataggtattgccgacctgttcaatggccaggccgagattgagcacctgatcccattcagccaatcactggacgacagccgtgccaataaggtgctttgcacccgccaggccaatcgcgataagggcaatcaaacaccctatcaggcttttggccatagcccgggcgattacaactggaacgaaattcttcgacgttccaaaagtctgccacagaacaaacagtggcgtttccaaaaggatgcactggaaatatggcatcgcgaccatgactttaccgaacgccatttgaacgatacccgctatataggccgactggccaaggaatacctgtgcaatatctgtcagtctaacaggattgacgtgctgacgggacggctcacggccttgttgcggggtcactggggactcaactctgtcctgaacgaacgcaaccagacacaggaaaagaaaaagaaccgcaacgaccaccgtcaccatgcagtggatgcgattgttatcggtatgacctctcgatccatgctgcaaaaggttgctaccgcagccaaccatgctgaagagcttgatcttggccgtctgttctacaaaagccagattgacccgtgggacgggttccgcgatgacgtgaaaaaggtgatgaatggaattaccgtctcacacaaaccgaagcgtaaaccactggacaagaacgcaacagacggccaactgcacaacgacacggcttacggcatcatttcggggccggatgaccaaggacactttatgaaaaacgcgaaggtcgtcgtgcgcaagccaatcgaagccttcgaaaaacgtgatgatgtggcatccatccgtgacaaacatttacagtgcgaatttttgcaggcctttgatgacgaggtggctgcagggggaaaaggatcggatggtgtcgcccgtcttgccaaagacaggaacataaggcatttacgacgaaccgagaccttgagcgtcatccccatccgggacaagtccggcaaggtttataaagcctataaaggcgacagtaactgggggatagagatttacgaatggcccaaagatcacaaaaaggcagggaaatgggaaggggttgtgcactcacgctatgaggccaaccaaaaaaactttctgcccggccagacccgcaagccacaccccgcagcgcggctggtcatgcggctgcacgtcaacgactgcattgaaattgaacaagacgggcttaaaccaattatgcgactgcaaaccctgtcgcagagtctcggttttgtaccgcataacgaggcaaacgttgataccagaaaccgtgataaaaacgatccgttcaaatatctctacaaaacggctgacacgctcaggcaatgtagcgcccgcaaggtccatgtcagcccgacaggacgggtaagctatgcaaaacggcctaagccacgccggaagaagtaacacgtcatgccaagtcaaattgttgaaatcacgacacaggggctacatctcgccaaggatcggggatttttgcaggtcaaggaccggggtgatctcgtcggacaagtctcgctggatgacatcctcgccgtgattgtcggcgtgcaaggttgttcaatctccaccgtgctcatggaccaactcagccagcgcaacatcatgctggtggtatgcgggaaaaattacctgcccagctctctcgtcatgccagttgccggtcacgggcggcaattccaggtgatgcgggcgcaagtgaacttgtcggaacctcgccggaaacgcgcctggcaaaaagttgtccgtgccaaaatcctcaaccaggccgaactgctcacccgtgccggtacaaacggcaaacaacttgtccggctggcggacatggtgaaatctggcgacccggccaattgcgaggcacaggccgcacgcatctactggcaacggctgtttggcaacgaattccggcgcgaccacgatgcaactggcctgaacgcagcgctgaattatatctatgctgtcatacgatcctgtgtggcacgtggagtgagcgcggcgggtttgcatcccagtttcagtctctgtcacaagaacccgcaaaatcctctgaatctggtagatgatctggtagaaccattccgtcctgttgcggactatcgcatctggcagggcgatgctcgttgctttcaggaactctcgccggaaatcaaggcaagtctgtcatcaatagccaccatggccattccactcaaagaggaaacatcgcccctgtcattggcagcggtgaaggtctgccgttcatttgccggttactgtcttggcgaaactgacgattttctgttacccgccctgcccgctgcctcagacgtttcaatcccatgaagcgccggaggcatctcagcccctaccgtatcatgtggctctttgtgatgtttgatttacccgtgggcactgcaagggaaaggaagcaggcaacgggtttccgtaacagcctgcttgaccttggttttgaaatgtctcagttctcggtctatctgaaatattgtgcttccggcgaaaaggcggaatccgttggtagtcttatacaacacaggctaccaagtggtgggaaagtagatattctgacgatcaccgacaaacaattcacgaacatgaagcgattttatgctttgagccgaatcaaaagtggcgggaaagtcgctcaactgcaacttttttaaaaagaatttcctctgcctggggcagaggaaattcttttaaagacaagaccttacgcaagccctagtctagcacatgggaataggcggtgctaggacaacggcatcgacgatgttgccgatggcgtcgttagtctagcacatgggaataggcggtgctaggacaacaaggcacaacttggtctggctgtgcgggagagtctagcacatgggaataggcggtgctaggacaactacccaacatgacagcctggcgctcccaaaagtctagcacatgggaataggcggtgctaggacaaccaagaagatgaaagctcgtcgtgtctactaagtctagcacatgggaataggcggtgctaggacaacatagctgcccgaaggccgtccgctactcggagtctagcacatgggaataggcggtgctaggacaactttctcaagtctatcggtattagtgctgctagtctagcacatgggaataggcggtgctaggacaac

SEQ ID NO: 486 - DNA, 6616 bp, synthetic construct
  source 1..6616: mol_type = other DNA
  misc_feature 1..6616: note = Synthetic
cgctacaacatcgattcgagcgccagggaaaagcacggcgccgcgctcgatgcgcgactgctcgcgcaagtccacctggcgatgacgggaggccagatcagcctcgaactcgccgagccgccgagcctggccaaggccgcagcggcggcgcggcaggcgcgttcctccagcgccgccctggtcagctacccgccaagcagcgaagagcttgccgcccaccgcagcctgctcgagcaaatcgacgccgaagcaaaacaaggctgcctctggctgcaagcaaaagccgcttcccaggccgatgcatgaaccgttcggcacccagcacgcccatcgcctccaaattgactcaatccgcgcaaaattcggctatcatgcatgcgggaacagaaagagaagcaggtgagcggatgaatcgcaggaaataccgatggggctttgacgtgggaacgaattcgctcggctggagcgtgctggggctcgacgaaaaaggcgagccttgcgagatcgtcgccgccggctcgcgcatctttgccgagggccgggatgccaagaccaaggcgaccttggctgcgactcggcggcaagcgcgttcagcgcgccgccgccgggaccgattcaagcagcggcaacgcttcttgctcagcacactgacgcaggccgggctatttccagagtcggaagctgatcgcaagaacctgcaagagcaggatcctctgcgcttgcgcgcgaaggcgctaacgcagcggctggaaccgtggaaagtcggtcgcgccctgttccacatcaatcagcggcgcggcttcaagagcaatcgcaaggaccagagcgaggaaggcaaatcggggggaaaggtttccaaatcagcgcgcttgctgctggagcagatgggcttgatcgatcccgagatttcgtcggaagaatacaaaaagctgtcttctgacggaaaaaggcaagttcgccagcaagaggcgacggcacgaatcgaggcattgaaaaagctcgaggaagagaaagagttgagctacggctcgtttctctatcagcgtcaaaatgaaggcaagccaactcgcgctcgccccgaatccgctggcgataaaggggaactgtacgacatatacccgactcgggagttgtatgaggacgagttcagcaagatctggcaagcccaggagcgccatcaccccggcttgatgaccgaagcggtcaaggagcgagttcgccgcgccattttccaccagcggccgctaaaacctcagaaaagaggcaaatgcacgtacatgccggaggaagatcgcgccttccgcgccatgccgagcttgcagcgctatcgaatctaccaggaggtcaacagcctggaatggtcggatgaatctggcgaaaaaaagttgctgcgcgactttcccccggcccggaacgccatcgtcaacttgctggagaagccctctgcgaaggaagggcgggtcacgttcggaacaatgaagaaggaaatcaagaagctgaacattgctgagggcaacttcaagttcaacttcgaaacagaaaagcgcaagggcctggatggcaatttggctagcaagctgatgcaaggcgaagatcgcatcggtaaagaatggcacaattggccgctggaaaagcaggacgaactgatcgacatcattctgaacggcacaccggcccagcaacagcgtgatcgcgaatggctggaaggtggcggcaaatctccgcaaggaaccggcgcacttgacgacgaggaagtgtgtggttacctgatgcagcatttcgaactggatcgaacggtcgctgaaagctgtctcaatgcgtcgctggaggacggcaccgccaacatctccttgcgagcggcgaagttcatgctcgagaagatgcagggcggaattgtcgactgcgagaccggagagctctcgctgcctctgcaaaacgaagccgcttcagccgtggcacaggaagttgccaaattcatcgacccaatgcgagccaggggagatgacggcgggtacaagacattggacaaattgccatactatggagaggctttccgcgacggtcgccacatcatcccgggaacgggctgccaggaggacgacgacaagacccgctggggaggagtgaccaatccgacggtgcatatcgccttgaaccagattcgcctggtcgtcaacgaactgatcgagcgcttcggccatcctcaatcaattgccatcgaactgggcagggaatttccccttggcgcggaaaagcgacgcgaaatcgagaaagagcagtccgctaaccaaaagaaaaatgaagagcttgataatacattgcgcaaatacaaacaaaaggaaaatgcgggaaatcgattgaagttgtttctttggcagcaattggacgaaggcccgactggccgttgctgcccgttctctggagatagtatcggaatttgcgacctgttcagcggcaacatcgaggtcgagcatctgattcctttcagcagatcgctcgatgacagccgtgccaacaaggtcgtttgcacgcggcaagccaatagggaaaaaggcaaccagactccccacgaagccttcggccatagccccgatgggtacgattggcagcagatttttgcccgagcggaaagcctgccagacagcaagcgttggcgtttcaagccagaagccatggaaatctggaaccgggaggagggcggcgacttcaccagccgacacctgaatgacactcgctatatcggtcgcctggctcgcgaatacctggaaaacatctgcgatatcgaccgcatcgatgtcgtgacggggcgcttgacgagcctgttacggcgccattggggcctgaacagcgttctggatgatcgcacagaccgcaagaaccgcgatgaccatcgccaccatgcagtcgacgccattgtggttgccatgacgaatcgaagcttgctgcaaaaaatggccaagaaagcgcgcgagcttgaaaaaatcgaccaagatccggccagaaatcttgatcggtatttccctcccgtggatggcaaaaagagtgcgattgacccatgggagagcttccgaagtgatgtcgctgacgttgtggaaaggatggtcgtttcccacaagcggtgccgcaaggaattgcgcggtgaatccaccgacgggcagcttcacaacgacaccgcctatggcatcgtgcgggagttgaagggcgacaagtacgaggttgtttcccgcaaacccgtcaacaaattcaagaatctgaaaacaattgaatccatcagggacgcgcgattgcgagagaagttcatgtctgcattcgagattgctgaagagaatgaggagggtgcaggggaaaaggcagtcaagaaactgggagaatatctgaaaatcaaacgcttgcgctgtatggaaacattgagtgttatcccgatatccgggcaggattccgaaaatccttacaaagcgtacaagggagattccaattggggcgttgaaatctattccttgccatcaggccataagaatgctggcgattggaaagcagtcacgatttcccgattcgatgctaacaaaaaggatttcaagcccggagagacattcaggccacaccccgcagctcgcctgatcatgcgtttgcaaatcaatgattgcgtcgaaatgttagaccccaaaacaagggaagaaaggaaattgtaccgtctccagttggcctccagcagcatgatatttgcggaaatccatgaagccaatgttgataagagaaaccgagatcgggatgagaaatttaaatacacccgagtccgcgcaagctccatgcagtcgcgccgggcaagaaagattcacatcagtccgactggccgaatcagttacgaacaacgtcgctccggccggcgacggcagcaggaatgaacactgtcagcgcgagcctgcacgaaaaccctttcaatccggggtatggtctcttgcctccctatctggcgggaagaagcgccgagctgttcagcatcttccgccatgtgggcaataccgtgaacggcaagctcgtcgccagggatgtcgtgatctatggtccgcggggttccggcaaaaccgccttgctgcgtgctattgcagaggatctcaagccgctcgaggcgaatgtcacgctcgaactcatggtggcaaacgacttgcaaagtttggaagacgtgcgtcgggagttgaccgggatgattggtaaaccgttatcggaggcctggaagcctggagagtgggggttcatctggagtggaatgcgagcgaaatggcaacgcggggagttgtcgagaggcgagctgcggaaaggtcttgtggcgaaatgcaggaagcgcccgctgatactgatggtcgacgaagcgcaccggatgccgcctgcagcctgcaatgaactgttgagcgagatgctgacgattcggggcatgggtggccccgccatcgccattttggctgggaagccggccttggtggagcttggggatctggcgcaagtatcctttctggagcgtggcgagctcgtcagcgtccacttgctcgacgagcaaagcgcgagcgacgccgtgcgcatcccgctcgaacgcaatggcattgacatcagcgaaggcgtgatcgggcaagttgtttcccatagccagggctatccgcagttcctgcaactctggggtagcgctctttgggaccaggcaagcatccagggcaagaaaagtctcgatgatgacgactcgagcaaaattgccgcgatgatggaacgcgagcggaagaaagtctaccagggaaggctcgcatcctggaccggcaaggaccggaaattgctcggagaaatcgctcgcaaactgttgcaagatggctggatggcaagggaaagcctcgaagaggccatcgagaaaatcctgatcaggcaaggccgggatattcaggattgccagaaaatcatcgagcgaatggtcgattccgattttctctggtgcccccgagggcaggagaggatgattcccgcattgccaagttttgtgtcattcgccgccgggcagaaagaatcggtgccacataactgagattgcaatggttgggcagattgtagaaatcaccgatcccgggcattggctgaaaaagtcgcgaggattcctgcaagtccacaacagcggagaactagtggggaaggttccccttgacgacattcaggcggtgctgatatccgtgccaggctgtgcagtttccagcgttttgcttgaccagttggcgcagcgcaacataccgctggtaatctgtgggcagaactacctgcccgccagttggaccttgcccttgcaaggtgcggttcgccagtttcaggtcatgcaggcgcaagcaaagctttccgagccgcgccggaagcggttctggcagcgcatcgtgcaggcaaaaattggcaatcaggcagaggtgctggaacgcgctggccagcagtgccaggatctgcgacggatggctcgcaaggtgcgatcgggcgaccctgaaaatatcgaggcccaggccgcccgcgcgtattggcaaaaactgttcggtgccagttttcgccgcgaccgtggaactccggggctgaattcggccttgaactatgcctatacggttttgcgagcctgtgtcgctcgtggcgtttcaggggccggattgcatcccagcttcagtgtgcaacacaggaatccgcaaaatccgttcaatctcgtcgatgatatcgttgaacccttccgaccggtcgcggactacatgatttggcggcgaaaaggcgactatgcgggcagcctgacggcaagtggcaagcagcggctggcgtcgctgccgaccttgccgcttccgaccgaagaaggcttttccccgctttcgctggtggcggtgaggctatgccgctcctttgccagatattgccagggagagtcattgagcgagatcatgcctgttctcccggttgaattggattcggcatgacctcggccagcctgagcccgtatcgaatcatgtggctattcgtcatgttcgatttgcccgttggcactggccgggagcgcaagcaggccacgcagttccgcaacgacttgctcgatatgggtttcgagatgtcgcagttctcgatttatctcaagtactgcgcatcaggcgaaaaagccgacgcggtgagcggccgcatcccgccactgctgcccccgggaggcaaggtcgatgtgctctgcatcaccgacaagcagttctcgaacatgcgccgctaccacgccaggtgccagcaaaaaaccaatggcagcccccagcaattgcagctcttctaaccgatccccatccatggggatcaaaatttctcttcccaatcaagcagttaccgcagttctagtctagcactcaggaataggcggcgctagaacaacgacgtaggagggacagacgacggccgactaagtctagcactcaggaataggcggcgctagaacaacatggtcgtcccgctgctccagtctgcatccagtctagcactcaggaataggcggcgctagaacaacgtgccgggtccgcgtccgccgcactggcggagtctagcactcaggaataggcggcgctagaacaactcggcagccgcatcc

SEQ ID NO: 487 - DNA, 5749 bp, synthetic construct
  misc_feature 1..5749: note = Synthetic
  source 1..5749: mol_type = other DNA
gggcgatccgctcgcactgggcctcggtgagttccatatcgttgattctcctgcgcttttccgcctacaacaacaggaaataatgataccacaaataccccgctatgtgttaacacgccctaagagaatcttcccgaaactagactcctggagtcagatcgtctgagggcttgggcgcacgcgctttttcgcgtcggcatttgcggtcagcaatgaaatgggcgacggtttcggcgggcaggcgcgcgcgaatgtattcctgctgctcctcgaacgtcatcccgcctatttccttactgatgcgctcccttatcgaacgcatcaatcgcacagcgtcgaacggtttctcaatctgatccttactcgagaacctttcacggcgctcttgtttccggggacttgtaatctctgcgttcattggactgggcttgggggcgaatcggcacaaagacaggatatactgaacatactgcactcaggaataggtggttcttgcttcggcctagattaacaagtgagaattcacaacattggaagggcgacccgcgggtcgcccttttcttatcttgaagcgagcacacatgactactgtgtgcagtaggctcagcaagtttctataatcgcccgttcacgtcatctggcgaacggacgcaaacacatgaagaaatatcgcttcggtctggatgtaggcaccaattccctcggctggagtgttctggaactggacgaaggcgtgactccctgcgcgatagccgctgcaggatcacgcatattctccgaagggagggacagcaagagcaaagctactcttgcggcgacgcgtcgggagaagcggtcggctcgccggcgccgcgaccggttcaagcagcgccagcgattcttgctgcatgagctgacccgagccggattgtttccgaaatcaaaggagcggcgtaaggaattacaggttctgaatccgctggccttgcgtgcaaaggcgttgacggagccattgaagccgcatgaagtgggccgggccctgttccatctcaatcagcgccggggcttcaagagcaatcgcaaggatcgcagcgaacaagcactcggcggagtgatttcagtgtcggcgcgattgctgctgcaacagatgggtttgattgagccggaaatgccgctggacgaatataggaaactgtcgagggaagaaaaaaagaaaattcgccgggtggaagcagaggcacgtaaacaggccttgcggaagttggctgacaacgacgaactgacctacggcttctttctttacgggcgccagcttcagcgtaatccaacccgcgcgcggccgggcgcggggcatgacggaaaattctatgacgtatatccgacgcgagaactgtacgaagacgaattcaacaagatctggcaatcccagtcgcggcatcacggagagttgatgacagaagaggtccgacagcgcgtccatcgggcaattttccaccaacgtcccttgagacctcagaagcgggggaagtgcacctacgtgccaagcgaagatcggacgttccgggctatgcccagttttcagcgttaccgcatatgtcaggaagtaaacagcctggaatggtgggatggctacgcaaacaggagaattcgggattatcccgaggctcgggatgcaattttgcgcttgctggagagagtggccacaaagaacggcctggtgacatttggcaagatgaaaagggtgttgaagacgtttgactgcgcggagggcgacttcaaattcaatttcgagacgcaaaaacgcaggggcttcgatggcaacctgaccagcaacctcatgcagcatgaagactgcataggtgaagattggcacacttggccgctggaaaggcaggatgagttgatcgacgttatcctcaatgggacgcccgagcaacaagagcgcgaccgcaagcggttagaaggggctggcaaccttcctccaccagacggtgcgagggacgataaggatctccgccgctatcttacaaagcgcttcgggctttctgaatatgcggcaggcaattgcctcggtgcgcctctgaaggacgacacggcacacatttcctgtgaggccgcacggctgattctggcaacgatgcgcgacggtcttgccgactccgaaaccggggaattcgcgcttccactccaaagcgaagccgccgccgcggtggcccagaaagtttccggattcgtggatccgtttcgcaggaaaggcgatgacggcagatatgaattgctggacagactgccgtattacggagaggcttttcgtgacgggcgacacatcattcccgggaccggaaaagaggaagatgacgacaagacccgctggggcggcgtcaccaatcctacagtgcatattgcgctgaatcagattcggctggtggtgaatgagctgattgaccgctttgggcatccgcactccatagctgtggaactgggtcgagaattgccggcaggagaagaaaagcggagggagattgagagggagcaaaagaataatcaggatagaaaccagggattcaatgaaaggctgcgggaacttggtcagacacctaacgcaagtaatcgcttgcgcctgcttctgtgggaggaactgagcgatgaccctaacgggcgttgctgtcctttttccggaaacaagatcggaatagccgacctgtttagtggacgcgccgagatcgaacaccttattcccttcagccagtcattggatgacagccgcgccaataaggtaatttgcactcgtgaagcaaaccgcgacaagggcaaccgtacacctcatgaagcttttggcgacagtcccaacggttatgactggggagaaatcgttgcccgcgccgagcaatttactgattccaaacgttggcgatttcagaaagacgcccggaaaatctggcaacaaggcgatgctgcggatttcaccagccgccacctcaacgacacacgctatatcgggagactcacccgcgaatacctggagagtatctgtcctgttgacaggattgatgtgcttaccggtcgcctgactggtctgctgcgcggtcactggggcctgaacagtgtgttgcggggtggcggggagggtgccgggagaaaaaaccgcgacgaccatcgccatcatgcggtggacgcaattgttatcggcatgacaagcagaagcatgctacaaaaggtggcgagtgaggctcgtaagttggaagagatcgagcaagtgtccagccagtcgctgggcaaactgtttccgcgcattgatggcgggaagaacgcgatcgatccttgggacgggtttagggctgaagtggcgaataccgtccggaacatcgtcgtttcacacaagatcaggcgtaaacgactgcgcccgggaaccaccgacgggcaactgcataacgagacagcgtatgggattatcgaaaaaatggagaggggcaacttgtacgaagttgtgacccgcaaacctgcttcagctttcaagacgctcaaggatattgagcgcatcagggatcctcgattgaggcaagatttccgggatgcattcgaggcagcagatgccggtcaggaggccaaggcacttcgggatctggcacaccgcaagggaatccgacatcttcgacagactgaaacctggtcagtcattccgattctggatgcggcagggaagccctacaaggcatacaagggagacagcaactggggtattgagatttatgcattccccccagggaatggaaaggccgacaagtgggagggtgtggtgatttccaggtttgaagccaaccgggaagacttcaagcccggcgaaacacgcaggccccacccggctgcgaggttggtcatgcgattacaaatcaacgattgcgtggaaatggaagaaggtgatggacaaaaattgttccgcttgcaattggttagtcagcgtggcgagatgtctttcgcagagcttcatgaggccaatgtggacagccgagccagaagcaaggaatctccgtttaagtatttgcgcataaatgccaacccgctcaagaaacgtaaagctagaaaagtgcacataagtccaaccgggcgcataagctatgagcaacgtcgcccgccgcgccgccatcacgcatgactacaacgcccgatggtcggtcaagtcgtagagattactggtcccggccattggctgaagaagtcgagaggtttcctgcaggttcacaaacgtggcgagcaaattgggcaggtgccgctcgatgacatcatcgcagtcctgatttccgtgcccggttcggccgttacaacggatttgcttgatcagttagcgcagcgcaatattcctctggtcgtatgcgggaaaaactacctgcctagctcttggacgattccggtgcagggtgccatcagacaatttcgcgtgatgctggcgcaaacgaagctgtctcagccgcgccgcaaacgcttctggcagcacattgtgcgagcaaagatcaacaatcaggcagaggtattgagccgagccggagagtccaaccaggatattctgctcatggttcggaaagtcagatcaggagacccagataatcttgaggcacaggcggcgcgcgcctattggcagaggctttttggctccgattttcgccgggaccgagcggcgccagggttgaatgccgcattgaactatggctacaccgtgctgcgggcctgtgttgcgcgcggggttatgggcgcagggctgcatccgagcttcagtgtgcaccacaggaatccgcagaatccccttaacctggtcgatgatctgctcgaaccctttcgacccattgcagaccacatggtgtggcaagcgagtgaagcctacaccgatgaactcaccgctgaaggcagagcacggcttgcttccctgccaacgctacctttgccactgccggagggattctctcctctttcgctggtagcagtaagaatgtgccgcgctttttcccgatactgtcagggagagccgatggaaaacgtagtgccgcctcttccggtaccgctgcattcatctacatgaatagtcgtaacctcagtccttatcgcattatgtggcttttcgtgatgtttgatttgccggtggtcaccagtagggagcgtaaacaggccaccgggttccgtaacagccttctggatcttggcttcgagatgtcgcagttttccgtttacctcaagtactgtccttcaggggaaaaagcgactgctgtgagcgataaaattccatctttgctgccgcccggcggtaaggttgacgtattgtgtattaccgataaacagttctcaaatatgcggcgctactacgcccgcaaacgaagaaaaaacgatggcgcggccaagcaatatcacctgttctagccggtttccatccatggaaaccggatcattctctttgttaaacaatcacttgtcgtgcatgtagtctagcagtcaggaataggtggcgctaagacaacaagactgccgcgcggcggttgggccctcggagtctagcagtcaggaataggtggcgctaagacaacgcacagggcagcacagagcgcgtcacggatagtctagcagtcaggaataggtggcgctaagacaacgcgactacacctatcacgatggaaccccacagtctagcagtcaggaataggtggcgctaagacaacagagcgccaggacgcgcgtaatgccgccgaagtctagcagtcaggaataggtggcgctaagacaacag

SEQ ID NO: 488 - DNA, 8739 bp, synthetic construct
  source 1..8739: mol_type = other DNA
  misc_feature 1..8739: note = Synthetic
tgcatcgacccaagacattgtttgctacccattaccacgagctgaatcaattggcggaaacacatgaaagagtaaagaacttcaacgtttcagtgaaagaagtaggagatcaggtgatcttcatgagaaaactacagccaggaggctcacaacacagttttggaatacacgtagcacaaatggccggaatgcccaacaaggtagtgattagagctaatgagatactgcatcatcttgaaaaagataaagtccaggagaaaaaggaaaagctattaaaagagcttcctgcaaataactatcaacttcaattgtttgagtccagtcctgctttcaaaaaggtgaccggaatgttggaccaactggacatcaacaccattagtccggtggaggcgttgttgaagttgaatgagttaagataatagtggaagaagggaagtgagttaaaatgatgaattataagtgatgtccgaaggactccttcggagagtgatgaattgacaataaaatgatgagtgataaatgataaattgaatcaaaagcgactaattatgttacccgcaccggcaaagtagaaaaactgtaatcacgcaaaatgcgtaacacaatttgcgtgatttatatttagccaaagaggaaaaagtgtataagcccaatgccacgagttttattcaaaaccatcaattgggaactccgtcttcggtgaaaagaagcctcgatgcattgctctcaaaagaaataatttttatcttctcgagtaaagtacatttatcgaccgttaaacatttacaattttaagcagaatactcggacttgatcttggtaccaacagcattggatgggctgaaaacaacaatcccagctcaaggccgggactgaagagttttttactacggaataatccttattatggtttgataaaaaatggactggtaagatacacaaaaaatgaaaacaatactcggacttgacatcggcaccaactcaataggtggggcactcattaaattagatactgaaaactttggtacaaatggaaaaattatatggcttggcagccgcatagtgcctatgcaaggagattatgtaaacaccaaaaccggaagtgcttcaaaagatccgatgagtgattttacaaaaggaattgggatttcaaaagcagcattccgtacaaagaaaagaggaagcaggagattaaagcaccgctataaactgcgcagaacacggcttatcgaaaccctgaaaatacttagctggataccagaaaattttcccgttgaattcaaagaggccaaaagaaaaggaattgaatttaagatgaaggattttcttccgtttttggaaagcacacttaaagaagcctcaaaagcatttaaaattgaccaaaacaagaaaggcgagatcaatgtgccggaagactgggtggtgtattatctgcgcaagaaagccctcaccgaaaaaatagaattatctgaacttgcccgcattctctatatgctgaaccagagaaggggctttaagagcagccggaaggatttaaaggacgaaaccaccgttatctcctatgatgaatttgacctgatgacaaaaaatggtgagtttaccgatgccgaagggagaacgctggaaacaaaatttgtcgaggtaacaaaaataaaatcggtgcaatggctggaggatgaaggacaggataaaaaaggaaatcacacttatgaaataaccgttgatagtaaccgaatacattcatggaacgaaaagagaaagaaaaagccccaatgggaaggagaggaactcaggtttctggttacacaaaaaacagataagaaaaagcaaattgtcacacagccgaataaacctaaaatacctgaggataatgattggaacctggcaatggttagccttgacaatgaactgcaacaaatcgggaaacaagttggcgagttttttttcgataaactggttaaaaacaaaaactaccgcatccgccagcaggtggtgaaaagaaaccgctaccaacaagaattaaaagctatatggaacaaacaaagcgaatttcacaatgaacttaaaagcaaagacaagctggaagaaattgcgagaatgttataccccttgcaagcggaaaataaacttgccaaatggactaaaataacaaatggttcattgtacaaaaccatttctgaggatattatttactatctgcgcgacctcaaatcgcagaaaaacctgattgatgaatgccgatatgagaaaaaacctgcctatagcaataaaaacggtgaggaaataactcccggatacaaagtggcacccaaaagctgccctgactttcaggagttcaggatatggcaagacattcacaacctgcgtgtgttgttaaaggaagatgaggaaaccggcaaggtggacatccctcttgctgatgagcttttttctataaagataaaagcagaactgtttgacttgtttaatcggcaagaagaagtatcccgacaacaaattttaaaggttattgatggcagtttttccagcaaaacccatggaataaacctctttaccaatcgtgaaaaattgaaaggcaatgaaaccaaagccctattcagaaaagtgtttaagaaatatgactttgacggagaagccctgctgaatgacaaagacaaatttcagttgctttggcacattctttattccattaggggaaaagatcatgaaaaaggaataagacgtgcgttgacgaatcccaaaaacgaatttggcaacctgcccgaagatgtggtatcgcaccttgctgaaaaaaccaaagaatttccgcaccagtatgcgtcattctcccgaaaagccattaataaactactgcctttaatgcgatgcggtagccattggaattcgaatgctgtgattaatgccgtgtcccattttttgaaatggaaagaaacggacgcattcttaaaccttggacttaaaattcaaaatcaactggaatcttttgaggctcttgaagattttgaaggactggaaacttcaacagcctgctacgtagcgtatggccgccacagcgaaagagaaagcgacttcaagtataaaacatgggaaaaaatagacccgatgaagatcatccctgccaacagcttgcgtaatcctattgtagagcaggtggtgcgcgaaaccatgcaggtggtaaaagaagtgtggaaacaatacggcaggcccgatgaaattcacatagaaatggggcgggatttaaaaagaaacatcaaagagcgtgaaaaaactgccaaaagtcagcgtgataattacaacgaaaaacaacggataaaaaaacttttgcaagaattaaaagtcggcaatccagactcgcctattgacatagaaaaattcaggacatggaaaggaaacggaggttgggaagctaataataggttcaatgaattgtttgatagcaaaaacctatttgtaaaaaatgcagacataaagaagtaccggctatggacggaacaaaaacaccggtcgccttacacgggagcacaaattaatttgagcgatctgtttacagagaaatacgaaaaggaacacatcatacccagatcgaaattaaagtatgatgctatggccaacctggtgatttgcgaagcagcagtaaatgattttaaaggcaaccgcctggcacaggtaatgataaacggagatggcggtagggagcacacccacaaaggaacaacctttaccctgctttctaaagacaagtaccttcaaaattgcaaattgtttgacaagcgcaaacgtaaaaatcttactgccgataaagtgcccgaaggttttattgaacggcaaataaacgacacccgacacataacccgcaaactcaatgaattgctgtggccggtgacaaaagacaaagaaggtttggtatttaccattgggagcattaccgctgatttgaaacaacaatggggaataaatacaatttggaaagaccttattaaataccgttttgaacggttgggaaaaatactggataaagaacttattgtgaaagatgagaaagacaagaacaaattccattttaacaaaccggacgataaagtggatttaaagcgcatcgaccaccgccaccatgccatggatgccttggtaattgcagccactacaagagcacacatcaactaccttaatgcgcttagctcacataaagaaagagaaaaatggaagtatgtggcaaaggaaagggtgcgggagttttatttgccctggcaagatttcgccaaagatggaaaagacaaactcagcaaagtaattatctcgcacaaatataacaaccgtgtgctgaacaaaccacacaatcgctactggaaatgggagcagcaacccgatggaaactggaagaaagtactgaagaagcaaaaagccaatgtgtcttggaaaactgtaaagaaggccatgttcaatgaaaacccacagggtgctatttatttgaaagaaccaaagtctgaaagggtaatagaggctattaaagtacagattgagcgagctaaaggtgtaaaagatgaaaacggaaaacccagggattacatctacgataaacaggcccgagaacaaattattaaattggttgaacaattcaatggtgatgagaatgccataaaaaaacacctgaaaaaaaatccagtaacagacaaacaagggaagtcaacggataaagtgcaggttgccatttttaaagaatatgcagccaaacgaattacggttgacaatacgtttgatgagaaaaaaataaaaggactaccttatgcagcacgcaccattgaacgatgcgaacagcgttttaaatctgaccaggaaaaagataagaagtttgtaagaaccccttctatgtggcctattcctttcttgctaaaaaagcatttggatgaatatgacggaaaaggaattgaggcatttgcaggagaaggcttggaattgctcttcaaaaaggctggcaggccaattaagaaggtgactaagtatgaaaagaaaagtaatcccatcaaattcaataacggaatttgggaaaccgcggcaggaggaaacatctattttgtcattcaggaaaacagtgataccaatgagcgggattattattccgttccgctttttagcactgacgatgccaagggtccagaacaatatggtgccatcaaccgcctgttgaatgacgaccccattgcagaggacagagatggttacaaaaacatcatcttaaaagtaggtgatttggtatatgtccccactcccgaagaattggaaagtccgcaccatattaaggacattgattggaatgggaaagacaaaaagcgtgtgtttgacagcacttatatcgccaaaagtttcaacaaaaaacaagcgttttttattccccacaatgttgcaagttcactggaatcagaagggaaagagctcggttctaataacaaagccgaaaaggcttgggatgcttcaatactaaaagacggtacaatgattaaagatgtctgtattcctattcaagttgaccgtctgggtaatattgtaaaagtgcatgggaggggaatcaccaccatcggtcaaacagaaaaactataatcacgcaaaatgcgtaacacattttgcgtaacatatattctattgctacattttttcgtaaggcattgaaaatcaaactctaatgttatgctcaaacgaaccctcttttttagcaacccctaccacctgagcacacgtgaccggcagttggtaatcgtggacaaagacacaggggaagagaaaacccagcccatcgaggatatgggctttgtggtgtttgagcacccctccatcacatttacccaaagcgtcatgcaattaatggccaaaaataatacggcagtagtgttttgtgatgagcaacgccatccttgctccatgttgttgcacctggataccaacctggtacaaacccaaattttccgccatcaggtcaatgccagcgagccgctaaaaaagcagatttggcaacaaaccattaagactaaaataaataaccaggcaaggttgcttgcccggttcaacctaagtgacagcgccctgaaacacattgccacacaagtaaaaagcggagacaccaccaatcaggaagcaaaagcagcccgcaggtactggccaagtttgctaggggctgatttccggcgtgatcgctacggccttccgcctaatgcggccttgaattacggctacgccatattacgcgcggctatagcgcgtgcattagccggaagcggtttgcatcctacattgggcatccaccatcgaaacaaatacaatagttattgtttggccgatgacattatggagccttaccggccctatgtagatttcatggtaaaagacatgcatgaccatggtatttcatgcagtgatctgggcaagccggaaaaagaaaaactgctgggcttgttaagcatggacattattattggccgtaagaaaaggccgcttatggtgggggctagtgaaaccactgcatcactggcaagagtgtttagaggcgaaagtaagagggtgaagtatcctgagttgtaaccaatggagcgtacagtacggcatactcgattaaacgcgtatcacattatgtggttatttgtattttttgatttacccacagaaaagaaaattgacaggaaaaattatacccggttcagaaaatccctgcagaaggatgggttcaccatgatgcagtactctgtttacacccgacattgtgccagttcagaaagtgcccaggtacatagaaaaagagtaaaatccaccttacccccaagagggcaagtgagtatcttgcagatcactgacaaacaatacggcaacatcgcgaattactggggtataagatcggatcctttgccgaaaccgcccagccaattggaattattttaaaaccaaattaatttcaaaatgacccaatataaggaacctatcgcctgtcgtgttttgatgttatttttgttcatataaagtaaaaaatccgatagtcagacctctaacaacgccatcttaccggattttccttaacgatattttaatgtaactcattgaatattagaaggaaacattgccaactaatatcgttaatccattttttcaatcaaaccacaacaatcaaaccacaacccagatcgccgaagccggtcagaagccattaatatcgttaatccattttttcaatcaaaccacaactaaatcgtcgtgaaacctctttatcgccagaatatcgttaatccattttttcaatcaaaccacaaccctagcagtagggtttcggcctaattctcgaatatcgttaatccattttttcaatcaaaccacaacccctacttccagaccccaagtttctaaattaatatcgttaatccattttttcaatcaaaccacaactgatttaccgcaaggtaggccaatcgctagaatatcgttaatccattttttcaattgccagcggctaagaaatatcgttaatccattttttcaatcaaaccacaacaaagtcacctgcggtgccagcggctaagaaaatatcgttaatccattttttcaatcaaaccacaacgacaacatactgacaacctgacaactgacaaatatcgttaatccattttttcaatcaaaccacaacgacaaccatacttctactcttctgacatacaatatcgttaatccattttttcaatcaaaccacaacgacaacaactgacacttctgacaacatactaatatcgttaatccattttttcaatcaaaccacaacgacaaccatacaaccataccatacttctgaaatatcgttaatccattttttcaatcaaaccacaacatcccaatagcaatgcatcgctctactacaaatatcgttaatccattttttcaatcaaaccacaacagtttaacgggggagtagtagagagggataaatatcgttaatccattttttcaatcaaaccacaacctttgaactggcggacgtggccaagtacataatatcgttaatccattttttcaatcaaaccacaacattgaagttcattgaaccgcttgcgggcttaatatcgttaatccattttttcaatccacctggctgccaatgaaaagaatatcgttaatccattttttcaatcaaaccacaacgtagtgggcatagcaaagaacgcagtaaaaaatatcgttaatccattttttcaatcaaaccacaacattgaagttcattgaaccgcttgcgggcttaatatcgttaatccattttttcaatccacaacaaaagattggggatatggagaggtaatgataatatcgttaatccattttttcaatcaaaccacaacaggcttcctaatcggattgactaccttccgaatatcgttaatccattttttcaatcaaaccacaactattgttacctcccgattgaattaaattttaatatcgttaatcccttttttcaatcaaaccacaacgtaacacctggtgcagtgatcgcaagtaaaatatcgttaatcccttttttgaaaaaccacctaattcgatatctcgtttgtaaataccagtccggggtaccaaaccattggtccatttccttttcgaatggttcatagatttctggtggttctggtatttctcccagatctttggtttctgccatccaggtattcagaatttcgcggagacgaatgagcgcctcttgatgttgtgggtcatccg

SEQ ID NO: 489 - DNA, 15189 bp, synthetic construct
  misc_feature 1..15189: note = Synthetic
  source 1..15189: mol_type = other DNA
ttaacactttctgagtgctttttggcagttcccgattttccacatatttttgcagcgtatttctaccgtggagaatttgtggagcttttattttgtcatatcgtgaacgtagttgacaagggtttacgagtgactacaatggatgacatatttgaagttgataagcaaaaagcgttatatcgtggactgggttgacaaaggttgtcctcagtagccaactactggtcacccgacgacaaaccaagcgcaatcaaactcgtttgaattgccgaggtgcgaaggaggaagagtgaaactcaaccttccgcgcagtactccacaccgcctatcgtgaccacaaaatcaaggagaatccgaatggattccttgacagaatagacacgataccaacggagaaggaacatctgtcacagctctattttcgctacggttgattactatcctctaggcatacagaagaaagttgcagattcactcaaatacatatccaatttgttcatcatttcaaatacggctcgaatattatcttttgttttaaaaacaaacaaatcaacgcattcgcggatttctgctaacgtatgttctgataaaaattctatatttttgtagagttcttgttctgcatcgctatcaagtacgacaaagtctatacgttttatatttgattcccttcgacagatattcttgaataggcttgtgaaatagtccatgtcagacaaacacattgaatgtccatagaataaaattctctcggatttattcaatgtttctatcaattctttagacatgtaatttgtatgatgagactttttgaaaaaacttaattcttgccttatcttgcagtcttgaatacctaatattgcatttttttctgttagtgttccatgtatgtgttttattcttgagttaggaagaggagttcctggaagttttgctatatctgtatagttaaaggagaaaatattaacatgaggatatttacgcaaaatgcccaacaaatgccatgcacatgaagtaaaaatgatgttgttataatctacttttttaagaaactccgcaatagcatcttctaaatgccgaaattcttgttctatcatctcatagtcaaaacggtctatggcttttgtgtattctgcgaaatcatatatagacgcttccacacctccccatgtatcgatgagacgttgcttgaatatgtaatcgaacagattcgtctcatcaggagtatctatatattctttcatccagaattcgaagtctttactatctataaaacttttatagctagtgtttaatcctaaatcaaggtcgaaaccgttgccaagtattattgtagtttgtgagaacattgccattttttactattagttaacaaacacacttgttgtaaatgaaaagcacgacttacgccgtgcttaaatttctccgaattaagggacgaagaacccaatgcgatttcacaacgggaaaaaccctttttgtgattagctttcaaattagcaggacaaagttacatttttattttcaattacacaaataatccaaataagaattgtaattttgtagaaatttcaaattagcaagattattatatgttcataaatagaaaattagtattgggccttgaccttggtgttggttctattggatggtgcttggtaagcaaagacttgcaagataatccactggagattgttgctataggtagtagagttgtgccattgagtacaacagaaatcaatgatttcaaagtaggcaaatcgaaatctccttctcagcagaaaagacttgcaaaatcttttcgacgtaacatagaccgttatcaaatgaggagatataagttggtttccattcttaagtatctcaatatgatgcctaacgtggaattgatgaaagctcctttgattgaattgtggagtttaagaagtcgtgctgctaatgttggcgaaaaactatctttggaagaaataggcagagttctttttcatataaaccaaaagcgtggtccacaattccgtattgatgatgagtcaacagacactgtatacaaggaggctgtaaatcatcgtcataaggtaattcgtgaatcaaagcaaactgtaggccaatacttttattgtaaactacagaactcacgcataacaaatccaaaaggcaagtcgttttacacatatagaattaaggacaatgtattacctcgtgaagcctacgaggaagaattcatgcaaatcatggatgtccaaatgaaattctatcccgaagttctgacaccttctatcatttctcgcttattcgatattattttctttcagcgagaattgaagtcatgcaagaaacttgtttctgtttgtgatatagaaaaacgagaataccctatacctgacaaggagggtcaatatagaatagttggacctaaagttgctcccaaatcatcacctctattccaagtgttcaaaatatggcaaagcataagtaacatatcttttactgatattgatggacaacgactttacattaaaaaggacgttcgtaataaactattcaatcatatacttacaaaaggcaaattgaatgcgagagactgttacaatatagttggtgtgtcagataaagagttttctcttgacaaactaaccttagatggaataaaaggaaatttgactctaaaccagatttctaaagccctgtctttgttgccagttacaaagagaaacgaactgctagagtttgacttaaaagtagaagaacaagttgatactgtaacaggagagattcataatgttatttcaaacgacatgctaagtgagcctctttataaactttggcacacactgtattctttgaataaagcagatgaaagaaggaaatgtcttcaaaacaattttggaatatcagacgaacagacgatagatgagttgtgcaagttgaatttcaagaaagatggatactgcaaactatcttctaaagcaattcgtcgaatactcccatatttgcaagaaggatacgattatgctcaatcatgtttgttagcaggattcagacattctgattacgtaactacagaggaaaatgagggcagacctttgcagacacatctgcctatattgaagaagaatgaacttcaccagcctgtggttgaaaaagtcctcaatcaaatgattggtattgtcaatcgtctaattgaaaaatacggtgaaatagacgaaacacgaatagaacttgcgcgtgaacttcaacgcagtaaaaaagaacgtgaagacatggacaagcaaaatcgtgagaatcttaaaagaaacgaggagattgccgaaaagttgaaaaaagaaaatggtataaataagcctactcatagaatgcttatgaaataccgtcagtttgaagaaacaggcggcaaatgtatgtattgtggtgtggatatagatttaaagacattcatgtatggtattgatacagaatgggaacatattataccaaaagcattgttgtttgataatagcttctctaattctatctgcgcttgccagaaatgtaacaaaacaaagaatgataaaacagcttacgactatatgcgttccttgggtacccaaagattcaatgactataaggggcgtgtaaagaaaatgtatgatgaaaaatctatctcacgaacaaaatataagaatcttttagcttcattcgaagactaccaagaacgtaagcgaaatggctgcgctacagaagaagacaaggaactatgggaaaattatattgaccgtcaaataaggcagacacaatacatttcaagagcagcattaaagatgttaaaaaatgtatgccgtaatgtatatgcttccagcggtacagttacaagtttcttgcgtcatggatggggatatgataacatactacatgatctaaaccttcctgtatatgatgctgcgggaattggacttaccgaagatgttgttgtcaaacaagatggcaaagacattcaagtccatagaatcaaaggatggaataagcgtatggataatagacatcatgccattgatgctcttgtcgttgcgtgtacaaaacaatccattgtacagagactcaatgaattcaattcgtcccgtactgagtttgaagaagaagtaaagtcgggcaagaagaaaagattcaaaaacaagaaatctatgttggagaaatgggtggaaataaatacacctttctccaagaaagaagttgcagagaaggttagtggtattatagtatcataccgtacatctaataaggtagcttcttcttcaaccaatagatacttatcgaacggaaagaccattgttgaaaaaggtataatttccccgagattaccgttacacgaaagtcatttgtatggaaagataaatggtaaaaacgtatatcgatattctttatctgaactttttctgaaaaagaaggatgtaaatattgaggatgtcttgaaatctatcgttgataaaggtatagttgctattttggaaaacagaatcaatgccggaatcatcaataacgattcaagcaagaaaccttatgatgttgaccctgcaaaagctaaggagaatcttgcaactttagtttcaaaacctcctatgcactctaatggaacaccaataagaagagtgaaatgttatgtatccaaacctacaattcctgttcgtactgattcgcatgggactgtaacggcttatgctgttagcggtaataaccatcatattgagttctataggaatgacaagggtgaattcaaagaatctgtcatttcttattggcaagcctttctacgaataaagaaccaccttcctttgtttgtaaacattgataacgcttcaatcttacgcaaggcaagtgaagagggttttgacataggagaaatacatgattcgtcatggaatccttttctgtgtttaggaaagactgagcttgttgtaataggattgaagaagcggacaattgaaaatctcataaaacgtggagattactcaaaaattgcatctcatgtatataaagtttgtggagtttcccaaggtgattatacgttttgcatacataatgaaataaaatatgtcccaaaagaaaggaacaaacctgatggtagatttattagaattcaaaacatcaaatcactggcaaatcttgaacttgtcaaagtgaaaataaatcctataggcgaaattactattctgtaaaaaggaattggattgcaactatcaaaacaacagaaagttgcaatccaattgttgtaaatgatgctaatttgtttgctaatcacaactaattgacgagagccttcatcagttgtggagttgtaaatgatgctaatttgtttgctaatcacaacaggtcgatattcgcaagtcggtttatgatagttgtaaatgatgctaatttgtttgctaatcacaacgagcaacggcaagaccgataagaccatccagttgtaaatgatgctaattcgtttgctaatcacaacatatagcggatgcggaagaaacgcttatgatgtttaatgaagccaatctgcaaacgctatttatgcgaatgcggtgcaaaggtactaaaaaaatatggattttcagcatgttaagggcttcgggaggcgaaaaaatatgatttttgtgttattatgccataaatatggcaagatacaactgataaactggcaattctgatgtgcgcgaaacaagaaacactgtcattaggatgaagaaaaatggcgcgagggaattgtggcacgatgattgcataaatcagtaaaggaagatggcagaaacagcgtttcattcattactccatacggaatggtgcacgaaacgctgtttttgtgtcctgacggaatggagcgaatgtggaaacaatgtgtatggctgattccaaatagtattagttaacggaaacaatgttgtggtggtatcggctatatgtctggggcgacggcgacagtgtttccacattattcactttcaaatctttatcaaactatgagtgaaatcgcaactcttagcttggagcgcttgaacaatggtgctcactttttgttcatttcgaacgtattggctcgtgctgaggccgatgcgacaatcaagagtaagctcagcacacagattgcttcgctgaagtctgccaaggagcaggaggacgaggacttgaagatttcgcaaaaaagtatgctgaccgatgacatcgctacagccgatgcttagcgtgacggactttacagcggttacaaaaaggctgttaatgacttcagcaatctgcctgtggagaacatggcataagcagcaaaggtactgatgcaacacatcaaggactatgccatcgacccaaagatgcaacttgataaggaaacgagacactagtgattattaaatataaatatgtcaaagaaatctacttttgtatgatttttcttgctcaaaagtttgtattatcaatgattattcgtatctttgcagcgtcagtcctcgccaagcctcttaacaatgctcaaatcgtgcgaggcgttttttgtttatacacatttgaacatggcgaatcttatcccctttacaaaacggtttgaatcttcagaaaacctcgttgatttgcttgaatctcgaggtttacaaatttgtgatagaaacaaagccatacaataccttgacaacattggttattacagattgtctgcttatatgtatcctttattgaagatgcccaagactgcacatttgtacaaggatggttcaaccttcaaaaaggtgatgatgctttatcgctttgacaagaaactgagactgctcatgttcaatgaaatagaaaagattgaaattgctatcagacgtgcggtgatgcaaataacggcagatatgacaggcaatcctttctggcttactgaatcttcttatttcttggatagttcaaagtttaatgaaacaatgcgagctatatccaaggaatacagcaaatctaaggaggagttcatcctccatttcaaacgaacctactcagaaccttacccaccatcgtggattttaggagaactgcttactatcggaaacgtcaatgccatttatcgcaacattaaacaaaatcgcatacgcaaacgcatagcaaaacgttttggtttacctatcaatgtgtttgagtcatggctcacggttattgctgttactcgaaatgcctgtggccatcattcaagagtatggaacaaacagaatgctattcagcctgcaattcctaatagtcctgcaggagaatggataacgcagccaacagattccatgcgtgcttactttgatctttgcatcatcaagtactttcttaatgttatatcccccaataatgatatgcagtccaaactaacatggttgttcattcggtttcctgaaattgacttaaaagctctcggctttccgcagggatgggaaacggaaccattatggaggtaataacatgtggaatggctactgatcattcacttccttacatggtcttctttgtttcggttttatcatattatggagtcggttcaaacgactccatccaatccatatctatgtaattttgatgtaactgaaagttaaatacgttaaatcttcaccttttcgtatctaaacagaatccacacagtcacttttctatcgtttagagcgtataatactgataatcaactaataatacattctgaccttgaaactatgtctgcagattcgccatacaggcaatcaatcatcttttaggcatgattccaatcaattcctaatacctgtatgatgcctttctaatcaaaaataggatttttttgtaattttgcaccgtaataacaagatattcttaacgatagaataatagtatacttacggaagagcaccgtttttttagattatgaagacaacgagacgcaacatccttctgtcggcactatgctgcatcagcaccagtatggcgaatgcacagagtttctggggcaactataccactgagtggcaatgggatatgaataaaggtaccaattgggtgaacctgctgcgactggaaatgagcgttccgctatggaagggcggttccttggaagccgctacgctgcatgtggcgaagactggcgacggcatcatcgacgactggcagggattctcaaacatagaggccgacaatatgtttgccggcattgccgtgttgggatatatgcacgaatggaaggcaggacacctgttcgtgggagtgagaaacgtgaatgaggatttcttcacttccgacgtcactgcactcttcactaacagttcgtgcggcatcttccctacaatcgccgcaagctatccgatagccaactatccactgtcaggcctgacggtatatttcgacgtaagcaagggaggatggacattcaggaacagcctgtataatggtgtaggctataatggatggaagcaccatgacaatccgttcatcgtcaatccaaagcgtgacggcatcttcaacatttctcagctggagtattcctggcgtggcgctttgtattatgccggagttactctccatacccgccggttcgtcttcgacgacgaaggtgagatggcgccagccgatgaggctgtccacaagacgagctgcgcctggtgggtgtatggcgaacagccggtgtggaaatcagacgggaagaccatcacctgtatggcacaatattcagaaaacacctgccgcgagagcggttgctaccgttatgctgaggctggaggcgcttataccgacagtctcaacatgtgtggcatctccggacagtatgcacagttctgtcaggacaatgaattctcgctggaactgacatggcggcgacagctcaccaagtcgatagccatacagccgtcattccaatatatcaacaacggtaacggaaacttcactgtgctcagcacacgcctttgttgcagtttttgaaagagagcacattgccccgcataaaaaaatggtcattagggctgtaatcctaatgaccgatcaaacaagatcccctcttctaaaaaatcaagttacgagccagcgctaatggccgattggggttaaggaagaagcggctttcctacacatccgcttggtgcctgtacatgtagcagggcagctatagtaggagtgatatccgtcatctccgtgagttctgtggtgctgccgtggcttacgccccatcccatgaagatgagggggatgtgtgtgtcgtagggagtccatgctccgtggtcggtgcctttcatgctgtgggcatagaaaccaggtttgagcacaatttgcacgtcaccgcttctgccgtggcaataaccgttgatgatgcgccgtttcacgtcgtcgggaatggtggcagtcatcactttgttcatatcgcaggcatagtgcactgaagagtctgtcagcagttcgtcaacgacacattgtttgatgcggtcgtagtcgagatgcagctggcggattctggcgatatcgaagaacacctgataattcatcacctcacttactatcttgccacaaccggggaatgtctctgagagtctggcattgagacggtcggcaacttcagagttgctccatgccccagccgggatgcgacggtcttgaaggaagcgggcgttgttcatcgctccatggtcggcagtgaggaacacgagataattccctttgcccactttctcgtcgagatagttgaggaagtctgcgatgctgcggtcgagtctgagatatgtatcctcaatctcaacggcgttgggacccacctgatgaccgatataatcggtgctcgaacagctcacagccagcagatccacatcgtcgtcttcgccaaggtgctcaccctctatagcggcgcgggccatgtcgaaggttatagaattgccgaacggcgtcttgcggattatctcataaccatatttcttgtatagcgacggcaggtcgagaggcagcagtgccttttcgccagccttgatgccgtcttcatattctgtgttgtcggcagtgctttcgatgtaggagtctttgggatatattgtctgccatttttcagagagatatttctcggcgtgcctctcgcggttgaaacgagtcacccatgcgggtagcttgtccatatagtatgtgcttgtcacgaaattgcccgtctcgtcgtcaaaccagaatgccccgtccggggtatgtccggcaggaaggatggaggcacggtctttcagcgaaacgcctacaaccttagatcgaccgttggtggcgagtttcatctcgtcgctgattgtggttacccacaggttgcgcggcgacatctgtcctgattcgctcttcgttcccacgggggtcaccgtcttgtcggtggtgcaatataccttcttgccgtctttatagaagttgttgccagcaatgccgtgtatcgttggcacgctgccggtatatatacaggtgtggcctatcgccgtgaccgacgggatatatgggatgcgagtgttctcgaatgaatatccctggttgagcaggcgtttgaatccaccttctgtatagcgctgttgataacggtagagatagtcccagcgcatctggtctatcacgatgcccaccacgaggcgaggtctttggaatgtcagattagcggacttgccgtcctgtgcctgcatgccgtagcatgacaggaacaaggcagcaagaactgtgattgtctttttcattttcaaatctttactttgtttctttatccccaatcggtcattatgatttacttggattttggtgttttagaagagtggatttcaatcgtcagaccgtctggaagtatggtaattacatccatgctccgaatcgtgtgcttggcagtggagcggtgaaataatagttgatgtcgttgttgctgtcgaggaagttcaccttcttcattccgaagaatgggagtccgccggggaagagacggctgaaatctgtcacaccgccagagagggcaggactgccgggctgaaagttgaaatcccatgtcttgtcgaaagccagtggagcacctttctccaatttgtcagcttcacagttgatgtccatattgtcgctttgacggaaattcttgaagagcgggtcgagctgacctgccacgctgctcttgatgtcggtgtcaaaccatatagcgagcgatgctccctttgccatctgctccacgcccttctctgtagaagcgtaatagtagttgggagtgaggcggctgtgctcaatgtctacaccatcttgtttcggctgcttcagaccgtagcggcaatcatatacgaggttgttcacgaagacaggctttgctgccttctccacccataccgaaccacctttcttgttcttggagcggcgccatccgcaatccactatggtgttgttgtagacagtcatctcagtgagcggaatcacttcgctgttgccggcattagaaagcttgaatgcattggtgcaggcgttgtagatgacgttgttggcaacatcgagcttgcagccagctttcacgttgatagcctcgccaccgtcggcggcattgccggaatcggcaaagatgttgtttacgatcacgccgttgccgccggtgaagtatgtctggtcgttgtagttgtcgtggaagaagctgtcagcaatgacgaacttgccgttcacattgcagaagtggaaggcaggcacaccgccgtcgatggtagtcttgaacaatttgttctggaacgatgccgacgattccgtcggtgtggctccggcataggcgatgttgacatggctgagcactacctcctcggaattgtatccgcagattattcctccccagtcttcagtcttcttggtgtcggaagtgaaagtgaccggcttctctgccgttcccatacaatagagattgccaagcaccacgatttctacaggcacctgaacctccgacttgcatgtcacggtgactcctggctcgatgtatagcgaggtgccgacaggtatctctacgctctcgctcagagtggtgtccttggtccataccagagagcccttgggatattcagccatggcggtcttgattacatcggcagagccctggttcccgttgctgccgttgttgttaacgtaatcgtatggattgatgttgtcgttctcgcaagatgttgagaacaatgttgcagctgccataatcagcgcactgtatattacttttgaccttgtcattttatttctttttttgtgatttgggtttctgaaagctaaacactctttacattacagtttgtatctcactccgagaaggaacgtccttccgtatttgtatgttcccacgatggtcttgtccttcttctgtccttcgtattccagattgtccgagttcacggtcttcagatatctctcgcgctttgcgtcgagtaggttgtttgccttgaagaatatcgagatgccgtttttgaactgcttctcggcgctgaagtccagaccgaacattgccttgtcccactggtcggcattcttgaatggcgagacgagagcgagtttggtgcctgtaaacgaggcggcgagttgtgcgttccatccgttctccgtatctttatacagtagggagaggttggcggtgtgtggtgcttggttcacgagcggacgggtctgtgtcactcctgtcttatactctgcactgccctcctggtattcacgctttgatgtggtgatgcgggagtgggtgtaggtgtagtttgccttcacaccgaagtggcggatatattttatcacgtcaatctcgaagcccatgttcttggcgttaccgaggttgtctggcatatagtaggcatccgttccggcacctatcttaccgtctgaagtaacgaacacctgctcgataggattcttcaggtatttatagaatacgccgacgagtatctgctccgtcttacttggaaaccattcccatctcaggtccagattgtcgatgcgtgcacgtttcaggttcgggttacctttctcctgatattcctcgccctgaatctgataaggcacgatttcatagaatcccggacggttgatgctgcggtagtaagagagtctcacgttcatcttcgctgtcggtgtccatttgagcgatgccgatggcagatagtcccaatagctctgttcgcccacctgtcccatattgcggaaatgctgaagcatagtgtatatctgattggtgtgctcagcacggaaaccggcatacacttcgcctatcctgctcttcagagtcaccatggcataggtaccgccgatatgctcctttgagtcgtagttgagctgtgaggcttgagaatacggagtcttgcacacccagtcgacattggcaaactggtcatatccgtttccgtcgagcttctgagagatgtcggcaggattgaagatatacgagtagtatctgttgctgcgctccttgcggcgatattgcgctccggctttccatagagcgtcaacgtcgttgccgaaatgcgtgtcgtatgagaggttgatgtagcccgcccaatcggtgtctttgttgtgttggaatctgcgttcggcgttcttcggcagcgtctttgtgatgttcttgtctgtgctccatatcgaaccgcccaccacgtcgccttcagcactggcatctcggctgacggaattggtcagcgtgatgtatgttctgtcggggtcttcctccttggcctgtgagaatattcctgaccagtccacggtgaagtctttagtgagatgatgtgttcctttcaggtttgtggcgaagatgctctgtgtggcagatgtggagcgcacctcgtcgtcctgtgtgtatgagtcggcagcgatatattctgtgctgatgccgttgtcgtagcgaacgcctttagagttagacctaacgtacatgttataccattccagcttgtgttcaggcagtgtcaggtctatcttggcgtgcagaccagaggttaggtcgtggatgctgtaatagcggtggtgtaggtttgagatatacatcgcctgttctcccgatgccatcttcacggagttgtatgtacgctcagtgccacggaaggtgttctggatgcttccggcgagcatcactccgagacggtctttccagaaacggtcgccgatgctcagtccgcccacgaagttgggggcaggagtagagtggctcttcagacgcaccggaccgttcttgaagtcgctcatcgtagccttgtagtcagcaccgttagcctcgtatggcgacttgtgggtatagtcagaacggtcggtggtgagatagtctctgccgtctttccagaaatagtcggtggctccgatggcggcgtttgcctgcagctggaagcgagaaggagcgtccttcatcaccatgtccaccacgcctcctgccgcatcaccctccatatcggcggtgagcgactttgaaaccaccagacggtccatcatgtcggatgggaagatattcagaggcacatagcggttcttgtcgtccgggctcggtatcttcacgccattcacgagcgtgtagttgtatctcttgtccataccgcgcaggatggcataagaggcttcgccggaggcatcgcgctccatggtgactcccgacacgcgctggagcacgcttgccacattcacgtctggcgagagttggatgctctgctggctcatcacgttgagcactgtgccggcattcttcaccgtctccacagcactgcggtctgaccggtattcgctgtgacccgtgaccactacttcgcccaactgtctggcatcttcgtccatggcgattgtcagctgtccgtccttgccgtctttagcccctttggagtagtcttttgccacatccaccactatctcctttgtcttgtatgacatataggtgatgacgagggtgaacttgcctttgtcgggcagttcatgcagagagaacgtaccgtcgaggcctgtagtagtactaacgttgggcagttccttcacccgcaccacggtgccgatgagcggttcgcccgtcttgttatccttgactatgccgtcgagcgtgtgagctctgacggctgtagtcgcagcggcaagaagagccgcactaaaaagaatcttcttcatctgttattttgatttctgaatctcgtgaatcactttaccttccttgttgatcatatacatgttgagatgcttcttcgaagcagagatgacagagaaaccgtcatcggaactgcagaacacggtgcccttgacggattg

SEQ ID NO: 490 - DNA, 14085 bp, synthetic construct
  misc_feature 1..14085: note = Synthetic
  source 1..14085: mol_type = other DNA
tcaaataataaggaacaccaccaaggaccatgtacgcctgtaacactgcaattcttggccagcggaattttctgcttttgagatattcttctgtttgcccaagagagaacggacggagatgcatagtgtgagtagcacgtttatggagtcctgctttattattaacaatattacgcatcatccatgatgtagcagagccgcatacaacaaaatatatgttgtcaatccatgacgcacggctattccagaacaagtctaatgcttgtagaaatcctgagcgatgagtgtcaaaacacggcagttcgtctatgaacacaaccaaccgacgtttgcgattcctgttcttgcgttctaacaactctgcaagttgagtaaaagcctcaatccacgaagttgccttatttcctttgtgaccatatcgcaccaacgcattgtggaaagcctccatttccgtttcccgcgaaccgtcaatgacccctgtagcataaaagtcaaactgatccttaaagaaactccgaattaggaaggtcttgccaacacgacgtcgaccatacaatgcaataaattcactcttccccgactccatatagtcagcgagtttaccaaattccgcttctcttccaataatcttttccatctgcttcaactcaagttgttatatccaggcaggaatgatagaataatccacatcatgcctaatttgctgtttcaaagatacaaataataattggaatcaaaaatatttcgggcggaaacttgagattttttaatgtttccgcccgaaataagacctcaaaagtagcatttatattgcttccatcatcttatatacctttgaatttcaagtaataattcaaaggtcacgtacttatgacttattattagcttttgaaaataatcaatagcatagagatttaattattgaatacgggcggaaactgcgattatttgcatattcccgcccaagatatgacagaatagccaagcaatgacaaggagagcacccagtcattggagtctctggcacaggctgatagcctgaggaaaatcattgaacagcgtgacaacgagatcaatgacatgatgggcactccaagtccgctaagatattgaccacacatccgtcgagcagctacacccttgcacaggatgccaagaaacagtatgtgctgaggattaccaatccgcaaatcttctggagtacaagtaagtatcttgtggtacttgtaaagtagacagtctcaaaaacaaagataccttcgtgagctcacgaaggtatcttcattacaaaggtttttttgtgccttttccagcaaacgtttgcaagtatggttgcaaagctttgcgtgggcggttgcaaagctttgcgtgggcggttgcaaagctttgcgtgggcggttgcaaagctttgcgttggcagatgcaaagctttgcgtctgggatggtcaaaaactgctcaccctccggggcactgtagcccataggaaatttcctgtatttagagccttataactaaccataacttactatgaccaactaaacataaagccttgattttcgatactatttgatttttaacactttctgaaaggcgagttccttgcttacttcaagaatgtggcagacaagaagaactctaagtggcaacacgtctatatgcactttcataccttcacgcaaggcaagtgtacctttggggagataaacgtggacttgtgcaacagatttcgtgagtatctgctgacagcaccacagggactgcataagaacagaaagctacatataaactcagtagccaactactggtcacccgacgacaaaccgaacgcaatcaaacttgcttgaattgccgaggtgcgaaggaggaaaccgaaaggtaactttccgtgctttgttacatacagcctatcgtgaccataagataaaggagaacccgaacggtttcttggaacgtatcgagacaatcccgactgacaaggagcatctttcacaggacgaggttatccgcttggttctaattattttcaggaaacaatactaccccgactctcatcttcgttccgcaatgtaaacaagagcagatactacatttttcttcttcgctcgatggatggcacaatctttccgttccaccttttgaagtccacataatcacgatagatgtttctgttaccatttcgcatcttggcatacatccagcttttcatcaccttaccacacccgacattgtaggcaagcgcagccaaaaacaaggaatcacgaccaaatccacggaacatggcgcatagctttctgaggtcagagcgcagcaaggcatcggcttgccgctccgtcattcttgaatgataattaaattttgggtcgaatacttttataaaattcttttttttctttagctgatgcagttccaaatttgtttagaacttctttgtaaagttcaggatgtctatagagagttaatggccatctcctatacatattatcaatattccacattgaaaatgatctatgtgtaggatttgccttatcaagaaaacgcataaaggagaattttatgcctttcttgtcagttgttaggctatggttcttatctgagactttacgaataatctccgtattaaaatattttaaatctttgaagatcaaaatttcatttgcattattgataataattctattcaataaagatacgtcttctttgtttatgtaaatattccatgattttctattacctattttatagacttcgctgtcatagaacattattgcatgattgggagaaaatggcataaatatacatatccctttgttttctaatgtcattttgtttcttgaaccacatatttcaaagaatggattcataatacaaacaggattgtccgatgttataaaactaattggaagattgtcttggatatttaatatcttacatctaagatccatacaagcaggcaacattgtcaaagacatagccaacgaaactggtgctgggtaatcaaaacgaaaacataaatgctcgtatgtaccgtgtgtcttattgaataagtctaagcaagaattattaatctcagattgaagttcatttgcttttgataaagttcttcctctttgtgttaaagtgaaaattaaagcattaagatgatgtataatactcatctgcttttcacttccattaatgaacgatctaaatgcttctatgccaaacttttctatctcactaatctgcttctctatttctatgtcttttgagtaaaaatagttttgactagccgtattacgtataggtgaagatgctataattttttttctttttatattatagatagaaacattctttccgtcttcagaaaagaacttcatataagattgtggtatgtaatgatgatttttgtttgctggcatttttctatagcttaatctgtgttagaattttaagcaaattttaatgctaaacttaattcaaatattctacgatttattgcactatcggactttttttattttgaggaaatgcgatattaagtaatagatgatttcgcagataattataaacagagttattacctttgaaaagtgcagttctaccattataacattttgcaatgtctaaagcttgctcctttgtataactatgtctctttctttccatgtgcccaagacaaagaatttgaaattcctttcctcttttacatattgcagcatataaatttggatgttctgttttaaagtcctttagcacatcataattcttgctcatctctatacagaatgcatcacttattcttttgtgattttctggacgtctcatatgtttcgtcgcttcagcaaataatcctctctttcgggctgcattatatgcaccaggatcgctttgtctccaagctataattgacggatgcttacttgcactttcaagaatttcttggtttgtccgtttaggacggcaggcatatttcatatgtgcaaaacacttttctgcccaaccttccttacttatgattattgcatacgcaccagcatgggcttttttaaactgtcctcttgtatcgtaatcggaggctaattttatatattcttctaatgattttcctttgggaggattgggtaataaagaattttttagttcttcataaattcctaatcgtatagcagcgttcatcattgccctgtttctttctgcaaactcttgttgatattttagagtattaacaaaatctctaatttcttgctcagtatatggtttacttacccctcttgtaagatttagacaaagttcctcgtatattcccatagcttttgctgcgttgatggcagaaggacatttcttgtaaacttcatgtattgttttgcattcttcaaaacaggttctaatatgttcttcagaccatgttgtcctttccttaggcaatattagctcaatttccttattccatttcctctttaatgcaaaagcatatgctccaggaaacttctcacgaaattctaaataagaagaacatacatttacacattcaaatatagccttctttgtccatttgtatgaacatgtacctaattctcctcctttggaactattgagcattatccaattttgagaatattcctttatatatcttttttcttctatttttgcttcagcttctggaacgtaatctgtcaattgaacaaaattaggctgcaaattagaagcgacagaatgtagataaatgggagaaggcttttccgctcttttattcatatggcgttgccatctgtctgctgtattccaagtaagaccaacataagcatatccgtcatcaaatgtggctacataaacacatcttttctttagatttcctttatgttgcattttactacaaacttcgtcaagaactccatgtttatacgcccattggtaagcccagtttgattttgtttgaaaatcagacctatatttatatttacttgcttctttctgtacctcatcgaaagtccttttagggtttaaacttgtaatatgacgcattgcaatatcctgtatttttctatgccgtatggcactgtatagccatcttgggatatctttactgtattgataatgcttgcacaacttaatcaagtctttatcagagtacagtttgagattatgtctatcattctttgactctaaggattgtgtcattgttttacttttacgattgttacaaatttaagaattgtaataacttttttacaaagatacaaaataatccagactttatatatcgatattaaaaaaatattttcatttgcaacaaataaacttgagtcggatcttaaatacatggaacctgaactttgtcatatttacaagaaacctataataaaataggaaagatagatatttgtagaaaaaaagttccctattcagatttgaataaggaacgtattaactatttatcgaagtaagacttttgttgtgcaaccatcaactttcactattacaaaattctcattagtactaaaagtcgccactccaccatttattttacctttgtctattaatatgcctaaagcattaaacaaaagaaccttactatgttctgtaccttttacccaaactgtatttccattagtcattacagaaaaaggagctttcactatagttttattgattcctgttatgtcatccatttcggatatatcccaaaaatttttccaaggctctacacttttataaatggaaagagttccctttggtacgagtactttaatatccatatatccactataagaatatgatggagccttgggtgggttggtacaatacagagttatgctatccaatcctccattgataacaggaatttgtgttacatttggaccaacagacaattttgttataccccagaagactttttgagtagatgtaccactgtaatcaaaagcttcaatatttctacctaaatgtaatgaaatattatcaacaacttggctaaatactccagtatgcatttttagaatattttccccatcctcgatttctatatgctctatgccgcatttgtaaaaagcactcttatctacagacattatattagaaggtattgttacatttttcagagaactgcaacccatacaagcgtctcttggtatttctttgatattttcggaccatttaatatactttaattttgtgcagtccataaacagacttggcgctatctcttctacagagttaggcattattatttcttctaaactacaaccttcaaacgcatcctttatgatagttatgcttgatggaatcgttacagaatttaaatctgcacaacgataaaaagtagcatctccaatagctacgactttaaatgtacgccctttgtattctacagtttcaggaattacaacgtctccagaataattgttaagcattcctgtcgtttcaactatcattttttctaatgataatacattgtaatatatattatcaaccttaaaatcataagcagatgcattaaatgaaaaaaataatagtaataagataattggaagtttgtacttcataagtcaaaaaaattaagttaaaaatcaaagcgtgagactctacacttgtccgtcacttattcttggtcgtaggaaaccattgcttgatgacgaacagatagaatctcacgctgaaagttatacgtaccccttaaaagtgtgccgatgaggttaatcctccttggcacactacgagggttgattatacaacctacccgtgacatcttctctgctaagccattgacaagcattttgaatttcctacgttcagaataatcaatgaacaaagcgttgatgacgcctaatgtatgtttgcaaacgcatttattgcgaatgcgcagcaaagttacaaaaaaataataagaataaagacattatttgttatcgatttcgtaaaaactgaaattttagtccaattatgccattataatgaccaaaccatcagccaatatgtcaaatccatagtgcatgatacaagaaaccgtgtcaacgatggcatgaaatgtgtcggtaagggtttgtggcataaaaattgtataattcattatcggaagaaggcagaaacagcgtttcttgcattactctgcagttgctggtatatcttcttttgttagatggaagggattattttttttcttcccatctcttgaaattcatacagtggcaatagttgttccttctcttataaataacagtggcatttcatttgaatgaagggtgacttccttgcctacttcaagaagaaggcagaagagaagaacaccaagtgggagaacgtgtacaagtactttgagaggttcgtggaaggaaagtgcaccttcggagagatcaccgtggacttctgtgtcaagttcatggagtatctgcagacaacaccgcagatacaccgcactgtaaagaagctgcacaccaatactgctgcaggttattggtcaaccgacgccaaaccgagtgcaatcaaactcgtttgaattgccgaggtgcgaaggaggaagagtgaaactcaaccttccgtgccgtacttcacaccgcctatcgtgaccgcaagataaaggagaatccgaatggtttccttgacagaattaatacgatatctttggaggtattgttgttaaagcattaatcagtgattgacgcgccttccagttggcatgcatgcacaaaatgcaggttcactcatagatatatcaaatttgttcatcatttcaaatacagcttgaatattatcttttgttttaaaaacaaacaaatcaacgcattcgcggatttctgctaacgtatgttctgataaaagtactatatttttgtagagttctttttctgcatcgctatcaagtacgacaaagtctatacgttttatatttgattcccttcgacagatattcttgaataggcttgtgaaatagtccatgtcagacaaacacattgaatgtccatagaataaaattctctcggatttattcaatgtttctatcaattctttagacatgtaatttgtatgatgagactttttgaaaaaacttaattcttgccttatcttgcagtcttgaatacctaatattgcatttttttctgttagtgttccatgtatgtgttttattcttgagttaggaagaggagttcctggaagttttgctatatctgtatagttaaaggagaaaatattaacatgaggatatttacgcaaaatgcccaacaaatgccatgcacatgaagtaaaaatgatgttgttataatctacttttttaagaaactccgcaatagcatcttctaaatgccgaaattcttgttctatcatctcatagtcaaaacggtctatggcttttgtgtattctgcgaaatcatatatagacgcttccacacctccccatgtatcgatgagacgttgcttgaatatgtaatcgaacagattcgtctcatcaggagtatctatatattctttcatccagaattcgaagtctttactatctataaaacttttatagctagtgtttaatcctaaatcaaggtcgaaaccgttgccaagtattattgtagtttgtgagaacattgccattttttactattagttaacaaacacacttattgtaaatgaaaagcacgacttacgccgtgcttaaatttctccgaattaagggacgaagaacccaatgcgatttcacaacgggaaaaaccctttttgtgattagctttcaaattagcagtgcaaagttacatttttattttcaattacacaaataatccaaataagaattgtaattttgcagaaatttcaaattagcaagattattatatgttcataaatagaaaattagtattgggccttgaccttggtgttggttctattggatggtgcttggtaagcaaagacttgcaagataatccactggagattgttgctataggtagtagagttgtgccattgagtacaacagaagtcaatgatttcaaagtagacaaatcgaaatctccttctcagcagaaaagacttgtaaaatcttttcgacgtaacatagaccgttatcaaatgaggagatataagttggtttccattcttaagtatctcaatatgatgcctaacgtggaattgatgaaagctcctttgattgaattgtggagtttaagaagtcgtgctgctactgttggcgaaaaactatctttggaagaattaggcagagttctttttcatataaaccaaaagcgtggtccacaattccgtattgatgataagtcaacagacactgtatacaaggaggctgtaaatcatcgtcataaggtaattcgtgaatcaaagcaaactgtaggccaatacttttattgtaaactacagaactcacgcataacaaatccaaaaggcaagtcgttttacacatatagaattaaggacaatgtattacctcgtgaagcctacgaggaagaattcatgcaaatcatggatgtccaaatgaaattctatcccgaagttctgacaccttctatcatttctcgcttattcgatactattttctttcagcgagaattgaagtcatgcaagaaacttgtttctgtttgtgatatagaaaaacgagaataccctatacctgacaaggagggtcaatataggatagttggacctaaagttgctcccaaatcatcacctctattccaagtgttcaaaatatggcaaagcataagtaacatatcttttactgatattgatggacaacgactttacattaaaaaggacgttcgtaataaactattcaatcatatacttacaaaaggcaaattgaatgcgagagactgttacaatatagttagtgtgtcagataaagagttttctcttgacaaactaaccttagatggaataaaaggaaatttgactctaaaccagatttctaaagccctgtctttgttgccagttacaaagagaaacgaactgctatagtttgacttaaaagtagaagaacaagttgatactgtaacaggagagattcataatgttatttcaaacgacatgctaagtgagcctctttataaactttggcacacactgtattctttgaataaagcagatgaaagaaggaaatgtcttcaaaacaattttggaatatcagacgaacagacgatagatgagttgtgcaagttgaatttcaagaaagatggatactgcaaactatcttctaaagcaattcgtcgaatactcccatatttgcaagaaggatacgattatgctcaatcatgtttgttagcaggattcagacattctgattacgtaactacagaggaaaatgagggcagacctttgcagacacatctgcctatattgaagaagaatgaacttcaccagcctgtggttgaaaaagtcctcaatcaaatgattggtattgtcaatcgtctaattgaaaaatacggtgaaatagacgaaacacgaatagaacttgcgcgtgaacttcaacgcagtaaaaaagaacgtgaagacatggacaagcaaaatcgtgagaatcttaaaagaaacgaggagattgccgaaaagttgaaaaaagaaaatggtataaataagcctactcatagaatgcttatgaaataccgtcagtttgaagaaacaggcggcaaatgtatgtattgtggcggggatatagatttaaagacattcatgtatggtattgatacagaatgggaacatattataccaaaagcattgttgtttgataatagcttctctaattctatctgcgcttgccagaaatgtaacaaaacaaagaatgatagaacagcttacgactatatgcgttccttgggtacccaaagattcaatgactataaggagcgtgtaaagaaaatgtatgatgaaaaatctatctcacgaacaaaatataagaatcttttagcttcattcgaagactaccaagaacgtaagcgaaatggctgcgctacagaagaagacaaggaactatgggaaaattatattgaccgtcaaataaggcagacacaatacatttcaagagcagcattaaagaagttgaaaaatgtatgccgtaatgtatatgcttccagcggtacagttacaagtttcttgcgtcatggatggggatatgataacatactacatgatctaaaccttcctgtatatgatgctgcgggaattggacttaccgaagatgttgttgtcaaacaagatggcaaagacattcaagtccatagaatcaaaggatggaataagcgtatggataatagacatcatgccattgatgctcttgtcgttgcgtgtacaaaacaatccattgtacagagactcaatgaattcaattcgtcccgtactgagtttgaagaagaagtaaagtcgggcaagaagaaaagattcaaaaacaagaaatctatgttggagaaatgggtggaaataaatacacctttctccaagaaagaagttgcagagaaggttagtggtattatggtatcataccgtacatctaataaggtagcttcttcttcaaccaatagatacttatcgaacggaaagaccattgttgaaaaaggtataatttccccgagattaccgttacacgaaagtcatttgtatggaaagataaatggtaaaaacgtatatcgatattctttatcggaactttttctgagaaagaaggatgtaaatattgaggatgtcttgaaatctatcgttgataaaggtatagttgctattttggaaaacagaatcaatgccggaatcatcaataacgattcaagcaagaaaccttatgatgttgaccctgcaaaagctaaggagaatcttgcaactttagtttcaaaacctcctatgcactctaatggaacaccaataagaagagtgaaatgttatgtatccaaacctacaattcctgttcgtactgattcgcatgggactgtaacggcttatgctgttagcggtaataaccatcatattgagttctataggaatgacaagggtgaattcaaagaatctgtcatttcttattggcaagcctttctgcgaataaagaaccaccttcctttgtttgtaaacattgataacgcttcaatcttacgcaaggcaagtgaagagggttttgacataggagaaatacatgattcgtcatggaatccttttctgtgtttaggaaagactgagcttgttgtaataggattgaagaagcggacaattgaaaatctcataaaacgtggagattactcaaaaattgcatctcatgtatataaagtttgtggagtttcccaaggtgattatacgttttgcatacataatgaaataaaatatgtcccaaaagaaaggaacaaacctgatggtagatttattagaattcaaaacatcaaatcactggcaaatcttgaacttgtcaaagtaaaaataaatcctataggcgaaattactattctgtaaaaaggaattggattgcaactatcaaaacaacagaaagttgcaatccaattgttgtaaatgatgctaatttgtttgctaatcacaacaataataacaactttaataaacatatagatgttgtaaatgatgctaatttgtttgctaatcacaactaattgacgagagccttcatcagttgtggagttgtaaatgatgctaatttgtttgctaatcacaacaggtcgatattcgcaagtcggtttatgatagttgtaaatgatgttaatttgtttgctaatcacaacgagcaacggcaagaccgataagaccatccagttgtaaatgatgctaattcgtttgctaatcacaacatatagcggatgcggaagaaacgcttatgatgtttaatgaagccaatctgcaaacgctatttatgcgaatgcggtgcaaaggtactaaaaaaatatggattttcagcatgttaagggcttcgggaggcgaaaaaatatgaaatttaaggttcatcagaaatatggagtgacgcattattgtatattattcctgaagtagattattaaccgaagtgggtgaaatagtttgccataggacatgaatacgtttgcatccttgataaggttaataacggctcagtggaaataacatggggaaggggtcctaaatgaaggtgccttttcacgcaaacgtttgctggaatagttgcaatgcattgcgtgggcagatgcaatgcattgcgtctatctctattctatattgtccactctaagtgtaagtttgccggctggtacccgtacttctaccatgtcaccaaccttcttgtttaacagagcttgggcgatgggtgattttatggacagcttgccctcacggaggttggcctccgatgtgcttgtaagcgtgtatgtcatttgcttgccgttgccgatattggttatagtgaccttgcatagcaggcctacggtgtcactatgaatttttgacttgtcaatgactcttgcaaattccagtaccctctgcttgtagcgtatcctgccaagcaaacgtgcctgctcacgctttgccgcgcgatactcatagttctcgctaaggtcgcctttgtcgcgcgcctcagctatggcgtcgcgaacgcgtggcagctctacgctttccatgtagcgcagctcttccatgagcttgtcgtagcattcttgtgatatatattccatataatcggttggttctcttaattccttgttgtaagttgtaatgggtgtggaaaggtgtttgctgtggttcccaaatccgctgcaaaggtaattattttgattgtattacggtctcgtaatcacagttttttttgttggctaccaagaagaacaacggagagattacgacaccggcttttgctgttaacggaaatgctacgctgaccttcaatgctgcagcgcaggaaggtgatatcgagactttaagaaacaacaataaggtttacgacttgcagggtagggaggtcaaggctcctggcaagggtatatatattgtcaacggaaagaaggttgttctcaccaatgcacgctgataaaggaaaatttggattaaggtcaatatataaaaaaggctgttccggattgctggaacagcctttttttgatactattaatgattatgcaatgtctatctgacgttgaatcttcttagcttcgtctttggtggcc

SEQ ID NO: 491 - DNA, 24698 bp, synthetic construct
  misc_feature 1..24698: note = Synthetic
  source 1..24698: mol_type = other DNA
agcagctgctctacgtcaatatattctgaaggggacatatcttttttggtaaaaagatcaggccttgcagtatagatcaggttagtggtaaacgaaagccttgaatgctggttcaactggcctttcttcgaggtaagtacgattacgccgttaccagctcttgctccccagatagcggatgcggctgcatcttttaaaatggtgatgctctctatgtcgttgggattaatattattgatatcaccctcataaggaaaatgatccaggataattaaaggcgcggtggaagccaggccaagggtgctgattcctcttatttgcacgggagcatctgcattattacggtgatcaaaaaataccgaaggcgctattccatccagccgggaaaggatggaagtaccggtgctacggttaagcagtgccttatctatctgctcataggaacctgtggcgcttttcttatcaaattcctggtagccggtagatacggttacgtcatttaactcgaccacgctttccgttaggatcacggaaagcggcgtttcactgacggaatctacccgaatttccctggaaataaaacccacatgggttaccaccaatacctggtgttgctgtacgggtattacaaaatcaccgctagcacccgttatggttgaaaacgttgttccttttacggttatcgtcgctccgggcaataaacggttaccggtgcgggaactaacggttccggatagtcgaatatttcgctgcgccatcgcatgaccgatcaaaaagaacgttattaaaacagctgttgttattttcatttcatttagtttggtttgaagtatattttgattgtttatcggtgatcacaagaatggtaagcaacctgtctgtgaattttatttgaaggccgtgacactttagcatttcctgcagcaggggcacgcttatgtcctcagcgccgctgattttttttaggatcatattacccaacccgctttcgtctattaccggtatattgccgtaattattattgagcgaataaataatgctttccaatgaagagcctgccccttgcgtgggagaaactgctatatcccgggctgtaactgtgagtgtggaattagcgctaataacccagcaaggcattacccttttttccagccttccatgcagctgcaaataaaaatcgaggtcttcatttatttttcgtgtaatagcttctataggcaggcttgttgcaaacgaggcctcataacaccaggcatttttttgaagccattccctggaaacgggcttcccccgtatataggcatacctgcttttatcggccataccaagctgaataaaagcaggctgcaaccttggcccatacagcgcacgcatgtacaaatccaccaccggtacattcaccatcgaaattcttcgaatacccctcaccgtatctataactgtagtaaaccgttcgggaacattatccatgtaagaagtaagggcactgtacattactgaggcagggtaactgaaatcagggatagtagtttcattgaggtgcaacaatgggtgctggtaactaaagttgtctatgtcccgcttaacaggcaactgcaacttatcgcccgccagtattgcactaatgttagcctccgtaatatattcaggatacgttatggaaataacggtatcgtttctaaccagtatttcgtgtggtatgtaggtatggggaaacaattgcgcaagtactgtatcttctgctatcaccgccaaattaagcggagctatatttttccttttcaggaaagaactaacctgcctttcagattcgggggttaccattaatacctgcaacttgccttcgaattctttttgcagcgaatcgaggcgcggcattgctttaatacaggcaatgcatcccgtggtcataaaatctatcagcaccagtttattgttcaaatcttcggttttgatttcagaggtggtatagtgcataacctttaataatgttatcggcggcattctgtcaccaataccaagaggttgtaaagaagtcaattgccccttgctcataagcgggcatagcattatcattaagcaataaatctgtttcattgcattggttttattggatgattaaagcggtgaatggggtataggtaaatactgcctaagtggggttcttaggcttgcgctcgtagagatttttgagccattgtaccagtgggtttacagaaccgttttccataagaataataatttaacgggtggtttcattattgttcggtaaaaggggtggttgtatctcctgcctgtaaggaacttttattacaggccggtcaaatatttgagattgttcccaataaaagcaaagatgccttaggtctctttgtaatgttctgcgcaattgggcacttggttcctgcttatccaaatcgtattgatcatttaatacctgtgttaccaggtgggctgctgcagttgcatctttcaccaggcgcaaagcataccgttccagcaggggccggtaataagcgccggcgcttaccgtgttagtttgtgtttgtgtcattgccgtatattttggggctgctaatgaattataaaaaggggcagtgtttttataccaatagtgtataggagtaaacaatgcgggaaaagaaggcgcgtacactacctgcgggaagctaactgctgttgcctgcaaggcaaggcaggaataaagagcggagcccaaattttcattactaagacctgagaaaatgtccctataacaaaatgagcagccgctccttaaagagttatctgtatttattttttgtctcattgcccggaattctcaggccccagtaatgagagttaaaattgaatccaaatcaaatatagtaaaaaaaatataatgacgtacatgtacgacaacacttttttctttctttcattacttacgtttcgaaatgaaagtgcaagatcatataagtcctattgaacagtacgtaattgattttatcagaaaattccgaattgataaagaactttctcaggaagatatcggcagtataatagaagtttccagatcgtatattggagatatagaaaatcccaacagcagggctaaatataacttaacacatataaatgcgttggcagactattttgatatttcaccacaaatttttcttccagagaaggctttaataaagaagcaaaataaaatgaaaggtattactgcaacttcgccaaaaaatataaggcaaagtgaaaagattattaagaagaagaggaacattagttcatctggatcaaaaaagtaagagcaacttattatccatttaacgtatctatatactccgtacaaatcttttgaacgacagcttgcatttgataaatacgatctattagtttttttaattcctcttctgtaatcgaataatcattcttataccgtgcatccacgtaacctcttttcagaagttcaaataaatgtatctcttcactatcatctataggaaatgggaatatagtaaataactcctgcgatagttgctttgcataatgtcgaagcttatccaggttatgggtcttgggcttgtatccagtgaagaccaacaataccgtattataaaaatgttctgccgcctgatgcaacagaaataccgatttcttaaatttctttttgtcaagatacagcaacacgccgtcaataaaatctgaggcatcaacaaaccaaatatcataatacatttgggcaatagatttcatttcctctttagataatatcctcgggctagaaaattcaattgtttcattatctgataataaaactccttcattaatgatgtcggtgaaaaagtattgcccaatttctagaccctcattgacgtatttaacatcatgtataattgcatttactggcgtcttaaaaaggctacgacttcgatttacaattttatcaattatatcgtattcctttaatacgctattcttggttacaattaagaaatcgtaatcgcttatatattcataatctgtaccattttcaaaatatctgtgctcaacccaagtgtttgttgcatggctgccaaacaatataactttttcaggcgcggccacttctttaatgatctttacgatttgaagtatttgctcctgttttatttgaggaagatgggagagggaagtcttcataaagcaaaaataaaattataatattagtatcttgaatttttgaagaacaaaaattatcttgtagtatgacgctttatgaatttaatgcattggatgaaatggagcaggccgaggctgtttgggattctgtttttattgcagaccgtgaagattccgagcacaatattttattataccaacgagatgcgttttatatcgaagtttattatcacaaagaatataatgtaataagaagatttcgatcattttcatcaacagaacaattgaatccgtatttggaaaaaatgaagctaaaaaataaattttaatttccaataccggttgaatttaaaaatgacagactttcaaatctttaaacaagtagttgttttattgtattcaaaaattttccctaaacataacggaggagagtacacgttttcgcaaatggcttttaagctaattgttatttggctaccaattttaatcctgctgatttggttaatagcaaaagcccttcataaattttaaataagggcatcttatgataaatatatattccaaataatgcaatttccttaatacaatatgataggccatttcaaactaactcaacgaaaatttatagtatcttcaccgtattataacgctgacggctacacgaatcatttctttttaatacggggtacaattttttgtcctctgtgaccttctgccgggcggtttatattggcagacacgtgggttgaaatcatgaagtttttcgcagtaattttaaacagaagaaaggaaaatggagaagcttaggagagtgaataatgattttgtgtaaggaagaaccctcgtcggttgccatttaatttacaatttccaatcgtagtttgttttatcacaaccacatctgattcttttttttactgtatcgtaatttttgactgaaacaggttttttacatgctgttaactggcaataaaacagtgcttccatagcgttcagatctatccaaaaagctttgatatctcctaactttggagaaattgaattgtcatgcgaaagcaggtttcctaaaatgtttgaattgattattctgtcaataattggcatttgggcctttaattcattgctgcatttgtttattttggccttaagttcatttaataattcgtctggcattcgcttctcatttagctcattaaatctaaaatttactttcacttcaagatttacagcaatatcttttagcaaatgttcaaggtattttctgatgggatttgcaagtatgctaacatcaccctgagctaaactagcttcgataattgttcttaactcggatggctggtcatcgacgtgtgttccatctgactcattgtattttaactcattgattgaccaattttttctttttgcaagttgggatacatactgataccattcgtgttcgtgggttaataaaattatttggcaatcagcgaatttttcaaaaattaaatctgcgaatcgctttctatgattagtgtcaaaacttgaaataacgtcatctaaaaccacaaatttattttccttattgaatgcggcaactgacgctaaaaagaatgataatccaaaacagtttaagtgtgattcactaaaatatttttgtggtggagatgtggggccacctttgtattgatactgaattgtaatcccgtttaactcatcttcctcgccaatagtaataatcttcaattccttgaattgctctcctgggttcataaactgatagtattcatttattgtatctgaaaatgtgcttatgaaatgctgcaatccttctttttgctttttcacaaattcattgtaaatgagttccatagatgctctttgatcttcaagaactttcttttctttttcaaacttctttattcttaaaaaagcttcttttgcagatgatatatttgagtaggttacagtattgttatccttttttaatgatgtttgtataacatctattttcgtcgctaggacttctacagttgcaaagtctactttggtaagtttcaatttcgaaggttctgaaatcatattgccggatgtgaccttttcttttccttctttctcgtacattgaaattttagtgattaaatcctcaatcgcttctttaatagatttaaacctttcatcattataataattatcaattcttaaattatcgagcctctttattctttcggttgcaattttcgtaattgattctttggttgagtcaaaggcagctttcatttttaaagactcttcaatttcctgtaatctattcttaatgtcttgaactagctcatcctttcgcttgggttgtaaacataaaggacaagtatcatctttatgaaactttttttcaataactgtgctaccagcttttagcaaatcggcaagaaaaactttcattatattttgaacattgtcagcaattttcttatactcgtagtagtacttactatactctgaattaagaagttcgatttcacttttaagaaccgtcaaagcagttttactgttttcaagaaatctaagctcgtttagaatcctaatatttgcaggcgcttttagtaaggtcagaactgaatcgatatcatttaaggagttgacaactatggctaaattcaatggagaaataatgtgattaattttctcaaacaaatctttctctacaccgatcgaagcgcctattttttcaatctgtaattgcttttgagtattaatctgtgattcgtagttctgactttttatttcagtttttaatgagttgtacccttttttcagaacttcttttattttattaacttcagcatatccgattacatccgacaagcttttgagtttttcacctttcggtttatcaatgaagtctcgaagatgttgatagcgaagaataagattttctttttgagttttactgatgtaagaaataaaatcggtgtccttattggaaaactcagaaactaactttccttttttagatgtaagggtttttgacgaattaaaacggttccttgtaaattcaatttcaacaaatgaagtatctgcatcggaacaagcagaacttctaagggcatcattgagaacaatctcggaacccgacaggtgtgtaacctcatcattaaaaaaccattctaaagaatcggatatgctactttttcccgtgccgttatcgccatatagcagaatagacttttcagaaagcgacaactctattttatttttaacgccgcgaaggcctgatatgactatttttttaatttttgttgacatctttatctcgtaatttttgaagttcattttttagatttgtgtccgacaactttccctgttgatacaacttcgcaagagaatccgcaagtacttggtcgacattttcaatgttagttatgttcaaaaagaagtcttccaaaatttcaattccagattttactttgttatccatattgtagtttatttaaaataactccagtcaattttaaaatttacatttaattcgctgctatgtatttcagcgccagtcttattattacagatagggtaaacaccaaagtgctcaacaaaacttaaaataaaatagctttcaaggtcttcaattctgaaatgccagtttgctttaagaatatcaaaatttatgtaagtaaaaagcaaaggagatttttttctataattcattaaaccaacattttttgattttccgccaaaatgcccaatcaatctattcctaatattatttgttttcctttcactcatgcctatgtaaagcaacctcgacttgtcaaacgggtattctataaatgtgttttgtgaaaaaataaagtacagccccactactccgcttaaatattctatgttggtggcttcaaaaggctttgcttcatcaaagtaaattgaaatagtttgcattatttatattgttcaagtttcatttatccaaaagggatacaacatttggaattaaactataatggatgctaagctaaaagataaacttgataaccaaaaactggtaattatatcttattgcctttttaaaaatgtagcattacctgctcaccaaaaaaatcagcaagctctttcatttcatttttaggattattaaaaaccatctgtctgtatacattaacattccataataatatttattaatcatagggtgccagacctaggcttgcccgccgacacttgatggcattctcctttaaaatacttaccattagattcgaatgagacgaggatacaccggataaagattattaagaaatagttgttttgaaatcacttcgtttgtagattagctcatgtctaatataaatctccctaaatatgaacaccctattataaaatatagcgagttggcttacaaacgtagaagtttaatattaaatcaaactattgaccttgaatctgcaatgagtagatatatttctattttttatgtatgagatttatacacgatggaagaactaacccaactaattttaaataatatcactttcaataaaaaaatacttatagttaaagaaataatatcaacaaaagacacccttttcttaaaggcgcatccaacaatttttaaagatttagtgaaaattaggaaagtaagaaatgaaatggctcatactattctttacattcaagatacatttgttggcaatagacataaattaaaacaagacgttactaagttgggtaataaacaaatagagtttgatgaaaaaaaataacagaattatcagaaatgataaataagtattttaccgttttttatcattggactaatattatcccaccgccaaaaaaatgagcttcccctgcttcttccttcgcctagggtacttgcaaatacagattatcacaacctatgcgatgaggttaaactaataaaaatggcttttaaaacaatggttattttggactgatttggttaataacaaaagcctttcatgagttttaaataagggcatcttatcatcaaaccaactcttcgaaatttatagtattgcatttattacaacggtaacggccacacgaatcatttctttttaatacgggctagcatcttttgttctctgcgcctttccgccgcgcggtttaaattgcccagcatgcggcttgcaagctgaaaatttttgtactactagaataaaacgaaaaagtggcgcttgcctcgaaatgggaggggccttaccgcccttccggtgtatggcgattcattcatcaccaggtaatgctgtatataatctagcttccgcttcgggacgtttgattgtgagagggtgttgtctcccataatgctgaaataaatgatagaaaatttagccaatgtctaacattcaaattactttaatttttttaaacaagcaacaggtcagtctagcttaaagtgcttcgaaaacataacggttaggtttgcacgttgttttctcaagtggcgtttaattactgtcttggtgtaacttttaattctactgatttagccaataacgaaaacattgctaaatccgaatcgtcgtctggggatttagttaataattgttggtttttaaatcgccttgtattcgtcttcgcatagtctttcataaaaattttaccttgtgaaccgcttcatttatcaataaaaaaattaacttaggtgttctaattgtaacatcccaccggaaaagagaactgctttgtgcttttaaacagtgcaaatcgtaagaggtattaaataaaaagccccacagagcgcaagcgatgcagggactgagaaaatcttcggctttggccttgcggcgcgagccttattgtgatttgtctttcaattcaaatgtacatcaaaatttaaaataaaaatacgatgccggaaaatcaaattttatctctcgacctcggaagcaattctataggagccgttgtaagaaatgcaattgaagaaaaccagtttggaaaagctacggttactacttttgaaaccggcgtaggaaaggacaaagaaaataaatacaccatttctcttgcagctaacaggaccagtaagagaagtatcaggcggctttatcaatcgagaaaatacaaattatgggcagtattggaagcgttgattaaagacccaaataatttgtattgtcccatcaaaggagaaagcctgaaacgttggaaacattacaacaaagaggaagcacagaaagaaaatggtggaaggcaatatccggtaaatgatgtacttttcgccaactggatcaagttagatttcaacaatgacggagttcgggattacatcagtccttaccaattacgtaacgagttagctaatgtaaggctcgactttaccgttgaaataaacaggtttaaacttggaagagctctttatcatattgcacaacaccgtgggttcaagagcagcaaaattgtaaataataaagatgatgaaaagcgtgaacagagtgaacggacagatcacaatgaggaaggcaacattggggctgaaaaacgaaaacaagagaattttataaaggaattaggaaagatagggtttgcttacgatcctgaaaaagatacagtaggatcattatttgcccgagtggaaacagaaggcattcatcaccccgaaaggaaaacggaaggaattcgcattcgcaagaatctgcatcaatatgtcacccgaaaaatgttgattaaagaagtaaagcagatttttggggttcagcaattggacttcaacgatattttcggggaaaagaataccaaaatttctataactcattcttcaattttctggcaaaggcccttgcgttcacaaaaaggattagtcggttgttgtacattagaaagctggaaaatatttgataagaaaaaaggcagagaagtttttgttggcaaaaaaaggtgcgcagtaagcagaccggaatttgaagaattccggtcattgagttttattaataacattgcttatcgggaaaaagggaaacacgataatgaatggcattttttgtctaaagaaatgcgacatgaactttaccgggaaaagttctttgttcaaaaagattttgaattttttgatattgccaaatggataaagaagaaaaacaggcatgacaagtgggagcttaactacaactataaaaccaatgtatcagcctgcattgtgtctgcccggctaaaaaagatctttgatgaagattggaacaaacctgttacaatggtcgacagaagtgggaaaccttatacagttcccttttatgaagatttatggcatgtattatttggaagcgatgaccaggactttgttgaagaatatgggagatcaaaattgaaattagatgacgaaaaagttcagcaactgcgttcactatggtttaccatgccggtggactatgcacaattgagccttaaggccatcaacaatattctaccgttcctccgcgaaggctttatatatactgacgcagtattattaggtaaagtgccggaaattctcggtaatgaaatctggaacaagaatagggtgtttatcacggaatcgctcaaatcctctgtaattgaaaagaatcgtgaagaaaaaagattattaaatattgtcaataaccttattgctcaatacaaagctcgtccaaaaggcaatgaccgttttgcagaccatgatacttcttatgtagttggttcaatagatgcgcaacttccttctggaagtaatgaacgagatgatgtacaaatagcaagagcagctgaagaaggttttggtaaggaaacatggaaaaagctttctgaggaaaggcaaaatgcactggagcaaattactgaatactaccagcgattcttcaagtccggtcaacgtgatttttataaactgccgcgactaggggatgctatgaaaaagttccttgcagacaattttccaaatcagttgtattgcccgaacacatttaaaaaattggaaactggagaagaaaaatgccactgcggaaaatgcaaaaggctaaataaactttaccatccttccatgattgccatttattcgcaggcaagagatgaatattacaaatacgacggcaaaggaatacaaaaggtaatgcttggttcgcccaaaacaggtgcgttcaagaacccaatggccttgcgtactttgcatgaattaaaaaaattagtcaactattatattgtcacggagcaggttgatgaagaaacaagagtcgtagtagaagtagctcgtgaattaaacgacaccaataagagatgggctattgaaaaataccaggaaatcaggcgcaaagaaaacgaagaatttggagcagccattcttgaattacttaatgatcctgaagcagtaggttcgttagccaatgcagattcagatagtgatattgataaatttcggttatggtacgagatgattgaattgcctgaaggatttgagaaaagtggtaaattcaccgcggttgaagatgaccgcacagcaaaggaacgaaaaggtaagcgtaaaaaaaagaaagatggcgaagacgaagatttggatgaaatggagtattatgagtttagtgaaaaccattttgaaaacatcaaaaaggaagtatgggtaaaacttaaaaaagcaaaagatagtgtagttgaaaaatataggctttggaaagaacagcagtgcttttgcatttataccggtaatcctattagaattacagacttgtttaaagactctgtaattgatatagagcatactatcccttgtagtatttcatttgataatagcgttgccaataaaacagtttgctttgccaactacaatcgtaatacaaaaaagaatcaaatccctactcagttatccaactatcccgaaatagaaacacgtattgccacatggaaacaaaaagtaaaagatttagaaatgcgggtagagttctggaaaggaaaatctaaacgagccagtacacctgaatataaaaacaaagctatccgagaaaaacatctatggcagtttgaattagattactggagcaataaagtggaccgatttaccatgaaagaagtaaaaccgggcttcaaaaacagtcagttaaaagacacacaaattatttctaagtatgcccttcactacctcaaatcttatttcaatcatgtagaagtgcagaaaggggaagtaacagcgcaattccgaaagatatttgacatacaggaaactggaacaaaaaaagaccgtagcaagcatagccaccatgctaaggacgcaatggtattgtctgtaattcccgttgctgctattcgtgacagaatgctggagctttggtatcaaataagagaagaagaattattgcttaagtcaaatacagaaaaaaagaaatcggctatcgaggaaaaaataaaactacttaaggatgaactattacaactaaaatatcaatgcaatctaccaaaaggatttaacaatagcataaagcaattagatgaaaccatattaaataataacattgcccgaaaccgttcggtaattcctgcttctaaaaaagtgcggtttaaaggaaaagattttgtggccaaaggagatgcgatcaggggtgaattgcatctggctaccatgtacggaaaacttcaaatggtagaaagagatgagaatgacaagccattgaggaatgaaaaaggtgaatggaaatttttggaaggcgatagtgctttcaaatttggtcttagaaaaggagttgataaaaacctggacatagataaaattgttgatcctgcattaaaaagaataattaaagatcaaatgagcaatcgctcacttgctaatactttgagtgaagatggcggactttatatgttaaataaatccggtgaaagagtccataaaatcaggcatatacgttgttttgcaaatgacgtaacaaaccctgttcgagttaagaagcaagacattcaaagtaataaggaacataaaaattattattgggctaaaaatggtgaaaacattctatgcgctctttatcagaaaaacatcaaagacaaaaaaggcaacaagagaattgatcgtgaattagaaatcattacccttatggacgttgccaaattggtgcaagcaggtgaaattaaaagtattgatgatttggaaatatacagaaaggataaacagatcggtgaagtaatcattgatgaaaacggtaacaaagaaaaaccttatgcaatattcaagccgggcataaaggtgattttttatgatgaaaatccagatgagttatataaaaaagaagacgaaaggaacgatgactataaaaaaaggattagctatcgtacttacgttttagtgaaattttcaggagtacaaattacatttaagcatcatttagaaaacagaaacgatgacgaattaaagaaagcatatccaaaagatgaatatggaggaggcggtactattgggtttaccaagaaggtttcggatgctttaatacaaaacaaatttaacaattttgagccctggcctaaattgttatatactatgaattggttaagtatggtcatcgaaggcaaacactttgaagtactgccggatggaatggtaaaatggaaaatataaaatgatcaagtgcacctttttttagcaatctgtctttttttaaacaacaaacaaatgctaattgaaatacacaataacatcaaaaaacaaaattggcagcgatgaaaaagttcaacctgccgtaataaatatggtatttaaaatgaaccattatggatcaactccagccttgcacatactaccacatttttaaccatgccaatggcgatgaggctttgtttcgggagccggagaactaccggtattttctacaacagtactataaacatataaatggcatagcggatacatatgcttattgtttgatgcgaaatcattttcacctgctggtgcgcttagaaacggcggaggctattaccgcacacctgccaggtttcaaaaacctggcaggtgtggccgcgtctaatttattaagcaagcaattctccaattttttcaacggctattcaaaagcatttaataaaaaatacgaacggcggggttctttgttcttagagaattttacaaaaaaagccatcctgcaaaaagattacctggcagcagttattttatatattcatcttaaccaggtaaagcatggttttactcaacatcctgctcattggaacgtgtcatcgtttcataactttcatgtggaacggctgcccgttttaaaagcgctttatgaaaactccgaaaattatttcaggctgcatgaaggaaaaataaatagctacgcggaatatgacaacctggagcgttatttattgaattgaaaaccatacatgataaaacgcacactatacttcggcaaccccgcctacctcaaaactaccaacgaacaaatggtgatagaaatgcaagctaccggcgaaaccaaatcggtgcctatagaagatattggcttaataatcctagaccaccagcaaataaccatcacacaatctttactggcaaaactgctgggcaacaatacagccgttattacctgtgacgataagcaccaccccgcgggtatgcagctctgtttagacgggcatacgctacaaagccagaagtttaaagcacagattgcggccactgccccattaaaaaaacaattgtggcagcaaacggtaacagctaaaataacaaaccaggcagctgtattaaaagaacaaaggccggaaaatgttcctgcagaccacgctggtaaatatttaataaatcttgccgctgctgtaaaaagcggtgataccaccaattgcgaagctaaagcggccatgtattattggaaacatgtatttcccgctttcttggaatttaaaagagaccggtttgggctgccacccaataacctgctcaattacggttattctattttacgggcattagtggcgagaagcctcgtagcaagcgggctcctgccaacgttaggtatttttcaccgcaaccagtacaacgcttattgccttgccgatgatgtaatggagccttaccgcccttatgtagataaattagtttgcgcaattataagaggcaacgggaaatttttggaaatgactcccgccatgaaacggaacctgctaagcataccggcattggacgtaataattgacgggcaaaaaagccctatgatgaacgctgtgcaacgcaccaccgcgtctcttgccaaatgttttgaaggtgaatcgaggaaaatgctttacccgtttatggattaagtttccgtatagggctggcacccattgctatccttaccggcaccgtgagtgagtagctaaaataaatttcggcaaattttcgttcaacactaatagcaataattataaccatgtatgagcgcctgaacgcataccgtattatgtggatattagtacattttgatttaccgaccgaaacaaaaaaagaccggaagaactatgcgcagttcaggaagaagattatggccgatggtttcaatatgttccagttcagcatgtatataaggcattgcagcagtaaagaaaatacagaagtgcatattaaaagagtaaaatctatattgccacccaagggccatgtaggcatcttaaccattacagataaacaattcggcatgatggaaatcttccgtgggcatgaaccaacacaaccgcccgaaaccacccagcaactggaacttttttaaacgaaaacaggaataaaaaactgaaacatatccatttttttattcctgcaaaagtagttcaaacactgtattaacaagcctttcagccaaatgcgatgtgaaagaactaagttaatatcattcgttgaaagcaaatcacaacggttcgattccgggaacgattctaaaacttgatgtgaaagaactaagttaatatcattcgttgaaagcaaatcacaacatgtaggtcaacattctgcctgtagtattggatgtgaaagaactaagttaatatcattcgttgaaagcaaatcacaacaatatagatgcaataataaattcctgggctgatgtgaaagaactaagttaatatcattcgttgaaagcaaatcacaactccattactgtaattccaattttccctgaagatgtgaaagaactaagttaatatcattcgttgaaagcaaatcacaacggcaacggctgcttcctggagatctttattgatgtgaaagaactaagttaatatcattcgttgaaagcaaatcacaacaatgttgaagtaggtgttatcatctggcaggatgtgaaagaactaagttaatatcattcgttgaaagcaaatcacaacagatgcaatagcttggtcaatatagagcagatgtgaaagaactaagttaatatcattcgttgaaagcaaatcacaacccattgaagaaaacatcgcaagtgctaatgatgtgaaagaactaagttaatatcattcgttgaaagcaaatcacaacatatctacaggtggtaaaaatatcgggttggatgtgaaagaactaagttaatatcattcgttgaaagcaaatcacaactgcgagaacgtggcgccgtaacacattaaagatgtgaaagaactaagttaatatcattcgttgaaagcaaatcacaactattacaagacaaagacgaaaacgaattaggatgtgaaagaactaagttaatatcattcgttgaaagcaaatcacaactaacggttcagaattggtagaaacttttggagatgtgaaagaactaagttaatatcattcgttgaaagcaaatcacaactttacaagatgtaaacgcttaaccttttgggatgtgaaagaactaagttaatatcattcgttgaaagcaaatcacaacggcaaaacgcctactgttcctgtggtagatgatgtgaaagaactaagttaatatcattcgttgaaagcaaatcacaacaagtaataacggtttccccccgggtctcaagatgtgaaagaactaagttaatatcattcgttgaaagcaaatcacaacgtattcctgctcttcgcccgttcttaccatgatgtgaaagaactaagttaatatcattcgttgaaagcaaatcacaacgcctttgcttcagcttcagtgtattttattgatgtgaaagaactaagttaatatcattcgttgaaagcaaatcacaacggaagatatgatacgctgaaatataagttcgatgtgaaagaactaagttaatatcattcgttgaaagcaaatcacaacggttctaatacttctggcataaatttttgatgtgaaagaactaagttaatatcattcgttgaaagcaaatcacaactaatttaccattatgaaaaattgttttaagatgtgaaagaactaagttaatatcattcgttgaaagcaaatcacaacagcagtggggcattactaaatgcagtgccagatgtgaaagaactaagttaatatcattcgttgaaagcaaatcacaacattaccgttgcaacaggtggtacaggctatgatgtgaaagaactaagttaatatcattcgttgaaagcaaatcacaacagtgcagcaggaggtaattctggtataattgatgtgaaagaactaagttaatatcattcgttgaaagcaaatcacaacgtaggagttcacccatacattactcaaacagatgtgaaagaactaagttaatatcattcgttgaaagcaaatcacaacaacataacaaattgactccatgtaaaagtggatgtgaaagaactaagttaatatcattcgttgaaagcaaatcacaacttgtgcattagttttatttgagtaatcataagatgtgaaagaactaagttaatatcattcgttgaaagcaaatcacaacgttgtttgctttgttaaaaaaaatccctggatgtgaaagaactaagttaatatcattcgttgaaagcaaatcacaactgactatcattaaggccaatgccttcaatagatgtgaaagaactaagttaatatcattcgttgaaagcaaatcacaacgttgttagtgtaagtatctacagaaggttgggatgtgaaagaactaagttaatatcattcgttgaaagcaaatcacaacttgaatccttcaactgcaaatgaatatgaagatgtgaaagaactaagttaatatcattcgttgaaagcaaatcacaacaacacctctcttattatagcgtttatcccgatgtgaaagaactaagttaatatcattcgttgaaagcaaatcacaactaccaggaaataatattcttaagaaactttgatgtgaaagaactaagttaatatcattcgttgaaagcaaatcacaacctaaaaactttttggtagcagttattcacggatgtgaaagaactaagttaatatcattcgttgaaagcaaatcacaactaaccgatgttaacctgtatgtttctacctgatgtgaaagaactaagttaatatcattcgttgaaagcaaatcacaactaactctttcattcactgcaaccacaggttcgatgtgaaagaactaagttaatatcattcgttgaaagcaaatcacaacattggagagtgcgacaacttcgattatcagatgtgaaagaactaagttaatatcattcgttgaaagcaaatcacaaccgtgtgccgccgttgccgagcaacatttctgatgtgaaagaactaagttaatatcattcgttgaaagcaaatcacaacaagttgcccggcaagggcagatttccccacgatgtgaaagaactaagttaatatcattcgttgaaagcaaatcacaacagccaagggtctatcattacggctattatggatgtgaaagaactaagttaatatcattcgttgaaagcaaatcacaactaatccattcaattcaatgcatattgaaatgatgtgaaagaactaagttaatatcattcgttgaaagcaaatcacaactaatccattcaattcaatgcatattgaaatgatgtgaaagaactaagttaatatcattcgttgaaagcaaatcacaactaatccattcaattcaatgcatattgaaatgatgtgaaagaactaagttaatatcattcgttgaaagcaaatcacaactaatccattcaattcaatgcatattgaaatgatgtgaaagaactaagttaatatcattcgttgaaagcaaatcacaactcaagccatacctttgggttaactgtatcggatgtgaaagaactaagttaatatcattcgttgaaagcaaatcacaacagctgtagttactgctttcaataaatttttgatgtgaaagaactaagttaatatcattcgttgaaagcaaatcacaacaaagcaagctggacgccgccgcgccgcgaagatgtgaaagaactaagttaatatcattcgttgaaagcaaatcacaacctgcttaatgcatggccgtttacggttgtaggatgtgaaagaactaagttaatatcattcgttgaaagcaaatcacaacatccattatttgagcattcaaatcgcggagatgtgaaagaactaagttaatatcattcgttgaaagcaaatcacaaccaaagtttgcctatgcggagccagcggcctgatgtgaaagaactaagttaatatcattcgttgaaagcaaatcacaactaataaaacagggactacattttcctgaaggatgtgaaagaactaagttaatatcattcgttgaaagcaaatcacaaccccggtcaaattctttaaatgggttctcttgatgtgaaagaactaagttaatatcattcgttgaaagcaaatcacaactcttgctcaaccgataagaattgacagcttgatgtgaaagaactaagttaatatcattcgttgaaagcaaatcacaacttaatgatagaaactatgttaagaaggaatgatgtgaaagaactaagttaatatcattcgttgaaagcaaatcacaacgggtaactaccgggtgatgatcgggcttggtgatgtgaaagaactaagttaatatcattcgttgaaagcaaatcacaactggctatcgtttatgccgatgcctgaaatggatgtgaaagaactaagttaatatcattcgttgaaagcaaatcacaacacttatactcgccacatatacaagaccattagatgtgaaagaactaagttaatatcattcgttgaaagcaaatcacaacaggagcacaaatgttagctgtgtattttgggatgtgaaagaactaagttaatatcattcgttgaaagcaaatcacaacaagtaacattggctctttaaattgtcgtaagatgtgaaagaactaagttaatatcattcgttgaaagcaaatcacaacaatttaaagcggatctcgaaaaactttaagatgtgaaagaactaagttaatatcattcgttgaaagcaaatcacaacgatctcgatttcgctacaaccgacttctgggatgtgaaagaactaagttaatatcattcgttgaaagcaaatcacaacagcaccattgcaggtaatacgctggtaattgatgtgaaagaactaagttaatatcattcgttgaaagcaaatcacaactaagatttattttataattagactgcatgcgatgtgaaagaactaagttaatatcattcgttgaaagcaaatcacaacattatgtcgtctggtagtcctatgtattgagatgtgaaagaactaagttaatatcattcgttgaaagcaaatcacaacacacgttgggcaatttctttttgcaaatcggatgtgaaagaactaagttaatatcattcgttgaaagcaaatcacaacagtctcactggtagtaatgaaaccttgtatgatgtgaaagaactaagttaatatcattcgttgaaagcaaatcacaactccggtaacaggttgtctatgacgggtgccgatgtgaaagaactaagttaatatcattcgttgaaagcaaatcacaaccgtgaacgtgtagtgaaatatcaaatcccgatgtgaaagaactaagttaatatcattcgttgaaagcaaatcacaactggcaggcctgggaaaccgtaaggctatagagatgtgaaagaactaagttaatatcattcgttgaaagcaaatcacaacttgcaggcgcggattacaatggtgtggtctgatgtgaaagaactaagttaatatcattcgttgaaagcaaatcacaacttattggcaagcaattgttgaagatgcaataagatgtgaaagaactaagttaatatcattcgttgaaagcaaatcacaaccattaagcgagtattgtctattttcatgagatgtgaaagaactaagttaatatcattcgttgaaagcaaatcacaacttaccgggttgatagtattccgggaacttcgatgtgaaagaactaagttaatatcattcgttgaaagcaaatcacaactgcaatatggttgtaattaacggggtgaagatgtgaaagaactaagttaatatcattcgttgaaagcaaatcacaactaatctgtgtgtgtgccccgtactgccggagatgtgaaagaactaagttaatatcattcgttgaaagcaaatcacaacttgaggccatgagccctaacgataaagagtgatgtgaaagaactaagttaatatcattcgttgaaagcaaatcacaactttgtatgctcattcttttcctccaacgttgatgtgaaagaactaagttaatatcattcgttgaaagcaaatcacaacaaaggcaacacagtagttgcaaaaacaccagatgtgaaagaactaagttaatatcattcgttgaaagcaaatcacaactatattaccgttatggcatttctgaaccaagatgtgaaagaactaagttaatatcattcgttgaaagcaaatcacaactatattttgcaggtccggaagatttttatgatgtgaaagaactaagttactaacattcgttgaaagcaaatcacaactgtgtaatgcggcaatataatggtaagaaattgattaatattattttaataaatttcccggtataaaatacgatgccgcatactgaagctcttctttctcctctttaaatttctcaaatgcctgcatataccagtttgagtctgcagggtcatctgtaaaatcttcataaaccatcacctggtaaaacgctccatttttccagggctcaatacccaatatgccagggccctgttcttttacccgattaagcactttttcaaaatcatcttcagagaaatatttaattcctggtgcatcaaagccatcgttgaggttttgcaatccataaaaaatacacgtatcaagaaacgcttcttcccgtttaattatattttccatttgcttgttttaaaagtatgaagaaatagtatggtacataaaaagcctgttggttaggggtctatactaatatggcagccgtgacccccgagggcatatatcttgggttcctgttgatagtttctgcacccctgccatacagtacatattccagcgacatacataataagattaaagaaccgggtggggtaggtattgccaggtctgttacctgtgccggtatttcggcatcggtatagtcaatggttaataccgttgcataactgcccgttggggtgccgtcgtttacatcgcatcccgtggccagtatattacattgcacgtgatgggtatgcgccggggcattaagctcacgggtagggttatacgtaggtatttgtagctgcaagaggccgttggccgcatgcaccagttcaaaatttacatgccagcgctcttttaccgaaaagctgctgttgaatttgcaaggtgcaaaccatgtagtgcagttgcctgtggttaaaagatttatatccagccctcttaccacgtgcagcatgcacgacataaggcgcgggtacaccaggtgcctttccggcagggtaatattatcggttatgtccttgtgtaaagtcttgcacattttgccggctttggcaaagagctgttggcgggccagttgcgcttcggaatggttggctacctttcttaccgggcgtgaaaagtttttcccgttttttataaagtatatgttgttgccgagtcgtccctttaagagaccgttgataagtattgccatgggatgttgagtttagtggtgaatggtgaatggtgaattggtgaatggtgaatgatcaatggtgaatgatcaatggtgaatcgtgaatggtcaatggtgaatagtcaatggtgaatagtcaattgtgttaattactgctatgataattgtgtgcatcaattattcttctttttaaaaagaaacaaggccgtcttaagccggcccgtttcttcgggtagcggttgctgttagcttaccgttacctcaccggtaaaaatactggtggcggatttttttccgtcttgtgttacaaacgatatccatgtttctacctgctggccggcaaatactgacgcattcaggtcggcggtcatatcgccgcgtgagctgccgatatcatacacggcctgctgtagggcagggcagtaggctaccg

SEQ ID NO: 492 - DNA, 17736 bp, synthetic construct
  misc_feature 1..17736: note = Synthetic
  source 1..17736: mol_type = other DNA
ttaaatgaagaaacagtagtggaaagtattaagaacaccacgctcattgccacgattgaagaccattttatcaacggaggacttttcacaatcctttctgaaattatggcaaagaacaaactatctgctgatatactgccatttgcttttaagaataaatggttcaaaccagctcttttaaatgatgtgctgactttcgaaggtctgacagacgtgcaattagcagataaaatagaattttatttgataacaaagagagttaaagcaaatgcctaatggagtaaagccgaataaaaattatccccaaattgatcgctccaacgaactttacatgagagctctgggtttgattccgtcagtaacccaaactttagcaaaaggtccttcgcagtatgtaaaaggagtggcgccgaaatatcttgttaaagggaaaggttctcatgtttgggatgttgatggaaacgagtatttggattttaatatggcaatcggtccaatttctttaggctattcttatcccgagatagacgaagcaattatcaatcaattaaatgacggcatcactttttcattgatgcaccctctggaagttgaagttgcagaattacttaaggaattaattcccaatgctgaatcagtaagattcagcaaaactggtgcagatgttacaagcgcggcagtaaggctggcaagagcctacacaggaaagaaaaaaattctgtgctgtggttatcatggatggcatgattggtatatatccgttacatcaagggatatgggaataccagaagaaataaaaaatttatcatatacattccaatacaatgatctggaatcgcttgctaactcaattgataacgatgttgccgccgtaatacttgagcctgtagttttcgaagaaccaaaaatgaattttctgaatggtgttgctgagttatgcagaaataaaggcattgttctgatatttgatgaaatgtggacggggtttcgtatagcagccggcggcgctcaggaatacttcggtataaaacccgatcttgcaacatattcaaaagctgttgccaatggcatgcctctttcgattttgaccggcaggtccgatattatgaaacttgcagagcatgatgtttttttctatacaacattcggcggtgaagcgttgtctttagcagccgcaaaagctacaattaatatcatccgcagggaaaacgttcccgaatatttatcccaaaaaggctgcttgttgaaacaaggttataataatattgccgaaaggctcggtttgtatttcactaaagcagttggttacaactggcgttcgatgattacattcgacagcaccgcaggcgatcccttattgctcaaatcttttgttcagcaggaaatgattaaacgaggaatactctggtcaggatttcacaatatgagctactcacatacggatgaagatattatctacacgctttcggtttatgaggatgttctttcggaattgaaagatgaacttaataaaggcgatatcgccgaaaaaattttgggggaacctgttcagcccgtgttcaggaaaacgaataattttaacatgaagccgatagtaagataattatggaaatgttttctcttaaaaacaaaaccgcagttgtaaccggagccttagggttgatcggcaggcagcattgcatagcccttgcaaatgcgggggcgaatgttgttgctgccgatttggataaacactccgctcagaaatttgccttgtctttaaatacagaatctattggggtggaagttgatgtttcaaacaagaattctctgatcgaacttgtgaattgtattaagaaggaatttaacggtgttgatatactagtaaacaacgccgcaatcaatgatatgtttgaaaatcccaaaacagtgctcgaagaatcaaaatttgaaaattatccattgaatctttggcagagatcgatagacataaatttaaccggcgtgtttttatgctgtcaggtaatcggcagtgaaatggcaaaaaaaagaaaaggcagtattataaatatcgcatcaacatacggtataacagcgccggatcaatctctatatattaatccaaacggcgatcaggtattctacaaaccgcctgcttatgctgtatctaaagcaggcgtaattatgctcacaaagtatcttgcttcctactggggtaaaacgggcattagagtaaatactctttctccaggaggggtgagaaataatcaggatgaattttttatcgagaaatattcaagccgtacaactctcggaagaatggctgagcctcacgattatattggagccttggtatttcttgcctctgatgcttcttcatatatgaatggagcaaatttagttgttgacggcggctggactatttggtaattaggaatgtgcaaatgaactacattgatttcgaattaataaaaaaagcaaaaagtattaaactgctcctaacagactgtgatggagttcttactgacactggcgtttattattcttccgacggagaagagcttaaaagattttcgttgagagacggaatgggagttgaacgcttgagaaaacttgcagatgttgaaacaggaattattaccggtgagaattctaagattgtcataaaacgcgcggaaaaattattgatcaataatatatatctcggggttaaagacaaagcagaacttttatttgagattcttcaggagaaaaatcttaaatccgatgaagtggcattcattggggatgacacaaacgacatagatatcatggaaaccgtcggtttaagcgcatgtcccgctgacgccactcaatttgctaaagattcagctgatattgttgttgaaagcaggggcggatacggcgctttcagagactttgccgaaataattatcagcgcaaaacaaaaaattaaagaataagcacataccaaggggaataatatgtataacaaagctcgtgttaaagttgggaaccgatatataggcagcggcgaaccagtttacattatcgctgaaatcgggatcaatcataatggttctctcgaaatcgctcgcagattaattgacggtgcaatctttgccggatgcgatgcagtcaagtttcaaaagcgaacacctgaactatgcgtcccggaagatcaatggtatttggagcgagatacgccttgggggcgtatgacttatatagattataaacgcaagattgaattcggcggggaggaattctccttcattgataattactgccgtgaaagaggcattgattggtttgcatctccctgggatgaagaagcagtcgattttcttgaacagtttgacacggtattatacaaaataccctctgcttctttaactgataaagttcttcttaataaaatcaaaaccaccggtaaaccaattatgctctcaacagggatgtcaactattgatgaggttgaagatgcagttgacttccttggttccgataaacttcttttagcgcaatcaacatcaacgtatccatgtaaacttgaagagctgaatttaaaagtaatattgaattataaacagcgttactctgaaataccaatcggttattcgggacatgaaacaggcttagccccaacttttgcagccgttgcattaggcgcttgtttcatcgaaaggcatattactttagacagagcaatgtggggaacagatcaagcggcttcggttgaggtgcagggattctttaggatggttggcaatattcgtgacatagaaaaatcactcggcgatggaataaaaagagtttatcatagcgaatataattcattaaaaaaactccgcagagttaaagcaaactcggttgtttaattaacaagttacgggattaaaatagaaaacattataaaaaatattttaactcttttcgattttttctctgctgccgaaatcatttcgttttcggtcataataggctcggcattactgttaattgtcttagaaagaatttttccttacaacaaaggacaaaaagttatacgcgaaggatttttcaatgaccttacactatatacaattgctcaaagttatattctcagtataataattttcacgtttatcatacctcatatcgatcagcttctcggcgcttcccagataaaattattcggcgatgtgccaattatagttcagcttatggtatttttagcgacacacgatttttacatctactggatgcacagattgcagcacaaaaataaatggctttggcgtattcacgaagcgcaccattctccacaaaatgtagactggctgtcgggttcgcgttctcatgcgatcgaaattctaatcaatcaaacaatagaattcttacctatcatacttctcggttcgccgccggaggtaattgcttataaaggcgccataagcgcagtgtggggaatgtatattcattcaaatattaatgtatccactggaaagctgcaactgatcattaacggacctgaaatgcacaggtggcatcacactgtaggtaaagggcgcaataggaatttcggcacaaagcttgcaatttgggactggattttcggcactgcatttctgcctgataatatgaaagcggattattatggtttgaaaataaattttccaaagaattacatcattcagtttatttttgctttcagggcattcaaatacgtttcgcagaacaaattggagcggacaacatgaactgggtgtttcttttaatcgcaagtattcttgaaataggctgggtaataagtcttaagctcacggaggggtttaccaaggttattccgattatattttatgctttcttcggcgcaagcagcgcattctttttttcccacgcacttaaatcaattcctcttggcatcgcttattctatctggatgggtattgcagtaattggaacaacaattgcggagagcgttgcttttgataaaagtattggtcttgggcggacatttttcgtgatgcttattattgccggtattatcggcttaaaactttcttcaactaacattgaagcgcaatgaaaaaaattgatctcaatgaaataattaaaaagtacaatccttcttttttcaacaagcctttgcttctaagacgagcaattatcttttttctggaaaaggcgctgcatatatctgaaataaacgagttgctttttagattgggggataaggacggaattcctttgatagatgaagtattcgagcatttcaatttttcttttaaaatatcaaataaggacatgaaaaaaattccttcggagggccgcattatctgcgttgcaaaccatccgatagggagtctcgacggactcgcactgctgaaagttataagcgaaatccgaaaggatgttaaaattgttgctaacgatattctgatgcagtttgaaaatcttaatcaccatttcctgccaataaatattgagagcatcaaaacacaaaaggagaatattgcagcgatcggtaaagctcttgaaaacgaagaagcagtaattattttccctgcaggagaagtctcacgcataaaattgtttaaaattgttgataggcagtggagtaaaagccctatatattttgcaaaaaaatataattcatctattcttccaatttttgtaaacgcacggaattcgcttttcttttattttatttccgcattgaataaaaaaatatcccgattctttctatctcatgaaatgttcaataaaaagaataaagtaatagaattaaaaataggagatccaatcccaaccaagccgtttgtttctaaaatcatgagtgagaaatcgcttgtcaagttgttaagaaaacacgtatatctgattggcagaaataaatccggaattttttctattgagaaaaacatattacacccggttgatgcaaagttggtccgcaaagagcttaactcttcgttggttataggcactacttcagatgaaaaaaaaattatacttactgattataaaacttcgccgaatgtaataatggaaatagcccggctccgtgaagttacgttcagaaaagtcggggaaggaactggaaattctcacgatattgataagtatgacaaatattaccaacatcttgtcgtctgggacgaggcggagcttgaaatagtcggcgcttatcgaattggagaaggctcggatattatcgataactatggaccggagggattctacacctcgtctctgttcaagttctcggatgaattaactgatgggtatttgaaacattcaatagaattagggcgaagtttcatacaaaagaaatattggaacactaatgctctgaattatttatggcagggcataggtgcttatattgcaaattcaccgcatgtaaagtttttattcggcgcggtaagtatcagcaacagttaccctgacgaggctaagcaaatgatcttgtatttttttagaaagtggttcagcagcggttctgttttagcttcggcgaaaaatccatttaaaattcccgcgcttaatcttgttgattatgaaaatcaatttaaaggaaaggactataagcaggattataagacgcttaagttaatgcttaaatctttcggcttttccgtcccgattttatataaacattattccgaactctgtacagaagacggagtaaagtttctcgacttttgcgttgacgaatcgttcgcgaattgcatagatggattaattcttgttgatgtaggaaagatcaaagatgaaaaacgtgaacgatttataaataaatatatcgacagaggtgtattagaagatcagtcagcttaaatcctgcgcgctatcttttttcttcaagcattcttttaagtatctcgttaacgctctgcggattagctttgccattggtctcgcgcattatttgtcccacaaaaaatcctaatactttttccctgccgtcaagatattgtttaacctgaccgggattgttttcaattattgacccgatcacttcttcgataagttctatatcggtgatctgcacaagatttttttcctctacaataagtttaggatctttatttgttttaagcatctccggaaaaacttcttttgcaattttactactgatagtattatcgtttatcaagttaataagtctgccgatattttcaggcgcaacggggaagcctcgaatgtcaatcttatcttcgttaagtactttcattatatcgcccataacccaattacttgcgcttttatagtcgctagtaacatttaatatcctttcgaaataatccgcaagattccgtgatgatgttagaatctctgcgtcataattcggcagtttatattcttcgataaacctttcttttctgttttcgggcagttctggcagttgttttcttatttcttctttccatttatcgtcaacaactacaggcataagatcgggttcggggaaataacggtagtcgtgcgattcttccttgctgcgcattggaaaaacatcgctgagttccgaatcccacaataaagtctgctgagtaatttttccgccctcttcaagaatttcaatctgtctttcaatttctttttctatagccgctctgacaaatcgaaatgaattcatattcttcacttccgtctttgtcccgagttttgtttcgccttttatcctaacagaaatattagcgtcgcacctgaaagaaccttcctccatatttccgtcggaaatcccgaggtaagtaattatctgatggagttttgtcaggtaaagataggcgtcttcggaagaccgcatatccggctcgctgacaatttcgagtaggggcgtcccgcatctgttaagatcaattaaagaatacggaccttggtcatgaattaattttccggcgtcttcttccatgtgaattcttgtaattccgagtttcttcgaaactccgtctgcatttcttatttcgagaaaaccccgctcacagattggttcttcgaattgcgaagtctgccagccttttggaagatccggataaaaatagttcttcctcgcaaatattgatttctcattaatattgcagtctgttgcaagccccagaagtattgcaaattcaactacttttttattcaacacgggaagcacgcctggatgccccatgcatactgggcagacattagtgttaggcggcatgccaaatttattggcgcagccgcagaaggctttggtttccgttaacaattgagtatgtacttctaatccgattaccgcttcgtattttttgtccattgattcttaatatttctttccgggggcgaaatataattaaaaactgaaaacatcagaaacatctattatttttgaactattgagacggaaaatttattaataaataaaagttttaggagaaaacatgaaattagacgcacttgtattcggcgcgcatcccgatgacgcagagattggaatgggcggaacaattgcacttcttacatcgaagaataaaaaggtcggggtcgccgatctgacacttggcgaaatggggacgcgcggttcggctgcagaaagaaaattggaaagcgagaacgcctcccggatattaagattgagcgcacggataaatcttaaactgccggacggaaaactggaagtaaaagacagttataaacgaaaaattgtttcgctgattagatttcataaaccggagttaatattcgcgccgcatcagaatgacaggcatcccgaccacacagcagcgggaagactcgttaaagaagctatgtttcttagcggtgcggctaaatatgcaaccgaatacagagggaaagagcaaatatctttcagacccgctaaacttttttattatatgatgtcttatccgttcactccagctttcattgttgatataacagattctttcgatactaagatgaaagcaatcaagacatataaaactcagttttacaacccgaagagtaaagagccggaaacattcattagcgatccgaaattcttaaatttcatagaagcgcgctccggtttttatggtttcttgataagaaaaccgcacggcgaagctttctactccgaagaagcgcttgagcttgacttgataaacctgctcaataaatagtttgctatccgtgaaacggtttcgatttattttcatctaatttatgaacaaaaaggagaatgatttatgagttattatttcaataaagtagttgagtattcctttgacgaagctgttgcaaaaataaccgaagaattgaaacaagtcggtttcggaattcttaccgaaattgacgttaaagatactcttaaaaagaaaattgatgtagatttcagaaaatacaaaatactcggcgcatgcaatccaaaatttgcacacaaagcattatcagccgaggacaagatcggcgtgctgctgccttgcagcgtaattgttcaggatttggaaaacggtaaggttgaagttgcaataatgaatcccgcagaagcaatggctgttgtcaaaaatccgcatctcgaaagcctcgcctccgaagttaatttgctgttgaatacagcattggagaggatttaaaagcataatttttaaggatgtcatttatgaaaatgacatccttaaaacaagctaaattattcctgccgaataacggtttttggttccttttcgtcttatttcgcactaaacacatatctaataaataaaaatcttaaaacaaagattactgatgatttttatcaaaatgagttttatattcaaattaaaaaatatttaaagaaggtttaaaaataaaaagcccccgttaaggacgagggcaaaccttgttaaaacataagcttcactacggaataatccttattgtgatttgcaattatgcttaagtaagtatggtaataaaaaagccccacagagcgtaaacgatgcagggctaagaatatcttcggcttaggccttacggcacgagccttattgtgataagtctttcaattcaaatataaacatttaataaggtggatgcaactatgacagagaaaattttatcacttgatctaggttccaattctattggagctactataagagatttatcagaagagccccagtttgttaagactgcagttatcacttttgaaactggtgtaggaaaagacaaagaaaaaaagtacactatttctcttgctgcaaacagaacggataaaagaagtgcaagacgactctatcaagcaagaaaatacaaattatgggctattttagaagcgttgattaaagacaattcaaaattgtattgtccaatttcagaggagagtttgaaacgttggaaacattacaacaaagaagaagcacaaattggttttggcggcagacgatatcctgtagaggatgaactgtttgccaattggataaaattggattttaacaacgacggtgtgcctgattatataagtccccatcaattacgtaacgagttagccacagttaaacttgatttctcagttgaaacaaaccgcttcaaattaggcagagcactttaccatattgcacagcaccgaggatttaaaagtagtaaaattgtaaaaaacaaagatgacgacaataaggagaaagaagcagaaaattctattggagctgaaaagaaaaaacaaaacaagttttttacagagatagaaaaactaaatattccttttgatcaggaaactgatactatagggatgatatttgcaaaagttgaaacagcgggcattcatcatccggaaagaaaaaccgaaggtatacgcatccgcaagaacttgcatcagtatgttacccgtaaaatgctcatcaaagaagttaagcatattttcgaatttcaaggattagactataaatccattttcgaggaggagtattctaaatccccaatcttctggcaacgtccactgcgttctcaaaaaggtttggtcggttattgcactcttgagaagtggaaagtggttgaccaaaagaaacaaagagaagttattgttgggaaaaaacgttgcccaatcagtcgccctgaatttgaagagttccgtaccttgagttttataaataacattgcttatcgggataaaacaaataaagatgctgaatggcaatttctacctatggaaatgcggaaagaactttatagagaaaagtttttcgtacaaaaagattttgagttcttcgcaatacacaaatggattaaaagcaaaaatggtcacaatgactgggaactgaagtataattttaaaactaacatttcagcttgtgttgtctcagcacgattacaaaagatatttggtgaacgttggaacagtatagtaataagaaaagacagaaatggaaaagaattaaagactccattttatgaagacatatggcacgtattgtttgagagtaacgatgaagattttatcgaggattattgtaagacaaaattgggaataactgatgaagacaagatacaaaaactacagtccctctggtttaagatgcctgtaggatacgctaaaattagcttaaaagctataaacaatatacttccctttttacgtgatggttttatctacactgatgcagttctgctgggaaaagtacgtgaaatacttggtgataaaatctggaatgaaaataatacatttattaccgagtcattaaaaaaagatgttattgaaaagaaccggaatgaaaagcgtatattaaatattgtaaacaaccttattgctcaatataaatcactcccaaaaagcaagcgctttgcagacaatgatttcagatatattgttggttcaagagatgtcaaattgccaaaagaaagtattgaacgcgatgataaccaaattcaaaaagctactgaagaaggattcggtaaagaaacctggagaaaactttcaaacgaagaaaaggcaattgtaattgaagaaataactaacaagtatcaggaattttttgagaaagggaaacgcggattttatactcttccacgcttaagtgatgcaatgaaaaaatttctagccgataactttcctgatttgttgcactgtcccaacacattcaaaaaggtttatacatctgaagccaaatgcaaatgtgataaatgtaacttattggataaactttatcatccctcgatgattgcaatctatcctgaagcgcgtgaagagttttataatcagcatggtattcagaaacgcatggtaatgcttggctctcccaaaaccggttcatttaagaatcctatggcgatgagaactttgcacgaattgagaaaacttgtgaattattttattgctaacggagatgttgaggaagatacacgtgttgttgtggaagttgggcgtgaattagtagataccaataaacgatgggcttatgccaaatatgaccaaattcgagagcaagaaaataaagaatttgcagaggcaataagagaattactaaaagatccagaagcaaaaggttctttagcagacgctgattcagatagtgatattgacaaattccgtttgtggtatgaaatgattgaatcacctgaaggttttgagaaaaacaataaatttattacaacggaagaagacaaaaaacccattgaaaaagagaagaaagggggaaacaaaaagaaaagtcagaccgaggaagaagatgacttatttgagtttagcgaaaactattttgaaaacattaaaaaggcagtacagttgaaattaaaaaaggcaaaagacaatgttatcgaaaaatatcggctttggaaggaacaacaatacttctgtatttatactggcaaaccaataaaaataacggacttattccaagagaatttaattgatatagagcatacaatacctcgaagtatttcttttgataatagtttggctaacaaaacagtatgctacgctgactttaataggaatgtaaaaaaaaatagaatcccttataaattggataactatgatgagataaagctgcgcattgaaaggtggcaacaaaaagtaaaagatcttgaactgcgggtagaattttggaaaggaaagtctaaacaagcaagcacattacagtataaaaataatgcaatacgtcagaaacacctttggcagtttgaattagactactggaaaaataaagtagaacgcttcacaatggaggaagtgaaacctgattttaagaacaaccagctaaaagatacacagctaatctcaaaatatgctattcattaccttaggtcctactttaataaagtggaagttcaaaagggtgcagtaactgctgaattcagaaaaattctggatatacaagaaaccaaaactgcgaaagaccgtaccaaacacagccatcatgctaaagatgcagttgtattatcggtcattccccaagctgtaatccgtgacaagatgcttgaagtgtggtacaagatacaggaagaaaaacaattactggaatcagatactgagaaagacagaattgttatactaaataaaataaaaagctttgaagaagaactgagacagctaaaatttcaatgcaatttgcctaaaggtctgaacaatacaatcaggaaactggatgaagaactaatgattaataacattgctcgaaatcgttctgttatacctgccggtaaaaaagtcaggtttaatggaaaaacttttgttgctaagggagatgccataagagggcagttacatcttgacactatgtatggtaaaattcaaatggtcgaaagagatgtggataataaacccaaaaggaatgacaaaggagaatggttatacaataaaggcaaggatgaatataaatttgtagtcaaaaaagaagttagtaaagatttagatatcaataaaattgttgactcagaattgataaaaatcataaaaacacagattggcaaaagaactttagcttctacattaagtgaagatggagggctttttatgctcaaaaaagatggatcacgagctaataagataagacatgtccggtgtttcgctgacgatgtttcagttcctgtacgtgtaaaaccgcaactaattcaaggagaaaaagaacataaaaattattattgggcaaagaacggtgaaaatgtaatttgcgcattttatcagaaaattaaaaaagataaaaacgggaatgaaaaaatagaccgtgatatggaaatcatatccttaatggaggtcgctgacttggttagatcgggcgaaataaaaagtatagatgacttggaaatttatcgcaaagataaaaaagggaatattgtaattgacgaaaacggaaataaagaaaaaccttatgctattttaaaaccagggataaaagtgattttttacgatgatagtttggacggacttaaaaaagaagaaaatgaaagtgtaagtaactataataaaagaattagttatcagacttacacactagtaaaattctctggagggcagctaacatttactcatcatttagaagctcgatctgacgaggagttaaaaaatgcttatgacaaaaacaaagtttatatggttgatgaaaaaggaaaagaagtaaaatatggaggtgggggaaagagcggctttacgaggaaaatttcggacgcattaaagtttaacagccctaataattttgaaccatggccaaaattactttacacaaaagattggttaaatatggcaatagaaggaaagcattttaatgttctgccggatggtgaaatagagtggttgttctgagaggaaaagtaactgtttaatactttcttcaaaataaaaatattttataagaataaagtagaacgagcttaaaatgatcaaacgcaccctatacttcggcagcccggcatacttaagcaaaaagaacgagcagcttgttattaaaaagccgcaaatgaaagaaggcaccgtcaccgctacggggacggaaataaaagaaaccgctccaaactatgatagcgaagaagatgaagtaagtaagcctgcccgtccggtaggcgggattgaatcggttcccatagaagatatcggaataatgataattgaccacgggcaggttacttttacacagggtttaatcgcttcgttacttgaaaacaaggcggctgttgttacttgcgatactaagcatatgccaacaggtttgtttctttcactcgacggcgggcatactcaaagtgaaattttccaaacacagattgatgcgtccgaaccgttaaagaaacagttatggcagcagacaatttccgcaaaaattaggaaccaggctgtgcttctaagaagaaaaaaagttcccataacaaacatgcttaactgggcaaagaaagtgcgttccggcgatcctgataattacgaagcccgtgcggcggcttattactggaaaaatctgttcccggatatattggaatttacaagagaccgttacggcgaaccgccgaaccagctgctgaattacggttacgcaattctacgcgctatagtcgcccgggggcttgttgcatccggacttcttcccactcttggaattcatcaccataataaatacaacgcatattgtcttgccgacgatattatggaaccgtaccgaccgtttgttgacgatattgtttatcgaattgtaagaaccggcgaagattttacggaactttcagcgtcaatgaaaaaacaactgctgcaaataccgactgttgaaataatcatagaaggcaaacgaagtcccttgatggtaggacttcaaagaacaacggcttctcttgccaaatgttttgaaggggattcacgcaagattatttatcctgagtttcctttgggataaagattcctaattacaattaagctgtagctttggcgtccgcttaaaatttaatgataataaatgagggttgagccatagaaacaatggaatttgagagaagaatttgcatgactataagctattaactcatcccccagccccttctcttacaaagagaaggggagtttaaattctcaatcttctcacggtttattcttctattgcgcagcgggaattagattcgttttcttgattaacaaaatattgtgttgaaaatcttaaaaaagaataatgataaaaagttctcgtaagttgaaataattactttcaaaatgaatgagattcttactttagggatattttatgagtttaaacaaagatcgaagattagtagaaattgcaaaactttttagccgtaacctgcgcaaaaatgcaactgaagccgaaaaaattttttgggaagcggttaggaataaacgtttttgtaacaaaaagttttatagacaatatccattgttctttgatatagaaggtcttgaaaaatttttcatagctgatttcttttgtcaccaggcaaaacttgtcgttgaaattgacggaacctatcatatacgtcagcatgattatgatactttaagaacgcatgttataaattttctcgggattaatgttattaggtttaaaaatgaagaagttattaataacttgcaagatgtgatgaaaaagttagagaaaaatttaattgcaaagatttagcgaatatagaataatgtggataatggtatttttcgatctgcctaccgaaaccgcccaagaaaagaaagcctacgccagatttcgaaaggaattacttaaagacggattctcgatgtttcaattctcaatttatgtgcggcactgctcgagccgtgaaaacagaaatgtacatattaaaagggtaaaaaatctgctgccagggaaaggacatgtaggcattctttctgtaactgataagcagttcggcatgatggaaatattttacggcagtaagaaagaaagcggattcgtagagcctcatcagctagaactcttttaaaaagtcctcctctttttaagaggaggatttaggaggagttcaaaccaagtttttttaatcctaaaaaccttgtaagttgttgtaaatcaatgacatattcccacctatcttggttacaatatgtcaaagaaaaaatttgaaagcaaatcacaactagtatgaatatcctgtggcagagaaaacgcttggttacaatatgtcaaagaaaaaatttgaaagcaaatcacaactcgttggcaatggttcaaattgggttgtggcttggttacaatatgtcaaagaaaaaatttgaaagcaaatcacaacccgtggctgcgttggggtgtgcccagagctcttggttacaatatgtcaaagaaaaaatttgaaagcaaatcacaacttattcggtctattctcctggaagcccttgcttggttacaatatgtcaaagaaaaaatttgaaagcaaatcacaaccggagggccgccgcactccaagacgctggccttggttacaatatgtcaaagaaaaaatttgaaagcaaatcacaactgagttactaaacaatgaaaaccgaactaacttggttacaatatgtcaaagaaaaaatttgaaagcaaatcacaactcttcataaacacactgcaacgcttttgcacttggttacaatatgtcaaagaaaaaatttgaaagcaaatcacaactgcaaacgcacatacattcccgcgtcttcacttggttacaatatgtcaaagaaaaaatttgaaagcaaatcacaacgtaactccatcgtgggtaatgttaaagtaacttggttacaatatgtcaaagaaaaaatttgaaagcaaatcacaactcatggttgaatgttataccgggaaaccccttggttacaatatgtcaaagaaaaaatttgaaagcaaatcacaacca

SEQ ID NO: 493 - DNA, 17566 bp, synthetic construct
  misc_feature 1..17566: note = Synthetic
  source 1..17566: mol_type = other DNA
gaacaggtatattattattttcgaaataggtttcagcggcataaaaatctcttgcctctattctccataaaagttttgaacgaatagctctatcataattaatggaatatccaaatgttttaaaaccattttgaaaatttgcaggaataataacattatcagtatctgcataatattcaactcgtgcagccaattcatttttttgagatggtttccattgtagaatagctacataactataccaggtgtaaaatgaacggctgtgtactgatttttgttgaaagcctatatcaaatcctgttgtaatgccccattttggggttagttgaaatataccatacaagttatgaaaataacgcattgcacgaatactgtcgggtaaggtattccctataaatgaactactattaagcgtaatattggcagtaggattaaaggtaatttgatgcccaaaagcaggggtattattaccatttatccggctaatattttgccagccgtttaacaataatagggccatataccattttttgttattggttgtataggctacccgtataccggtttcataatacggcgaattctcggccaaaatacttctggagagtgtccaacaatctttaccaatggcaccttcaaaaccgatatgtgaagcaaaaataccggcatctgcccaaacatcctttttgcggaatagttttatacccacattggcttcaaaaatatttttcattacacctttctctgttgcaagattggcattcatataggttccggttgcaaaagccaaatttgcccttaccttattttcagtaatagcagctttcaacaatccaagattcaaatttacctcattgtgctggttgtagctatataaaaaagcaggtcggttatggttaggcggattagcaaaatcataagcataatatacatccaaatagccactaagttgtagcttttgattcaatgaatcgttttgggcatgggcataacctgttattatatacacggatagcaacatcattttcttcatgtactgttcattttacattcctgtaggcatatctgctataacgctttaatgatttgtcagggaatctaaagcaatgttaagcgccaatacattcacagattcggggccaaaaattcctaacaaaggtttatcggtatgctgccgcaccaatgattcaataatagatttaggaatatgtcttatttgtgcaattctgtttacctgtatcatagcagattgcacagcaatatcaggatctaaaccgctaccacttgcggtaaccaaatcagcgggtatagccgatgcaggaacaccgggatgatggatttggaatgaatcaacattttgttgtactgaaagcaaataatccggattattaggccctttattacttgcacctgccgctgctgcattataattcaccgcagaaggtcttgaccagaaatatttatcatccgaaaatttttgtccgatattccggtacatttttttcccatgtaccatccatacagcagcttctcctttatcaggcgtaatttgagcaacgcaccacactaatgctgtatacataacagaaaaaagcagcaagcaaaccaatgttaaacgaatggcaggtaataaatagtatttcataaaattgtttatataaagtttgcaacaatgatatcaatgattttaatgcccacaaaaggaacaataattccgcccagtccgtatatcagcaaattacgccgtagcagtgcgcttgcgccaataggtttataagccacaccgcgcaatgccagtggaatgagcagcggtataataatggcattaaaaataactgccgaaagaatggcactttgcgggctatgcaaatgcataatattcattccctgcaaggcaggtatataggtaatgaacaatgcgggtacaatggcaaagtattttgcaacatcgtttgcaatactaaacgttgttaaagtgccccttgtcattaataattgttttccaatttcaaccacttcaatcaatttggtggggtcattatccagatctaccatattaccagcttctttggctgcctgtgttccactgttcatagccacccctacatctgcctgagccaaagccggtgcatcattggtgccatctcccatcattgcaaccagcctgcctgaagcctgttctattttaatataattcattttatcttccggctttgcttcagctataaaatcatccacacctgctttttcggcaataaacctggctgttaacgggttatcgccggtaaccattactgttttaatgcccatcttccgtaaacgctcaaatctttctttaataccggttttaataatatcctgcaattcaataacccccattactttttcattttcagtaaccaccagtggtgtaccgcctttacttgaaatggattgaacaatggtatgcacatcttcaggaaatgtatttcctgcattttcacaaatttttctgatggcatctgctgcaccttttctgatacgcatatcacctacgtcaatacccgaacatctggtttctgcagtaaatggaatgaaacgcgggttgttgatttgtaacatcacagtatctaatgcggctaattcaataatcgatttcccttcgggggtttgatcggaaaccgaactcattacaaccagttgcttaaaataatcgggatcaacatgggtagccggataaaattgcgttgcttttctgtttccaatggtaatggtacctgttttatctaacagtaacacatcaatatcgccggcagtttctactgctttaccacttttggtaattacattggctttcaatgcacgattcattcccgcaattcctattgcggataatagcccaccaatggtagtgggtatcaggcaaacaaataaggcaataaaagcggcaatcgtaatgggtgtatgcgcataatctgcaaatgattttaaggtaactgttacaatgataaaaaccagtgtaaaacctgccaataaaatggttaatgcaatttcgttgggtgttttttggcgtgaagcgccttctaccaaagcaatcattttatctaaaaaactttcgcccggttcactggttacctttactttaattgtatcgctgagcacttttgttccgcctgtaacgctgcttttatcgccaccagcttctctaattacaggtgcactttcaccggtaatagcactttcatcaatggttgccaggccttccacaatttccccatcggcaggaataatatcatctgtttcacatataaaaatatctcctttttttaatttggaagccggaacaacaatcacttcattcacatacatttcgcctaccggcaatattaatttggcaggtgtgtcttctcttgttttccgcaaactgttggcttgtgccttaccccttgcctcggcaatggcttcggcaaaattggcaaacagcagggtaataaacagtaataaggtgattaccaaattgtacgttaaacttccctgaccatccgctccgccggcaatccagatgcatactcctcccattacaacggttcctacccaaacggtaaacatgactggatttaaaatcatggcggcaggatttaatttcaggaatgactgcttgaatgcaccggccaataatgctttatttagaaattgtttagatgcagtatgattcattttaatatatttttagtgaaaagaaaaatattcagcaacaggccctaaagccaaagacggaaaaaatgataaagctgcaacaattacaataacggccattaccattaacccgaatgtaaccgtatcggtttttagcgtaccggcactttccggaatatattttttttgtgccaataaaccggcaatggctaccggcccaatgatgggcaaatacctcgataacagcattacaataccatccgcaatattccaccagggagtattagccccaagccccgcaaattcgctaccgttgttggcactggcagaagtaaattcgtataacatttcgctaaagccatgaaaacccggattagaaagccagcccgcatattcagcaggatgatgcgcatacaaataagccgaaatggctgtacccgataatattaaaaatggatgaattaaagcaatgatcatcgctattttcatttcttttgcttcaatttttttacccatcagttcgggtgttctgccaaccattaatccactgataaatactgccaaaatcatgaaaatataaaagtttaaaaagcctacgccaatacccccgtaaaaagcatttaccatcattcccaacatggtacacatgcctgcaagcggcataaaactatcatgcatcgcattcacagaaccattactggttactgtggtaacaattccccagtatgcagatgcggcagcccccaaacgcagttctttaccttccatattacctaaattttgttcaattcccatttttgcaatggcaggattgcctgcagtttccatcacaagggtgggtgctaataataaaatgaaccccaccgtcattaccccaacaattaaccaggctaatttttttcgtttcagcatatagcccatggtaaatattaatgcaataggtaataaagcaatagctattgtttcaatcatgttagtgaaatagttaggattttcaaatggatgagccgagttaggcccgaagaaaccacctccatttgttcccaattgtttaatggcaacaaatgctgctaccgggcctctgctaacctgaactgtatcgccctgcaatgtagtaatggtatctttacccttaaacgtcatgggcataccgtttaataaaaacagaactgccattataaaagcaataggtaataaaacgcgggtacaacttcttacaaaataataataataattacccagtggggtattggttgtaccttctttcatggccttaaaaactacaatacatattgccattccgcatcctgcactgataaattggaatagcattaaaactaactgacccagataagacatgcccgtttcaccggaataatgttgcaaattggtgttcgaaataaaacttacagctgtattaaaagccagatcggccgacatggagggattatgatcagggtttagtggtaaatgcgccatattggttaataccaacatggccagaacaaaccagataaaattaatggagagtaatacttttaaatgctgcttccagctcatttctatgtttggatcaacacctgatattcgataaatcagttgatcaattggattgaaaatgggatctaaccaggtgctgtttcctgaaaataatttacccatatacctgcctaacggaatggctaacaataccgttatcataaacatggctattatgccatacatttcagtactcatttgcattgtttaatttagtttagaatatcaatttgtgcactgtaaaatgcagcaatgtgcctgtactgctgaacatgcattatccaaaatatacagcacatttgccgtattaaaacttttcaggatgaattaaaacataacacatgtatacaaatacggctactgctacaataaataataaaagcataagtttaaattttttcgaaccaatgaatgattgctttaaacagcagaaatgctaacaaaccggtaattagtaatagtaaaaactgcatgtgggtattttttatgtttaaaataatagaagcatcctacagtaaattattcatccttccatcttttaaagttttaaacaatggcaaaacaagtgccggctaacataaaatacatgaaaagccttacaggatatgaattataaatataatatactatatatacacactaacaaatcctttcattttgaaagggttgatactatcattttaaaagggtatggctgaagcggaatacaaaaataaaagtatcaggcaactgaacccggtatattatactcttcaatttttctgtacaaggtagttaaggcaatattgagtaagcgtgcagtttctgttttattaccaccggtatattgcagtactttttgaatatgtgctttttcaacagcagccagcgctaatgaagctgctggcttattaccggtttctaaatcggatacctgataaaaatcaaccggtaaggaagcaggctctaatatattattttcagttaaaataacacttcgttcaataatatttttcagttcacggatatttcctttccaggaatgtttttgtaacaattgtatgtatgccggatcaataccggttatttttttattcgttttttccgaaaaatattgtaagaaatgattggctaataatgcaatatcgtcaatacgttcccgtaaggaaggcagttgtatttgaaatactgaaatacggtaaaacaaatcttcgcgaaagcggccggcatttatttccttctttaaatcgcggttggtagctgcaattaaccgaacatttaccctggtaatattattatcgcccactttcagcaattcgccggtttcaataacgcgcagtagttttgcctgcaaatcgaggggcatctcgcctatttcatctaaaaaaatggtaccatcattcgcttcttcaaaaattcctttggtatcttttatggcgccggtaaatgcaccggctttatggccaaataattcattttccaataattctttgctgaaagctgagcaattcactgcaataaaattactattctttctttttcctgcctggtgtatggcctgtgcaaaaacttctttaccggttcctgtttcgccggttaataaaacagtggcatctgtttgtgctacttttcgggcggcttcaatggctaattgaatactttttgaacaaccgagtatactgtttaatgcatatttattatctaattgcttttctaattgttgtaccctttttgccagtttcactttttcaagtgctctgtaaagcaatggaataattttataattatcgtcgccctttgttatataatcaaatgctccattttttatagcttgtacactatcgggaatattgccataggctgtcatcaaaataatttcagaggcagggtacttttgtttgatactttttgccaattcaacaccatgctcatcaggtaatttcacatcacaaagtactatatctatattttgcagttctaatttcttaagcccggtttttccatcgcctgcctgcaatacttcaaaaccttctaaactcaacatttttgccagcagcgttcttaatttaacctcatcatctattattaaaatagtatttgccataaattggtttaactgaaagcagatgaatgattagaatattactgttatataccattacaaatgtaatgcatgtataagtaaacgaaaaaaaccctgccaattgcagggctttttgcttaatgtatcaaaccttccggtatgggtttcttcattaaatatttgtacataaattttgttttcaggttctgaaaatcatcccatttagcaggcaaataaggccagccatgccggccgccggggtacaacatcatttcaaatggctttttggcatcttctaaagcactgattaattgtatgctgttttgcatgtgtacattatcatccatggtaccatgtacaatttgtaacatgcctttgtacctattaacataacgcaatacactgctttttttataaccttccgggttgctttccggtgtacccatataacgttcggtataatgggtatcgtacaaacgccagtcaaccacactgccaccggccataccataggtaaatatatccgatttgtacgttagtgcatagcacgttatataaccaccataactaaagccggtaataccaatacgggcagggtcggcaccggcattatggataaaccatttggccatggtactgtaatcttccatttcccaataacctaaattgtggtataaataatttacccccgcttttccaaattggccactggccctgtgatcgaatgctacctgtatcaatccttcctgcgccaataattcacgattggcagtccagttccatttatcccataccgtgccggcattagggccaccgtatatactaattagcatggggtattgcttcgttttatcataatgtgcaggccaggttaccaaagcaggcagctcaaataaaccatcggcacttttaatgcggatgatttctgttttggcaatggcatacttatccattgcagggcctttggcattacccagttctttaactattttaccatttacatctaccaatgccatacgggtaggcgtttgtgtattgctataggtggtaataaaatatttaccaccgggcgaaaaattgatactgtgactgtaattgccaaaagttaaacgttgtggtttaccaccgtttaaactaattttatataaatcaatacgggttgagttttcaataccacgggccgtaaaataaataagctttttagcctcatcaatgtattcaataccggtaacggtaaaattgccttgtgtaatggcatgttgcaaggtaccatccatattatagaggtacagcatattccaaccggttttatcgctttgggcaatatagccgctaccatctttcaaaaaattaattcttccaccaaccctgtcttccaaatcaatccaggttttttgggtttcggtatatacgggtttacggctacccgtttgtgtatttacttcataaataatcaggctatcttgtttgcggttcatccagggcagccataagctattgttgctgttgcgccaaataggccagccaaaatactggtcatctttttcattaaaattagcccaggtggtagtaccgccattggggctaacaaaacctattttaacttcggggtttttatcgcccacttctgggtaacgggtatattctacataaccatgttgcccctcgctgctgtatatgggaaacataggcaccatactttcatcaaaccgggcataggcaatggttttgctatcggggctccaccaaaaagcacggtaatgcgtggggcggccataaatttcttccaaatacacccaactggcgtagccgtttaacatagtagcgctgccgttaaaagttaattgtgtttctttttgcgtggctatgttataactgtataaattgttattttttgtatatgcaatataattgctatcgggcgaaaaggtggggtttcgttcctgcgccgtatcgttggtaatgcgggtagggtttccattaataaacaaatacaaatcgtgattcatttcggtaaccgctttactggggtttaattgggcaggtgcagtatacgaaagcattttacccgaaggaatatcgtataaaaaggttttggcatcatgaggttgctcgccccgctgcaataacaaaacctggttatcgttcagccattccaataccgagggcaaaggttggtaaaacccttgcggtgcttttccggtaaccaattgcgaaacaggtatttctttttgctgggcagttgtgtatagtattgttaaacaacagcaagcaatggtgccaaatattcttctcatgtgtttgaattttgcatgaagataaatatcctcatccttttttacgataccattcaaaaaaaagtgataaaactcagtattttcgggcttttttcgaaaattgttcgactgttgttcgactccggcgcataaaaaagcagcaatgatgcgggttgtatcgaagtagtgtcgaacctgtatcgaaccagtatcgaagaaggctgggagtaagggagatgggggtacaattatttaaccggttgaaaaggtaaaaaaaataattttaaaaaaagagataatattttttttatgtatacataaaaatgtgtagtttaggggaagaaaaaagccccaccaaaagcagggctcagatttcttcggcttatagccttattgtgataagtctttcaaggtttaaaactataaaataaaaatcaaaatatcaaatatgcctcaaaataatattttagcactcgaccttggcagtaattccattggagcagttattagaaacatagaagcagaaaatcaatttgaaaatgctacagtagtaacttttgaaactggcgttggaaaagataaaggacaatataccgtatctcttgcagcaaatagaactagtaagagaagtgttaggcgactttatcagtcaagaaaatataaattatgggcattgctggagtcattaatacaagatgaaaataaattatactgccccattaaagaaaatagtctcaaacgttggaaattttatgataaagagcaggcacttaaaggaaatggtgggagaaaataccccgttgatgatattttattcaacaattggattaaactggatttcaataatgacaatttacctgattatatcagtccttaccaattacgacatgaattagttaccgttaaattagatttttcagaagaaactaatcgttataaacttggaagagccctttatcatattgcacaacatcgaggatttaaaagtagtaagattgtaaataataaagatgatgaaaaagggaaaccagatgaagagaatttagaaaatacgaatattggtgctgaaggcaaaaagcaatcaaattttattaatgaattagaaaaaattggttttaattatgaaccggaaaatgaaacggtaggaagtttatttgccagaattgaaagagatggcattcatcatcctgaaagaaaaatggaaggcatacgcatccgcaaaaatttacatcaatatgtaacccgcaaaatgctcattaaagaggtaaagcaaatttttgattttcagcaattagatttcaatgaaatatttggtaaaaatgaggctaaaatcagtattgcgcaatcacccattttttggcaaagacccttaaggtcgcaaaaaggattggtgggatattgtactttggaaaatagaaaaatattttataaagacaaacaaagagaggtatttgtaggaaagaaacgttgctcaataagtaggcctgaatttgaagaattcagagcatttagttttatcaataacatatcctacagagaaaaaggaaatcaagataaagaatggcatttccttccatcagaaatgcgaaaagagctttatcaggaaaagttctttgttcaaaaagattttgaattttttgagattgctaaatggataaaacaaaaaaacaaacacgataattgggaacttaactacaattataaaacaaatgtatcagtctgctctatttcttctcggttgaaaaaaatttttggtgatgattggaataagcctgttacaataattggaagtaaaggaaaaacttatacggctcccttttatgaagatatatggcatgtattatttgaaagtgacgatcaagaatttatagaagaatatggaaaattaaaactaaaattaggtgacgagaagattcggcaattaattgcactttggtatgctatgccgattggttatgcccaattaagtttaaaagcaattaataatattctgccctttttaagagaaggatatatttacacagatgcagtattattaggaaaagtaccggaaattcttggaaaagagatttgggaagaaaataagaattttataaccgaatcattgaaaacattagttattgaaaaaaatcgtgaggaaaaaagactattaaatattgccaataaccttattgcaaaatataaagcccgaccaaaaggaaatgaacggtttgcagataatgacaccaattatattgttggttcaagagattatagactacccataggtagcatagaaagagatgatgttcaaattgaaaaagctgcagaagagggctttggaaaagaaacttggaaaaatttttctggagaagagaaagctaaatatattaatcagataaaagatagctaccaaaactttttcaattcaagcagtcgtgagttttacaaattacctcgcctgggagatgccatgaaggtatttctggcagatcgctttcctgatcttctgtattgctcaaatacatttaaaaaaattgaaaccggagaaaaaaattgcaactgtgaaaaatgtaaaagattaaataagctttaccatccttcaatgatttccatttatccgccggccagaaaagaagattatcaaagatatggtatcgaaaaaaagatggtaatgatcggttctccgcaaacgggtgcatttaaaaacccaatggccatgcgtacgctgtatgaattaaaaaaattagtgaattactacattgttacaggacaagttgacgaagaaacaagagtagtgattgaagtaggacgcgaactgaatgacacaaataaaaggtgggctatagaaacatatcaggaaattaaacgtaaagagaacaaagaatttgcagctgccatttttgaactattaaaagatcctgaggcagaaggctcattagccaatgcagattcagacaatgacattgataaatttcgcttatggtatgaaatgattgaatcacctgaaggatttgaaaaaaatggcaagtttaccaatgtggcagatgaccgtacaacaaaggaaagaaaaggtaagcacaacaaaaagaaaaaggatgcaggaaatgaggatttttatgaagaagatttttatgaattcagtgaaaatcgctttgaaaagatcaaaaaagaaatatgggtaaaattgaaaaaagcaaaagataatattaccgaaaaatacatgctttggaaagagcagcaatgtttttgtatttataccggtaaacccattaaaattacagacctctttaaggaaacagtaattgatgtagaacataccattccaagaagtatttcatttgataacagtttagccaacaagacagtttgttttgctgattacaatcggaatataaaaaagaaccaaatacccaccgaattacctaactatgatgctattgaaaaacgtattgaaaaatggaagcaaaaagtaaaagagttagaaatgcgcgttgaattttggaaaggaaaatcaaaaagagcagctacacttgaatataaaaatagtgcaattcgagagaaacatctttggcaatttgaattagattactggaaaaataaagtggaacgttttaccatgaaggaagtaaaacccgggttcaaaaacaatcaattaaaagatacccaaattatttctaagtatgcaatgcattatcttaaatcttattttaatcaggtagaagtgcaaaaaggagaagtgacagcacaattccgaaaaatatttgatgtacaagaaaccggaacagaaaaagacagaagcaaacacagtcatcatgcaaaagatgcaatggtgttgtctgtaataccggttgctgcaatccgtgacaaaatgctagagctttggtatacaataaaagaggaagagttattactgaaatcagatacagaaccaaacaaactagctattcaggaaaaaataaaacaattgaaattggaattagacgattttaaaattagaatgaagcccaaagcatttaataatgcgataaagcaattagatgaaacgattttaaacaataacattgccagaaatcgatcaatagttcctgcttccaaaaaaatacactttaaaggaaaaacttttattgcaaagggtgatgcaattagaggtgaattacatgaagctaacttatacggcaaaattcaaatggttgcaagagaaaatgatataccaatcagggatcaaaatggcaattggaaatttttagaaaatgatgaagctttcaaaatagtacgtagaaatgaagtagatgaaaatttgaacatagataccattgttgatccaagtataaaaaaaataatcaaagcccaaatgggagaaagatctttagctgccactttaagcgaggatggtggagtatacatgctaaacaaagaaggaaaaagagttcataaaataagacatgtaagatgttttgaatcttctgttactaatcctatcgcggttaggaaacatgatatttcaagcaacaaggaacataaaaattattattgggcaaagaatggagagaatgtcctctgtgcactttatcaaaagattattaaagataaaaaaggaaatgaaaaaatagaacgtgaattagaaattatttcattaatggatttagcacaattagtacgttcaaatgaaattaaaaatattgatgatgtcgaattgtataaaacagataaaaaaactggcaaactaataattgatgaggatggaattaaggaaaaaccttatgccattctaaagccagggatgaaagtgattttttatgaaaaagatatagatgagttaaaaattctctctaatgcagaattactttcgagaatatatataactggaaattttgaagatgggagaataaatttttaccaccacattgcaagtttatcatcaaaacaaattgaagaaaaattagttgaaatgaaagcatccaaaaaaggtgcatcatctgtaaattttttaaacccattcccaaagctaagattaagtaaaaataacctaaacatggctattgaaaacaagcattttgcagtattcccagatggttctataagttggttaacgatgaattattaaaaatatttaggaaagagaattttaaataatttatctaattaccttaaatatgtcacctctttttcccggccaatattatcatatatacaaccatgcgaatggtgatgataaccttttccgggaagaagagaattatcgttttttcctgcaacaataccatcaacatatagatgctatagcagataccttagcgtggtgtctgatgccgaatcattttcatctgctggttaaaataaaaaacgaagaggcgctgctgcaaacttttccaaagttcgaaactttggaaaagttgctgtcgaaaaaattttccaacttctttagcagttatacgcaggcttttaataaaatgtaccaacgcaggggttcgctttttattaaaaattttaaaagaaaggaaattactactgctcaatatctacaaacaatcgttgtatacatccactgcaacccaattaaacatcattttgcaaaagaaataactgcatggccttggagctcctaccaacatatacatacgcattttgaaaagcttcctttttttcgagaaatcttcgaaaataaaaatagtttcgttgaacaacatacaattaaacttgaacgttttattgaatataacgaattggaagaattgctcacccggtaaattatgccagcatgcttaaacgcaccctctgcatagaaaacccctgccacctaaagtgcaacaatgaacaattggtaattagttatgccgctattaaaggtttggaagacaggcacgataaaaccgtacccattgaagatataggagtactggtgttagaacacccccaaattaccattacccattttttgttaaacaaactagttgctaataatattgccgtaattacctgcaacagcacccaccaccctaccggcatgttattgcctttagaaagccataccctgcaaagtgaacgtttcaaggaacaattggcagccagcgaacctttgaaaaaacaattgtggcaacaaaccgtaaaagccaaaatcaataaccaggcagccgttttaaaaaaatggcatataccccatggttatttaaacaatgcccagcaaagcgtaaaaagtggcgatgccgataatgccgaagccaaagcagcggcatattattgggcacatttgtttccggaagcctggcagttttttagaaaacgggaaggcccaccacccaataatttgctgaattacggatatgccattatacgggcagccatggcccgtgccattgccggagcgggcttattgcccacactgggcatttttcaccgcaaccgctacaatgcatattgtttggccgatgatatgatggaaccctaccgcccttttgtagatgctattgtacgcaacattattcacgaaacatcggcagttgaggtgttaacgcaacccataaaagtgcaactgctgagtgtgttaacacatgatacaaaaatagaagcacaaaacagccccttatggattgccatgcaaaaaaccgctttctcgttaagtaaatgctataatggcgagcagcgaaaactgctattccctgaatttttgtaaacacaccaaccccgccggtatataaatatattctcaatatataataataaacttattaatggcgttgtaataccagtacatgcaattgatgataccagatagcagttaaaggatatgcccaaacataaaaacctttctgaacgttttaatgcctaccgtattatgtggataatggtattttttgatttacccaccgaaaccaaaacagagcgtaaagcagcacaggattttagaaaaaaaataatggccgatggctttgtaatgtttcaattctccatatacctacgacattgccccagtatggaaaatgcaacggtacatataaaaagggtaaaaaaaatattgcccgaaaaggggcatataggtattatgactattaccgacaaacaatttggcatgatggagctatttcaaggtaaaaaagaagcacctgcccagcccataccccagcagttagagttattttaaaaccccaccaccaacgcaatagaaaagcaaaaaggctgtactgcttatggcagatacagcctttttagtcatttttttctttctattttctttgaaaacccttacaggtattacatttcagcatttgctgttgttatcaaagatctgataaaaagaatttgaaagcaaatcacaactttttttcttaatggatataacccggtattgttgttatcaaagatctgataaaaagaatttgaaagcaaatcacaacgtacaaactgaaacgcctagttatgtttatgttgttatcaaagatctgataaaaagaatttgaaagcaaatcacaaccagaaccaccattgccctactgcctataacgttgttatcaaagatctgataaaaagaatttgaaagcaaatcacaaccggcatcttattatttaaaacaagggattagttgttatcaaagatctgataaaaagaatttgaaagcaaatcacaacagttaataacccatgaagattggagattaagttgttatcaaagatctgataaaaagaatttgaaagcaaatcacaacgctgcgtatcttctgtttagtgtcatccacgttgttatcaaagatctgataaaaagaatttgaaagcaaatcacaactgcaaagctttaccgacttgaatggcggttgttgttatcaaagatctgataaaaagaatttgaaagcaaatcacaacgctgtctaatacatcactatggcccaatatgttgttatcaaagatctgataaaaagaatttgaaagcaaatcacaacggtttaacagtcgctattaacgggcctgttgttgttatcaaagatctgataaaaagaatttgaaagcaaatcacaacttttgatggcctcattatggaggct

SEQ ID NO: 494 - DNA, 14071 bp, synthetic construct
  source 1..14071: mol_type = other DNA
  misc_feature 1..14071: note = Synthetic
aacgcgagcgcgttggtcacgatcacaagatcgctggcaccgggcgcgccaagctcaaaggcgagttgaacaccgttggtcaacgtgaggtcaccgacggtcagtgtgccaaccgagttgccgaactcgtggcggcatttgagcagacatgccggtgaggttttactttgtaaaagtcacgtcgagaacaatggaaattggcagtggttcgttggggccgacgaggaggttagtgaccttgtagggtagttccagcgtttttttaccggggatggcggtacctttgccgcgcacgtcgaacaagacggttttacgcgcggccagtgtcaattttttggggatagcgatgtcggggaggtcttcggtgcgttcgagaaggtagtctatatcggagtcgttggcgatctggaggaggacgcgttgtttacccttgagagtgatctggtttttcttgagccgaatggatttctcaaaaatcggtcgcagaaactcttccgagccgattagttcattgctggcgtaggcggcggtacggcggttaagcagcgcttctttgatggcttccggggtgcgttccttggcaaacacaagggtcatggggcgatggtcaccggcgtaaaggtggtagtccatgctcattggcgggtgaatgtcggagttgcagaggatggcgagtttcttttccagtgcccaacggtgcgcttcggggtagtattcgcggtggttgacgacttcgatgccaccgaggacgccttgttcatacagctcggtgtgttcgggataccagcggacaatgccgtcgtcttgcagttgtttttcccagccgggatggttccagaagatgaacgcgccctgttgtcgggcggctttgacggcatcccgccagtcggttgtggccaggacggtggcattggtcaggaagatggcgttgaggtggccggggggcattttgcgggagatctccgagccgcggatgacgatgatgtcgaggtctttgctggcggggatagcgatgtcggcggcgcgattgaggttgttggtggaaatgtcttttgcatgtggcaggtactcgatgtgatcggtgaaagcgatggcgtccaagccttcccgccaggcttcttcgacgcgcaccgtgggccagaccaggccgtcggagaataccgtgtgcatgtgaaagtcacacttcaaggtcaggtagccggggatgtttggaatgttgatctcggtgcgcgcctgggtgacggggcgttcgggcaatgccagcgcaaggggtacgatggaaacgatgatgaacaatgcgaacagttttttcatgcggtcattcctttcttcatggttttcaacacgtctgccaaacgatcaatctcggcgcgggtattgaaccacgccaatgacaatcgcaggaaacgccgtccggggatgccggtcacgggcgcctcgatgcgatacatctcccaaagccggttgcgtcgggccagcggatgacgcggcggcagttcgaatgcaatgattgcgccgctcaatgcgggattgcgcggcgtcacgggcgtcagtcccaacacggccaggcgttcgcgagcgtgttccaccagggcacgagagcgacgacgcaaagccgcttcgccgccgaggcggcgacggcacgccaggacttccggcaacaccatttgcgggcaccgatccgtgcagccgtgaaactccatctcgtaatgccagtcggctccgccccacccccagcttgtcaccagcggtttcagcgttttcttgaaacgggacgccacgtgcaggaaaccgcaacccaacggcgctgtcaaccatttgtggcagttgccgccatagaaatcggcaccaatgcgggaaagatttagcgggatcattcccgccgcgtgcgctccatccacaattgtcacaggcacgagtcggcagagttgtgctgcgggcaggaccagcccggtcgtactggtgacgtggctgaagaagagcacgcgtgtggacgggcgaacggcttttttggcggccgccacgatctcgtcgggatcttcggtggtgtatgggagtttgaacgagcgaagtttccaaccgcgttcggttgcccggcgtcgcaggcagagcatcatcgcgccgtactcgtggtcggtcgtcaaaacctctgcgccggggggcaggtcaagggcggtgatggcgaggttcatcgcaaaggtcacgtttggaagcagcaaaaggttgtcgggcgtaacatgaagatagtttgccagcgcgcggcgcgagcgatgcaacaggcgcggggtttgtcgccagaggaaatcggagggacactcggcctgcattcgtcgtaggcgggtaacggcgttccaaactggtttgggtgttggggaaagcgtgccggcgttgaggttgataaacggtttcattgggtcaacgaaagcgagcgccacgggccgaaccaggaacgagctttttctcggacgcagttgccgcgcaggcagtagaggctgttttccggggggccggtggcgacgaagacgaacgatttaccgagtgcctgcggcgtgctgtagcggacctgaccgccgagttcgtagctccagagcaggacgccgttgcgtccatcgaaacaaagcagccgacggcgcatggtaccaacgacaatatccggcacgccgtcctcattgaggtcggccaacaccggttcgctctgaaccggttcgcggacaaggaccgaccacaccggcttgccttctgtcaggtcgagtcgaaacagttccccgtctgccgtggcaaggatgcccgccgtcgggccggccagcacgacgcggttgcgggccagttgtcggttcctggcatgggggaaaacccacaacagatggccgtccgcgccatggagcgcataggtgcgaccgtcgtcgttgacggcgatcacgtcttccgtgccgtcgccgttgatgtcggtgagcgtcggtggcgacggccatcctccgacgggcagcggcgaacggaactgccagcgttcccttccatccgccagcgagagacaatgcagcgcgcccgcgccgtcgccgacacaggcaacctccctgccaatggccgccgccacggtgaccttcggaatggcggcggtccagcgaaggatgtggttggtcgccgtgaaacagtggacggcgttgtgagcgtcgccgatgaggatgaggccgttggcgagcgcgggcgagccaatggggctgtcggtttcgccagggagtttttcctgccagaggagcgcgcccgtgtcggccgagaacgcccgcaatgcgcgggtatgagcatcggcatctacaaccatcccctcgcctgccgccgccccggcataaccgggcgtctggggggatgtggcgacagtccagagcggctgaaaactgtcgctgtggtaggcagcgatctggccggcctggtttttggcgatgatttttccgtcggtctgcgtcagcggcgcatcgtagtaggtatcggattttgccgaccatgtttttcgtccaccgacccacgagaaacaatacacacgacgaccggctccgacggtcacatcgggcacgccgtcgcggtccacgtcttcgagggaataaccgcgtccgacgccggcatcgagtttgatgcggcccagcagggagccgtccttgccgctgagacagaggatttcgtcaggaccgttgttgaaaaccaggtcgagccaaccgtcgccattgacatctgcgccgtggggcgcgacggcggggtattcacttttccagagtcggtggacgccatcgggttggtaacattccgtgccatgcgggccaacgagcaaccgcatcaacgtgccatcgcccgccagatcgagccgcaacgggaaggcctcgctgacgccgatgagcttgtgttcgctgagcgaaacggccgagtgggtcaggacatcgtcggcggaacgcggggtcggcagcaacgcgatcaggcggccgttgcgatcggggtcttccaggcgaatgggcaacaacaggggtgaatcggtctgcaccttccacagcaaccgtccgttgcgcggatcgagggcgtagagcgatttgtccgcgctaccgacaagcagcacgtgaccatcgtccacgcgctgccatgcgagcgcgctttcgacgcgcccgtttgtttgaaatttccagagcagttgaccgtccgcgccggagatggcgtacacccaatggtcggctgagccgacaaacacatcgagaacaccgtcggcattgacatccttcaggcgtggcgggccgagaatggcgccctgcgtcgtgaatgtccaaagcggtttgccgtccttgccgttgagacagtacaaccgatgatcggtcgagccaaccaacacgtcgggcgtaccgtccatgttcatgtccgccaagccgatgggcgcttggacggcatcctgcgcgttaaacaaccagcgcgtgactccgttcttgcccgcaagacaataaacccgtccgtcgtcatcgccgacgacaacctcgccccacccgtcgccatcgaggtcggccacggcaggcacggagagaacgttgccactggtcggaacgctccagatcgtgatgggcgggagaacgacgcgcacgacgtgtgtctggcggttttcgattttgatgggcgcgcgttgtgccaggtaattctcgcgatgcaccagcacgatgtaatcacccgttgggagttgctgctcgacgcgcgggccgcggaacgggaggcgttcactgttgggcgtgatgatcgtcacagccgcatcgggcggatcagtgtggatgtccaccttgcccatgcgacggtccagttgcaacgcgaacgcgagccgctcggaggggcgcacctcaaactccatctcctgcggttcatgcgtcggttccaggctcgcttgcaaccggtgcttgccgggtttcagagaaaacccctcccgcaacacctcctctgtcacggctccaccatccacggccacgttgatattggtcggttggacctgcagccgcagatgaccgggacgcgtggcttgataatagtcggcatagtatttcaccagataccccacgccgctcagaaggacaaggttgatgagaagcatcttccaatgctttttcaatttccgtcccgcctgcgccatggtgctgacagggcgggcttcgatcggttcaccggccaaaaaccgcgcaatatcttctgccatttccccagcggtcgcgtaacggttgtcgggatttttctccatcgctttttggcaaatggtggaagcgtcgcgatgaactttgcggttgactttgtgcgccgggagcgggtcttcctcggtgactttgtggaggatggtgaacacgttgtcgccctcgaacgccggacgcccggtcagcatctcatacaacgtcacaccgagcgaaaacacatccgagcgcggatcggccttcgcgctgtgtcccatcgcctgttcgggagacatgtaccgcggcgtccccatcacctggccggtcattgtcagatgcatctcatccttctgctccgcctgtttggcaatgccgaaatccgtcaccctgacgcgccccgcgttgtccaacaaaatgttgcccggcttgatgtcgcgatgaatcacgccatgttcgtgggcgtactgaagcgcctccgccacctgccgcgcaatttccatggcctcgcgcgtcgggaccggcccgcgcgccaggcgatccgccagcgactcaccctcgatcaggtccattgtgaaaaagtacgagccgtcgtgcgagccgaaatcgtgaatgggaacaatgttcggatgctgcaaccgtgcggcggattgtgcctcctgcagaaaacgctgaacatgttccggaccgagaagcgtaccgccctgaagaactttcagggcaacaacgcggttcaggtcccgctgacgcgccttgtagatgatgcccaccccgccgcgagcaatctcgccaagaacatcgtagcggccaaactccgagagaacagtcgtctcatccgcaacggacgggttgggctggttgacgatcgtcttctgtgaagtcgtcgcgtcgttggacacgcggcgattataacgtcgggccgtcttccggcaacaggatttgccgtaacagaacgaacgctaaaaaatcttccaccagggtttcttttgcggtttggcctttggcggctccggcttcgggatcgtgataaccgaaagcgtggcgggcatctggaaccgggtgtttttgaagccggggaaaggccagtccatgttggagacaatgatttcatcgccacgcaccaacgcttcacagggttgatcgagcattcccttctgtttttcatcgccgctctttggatcaccgttggtggcgatcatgtacacgctgccgtcgggagaaacctcctgcacggcattggccgcggaatcggccacatagagcttgtcggtgcgcggatccacatgcataccatcgcagttgatcatgaacagcgattttgcgaactccgtgttggaaacgacctgcccgttcttgtcaaacgtcagcttgtagatcacgccgtcgccaaacaagccgacatacagattacccttgctgtcgaactcgatcccatccgcgccaaaccgccactggtccttgtaacttttgaatgtggcgatgacatgcggatccttgcgcagaggcgtctccaaccgcacattctcctcatcgagacgaaaccgcaacaccgcgctgagcagcggatgcgattcttcctccaacaccgactcggtaacgtaaatgtgtccgccgcggatgacgacaccgttggcaacattgaacccactggccaccaacaccattttttggggctggccgttgttcagcaccaacttccagagccgcgacttgccgttcttgtcccgcatgtactgcatatcggcgaaataaaggttgccatccggcccgacggcaatccccatgggcgcgatccgatcaattccctttggcaaccccggatacggcgttggaaactcataaaacttctccaccttgttggcagcggtcaccttgatcaacaagggcggtttcgactcgtcgttgaaattgggcaccgacacgatgagactgttatcgggcaacaacgccatcccatcgggcgtattgcaatcatcgggcaacgccaccagcaatcgcgccggcgcgccaaagcgggatgtcctgggcaccgacttgcaaccgcaccacaccgtcatactgaccgcgcaaaacaaaatcccaaaccgtcgcatctgggcctcctgtcgtttgaaaatgttgatcatgccgcgcagaatacccgaagccttcgcctttcgccacaacgaagattccccccgaccatcggccaaaacagcaaaaggcgggaagttgattcccgccttttggaattagaaacgctttcgagcgcggcgtgttcgcctggcgaacagaggcacggcctgcgttatctaactttgtcttgattccgtgttgagaatagccaaaatccccacaaacgcaagaggagaatcgtcatgggaaatcgggcagacttggaactggcattcgacgtgggacatagctccatcggctgggctgttctgaaaacccaaccggaactcgaaatgaaaggctgcggcaccgttatcttccgccccgatgactgtctggcctcaaaacgccgcgactaccgccgccaacgccgccacatccgcagtacccggttgcggattgagagaatgaccaacctacttcttggcatcggcgcgattacgcagagtgacgttgagtccggtaagaaacaacacaaaggagaacccccaccttggttattggccgcgcgggtgttggcggctcgaacggagacagagaaggcgaaagcccttctcacttggccagaactttggaaagtcttgcgctggtacgctcacaatcgcggctatgacgcgaatgtccgctggtcgggagaatcaaaggtcgaagctttttcgccgtcaccgcaaatcaacaccgaggacgtcgaggaacaagctgtagaagccgaggagtcggaattagcggatgtcgaagtggccgaggattcggattcggactctgacaagctgcgagctgggaaacatctcatgtcatccaagtatggattccacaccgcaacgtttgccgaaacggtcgcaaagattcttttgggtcccaaacgagatgtaaagcccggccaagccggcaaaactggcaaactggccgaaacaactgaatcgttttcagaaagcgacttccggaaattgttgttcgacacgccgaccgagtcatggagccacccgcgtcatttgagcatttacttcaaaggcatccgtgctgcgttcccccgacgaattgtcaaggtgattggcggacagcgaacattggtgggcggcacagaatgggaagtccgcgccatccttcgcgctcattttgatgccccgaagggtaaagccctgtgtgatgagacattcgaggccgccatttgtggccgattacccaaaacacgggagaactggcgcgcctatgcggaaacacatccgacgctctacctttcttcagatgatcaggcgaagttgcggtcccttcgggcaccgccaaaggcgtcgcaagaaaagagcgaacgcattcggcaacaacgcagaaacattctcacggggaagttgttcttgccttctcgttatgaaggcggcctcttgttcggccagttgggaacacgctttttcaaccgcatcatttcacgctgcccgttcagtttcgcccggattgttgcggcaattctaagcggtgatgaaaacactttgcgtctttacgggacaactctggctgcggtaaaccgttcgcgacacagcaggaacggagtgatggagaccgacttggatttggcacggcggtgggcggccaagctttcaaaagttcccgccgccaaatctagagaattcttgttgtatcggtgggcgatgacccttgctaatgtcatagtagcgcgtcccggccgcgaaaggctcacgggttatgagcgccgctgcatccaccgacggctgcgcagaaccggctacttcacaaaggattctttcaaagaggccgtgcgacaaacgaccggctgcgagccggcgaatctggaccagatgtttgataccaccaccgaagctgagaacagtctgtttattgacccagtccgaaaatacctcgcaacgaatgaagttgccggcgttgtcctgcctgtccttagccagttcctgcaggtgcgcttggcccgactcctgcaaaaaggcaaaggcgtcagagtgcgcgaaattgcagagtggttggacgagacagcgaaacgggaattatctcagcgcatcgaacaatacgttcaagaaaacaacgccaaggccaaagcggcaaaaaagaagccgcacgacacgcactcacccgatgaggatcggcgaaaaaaacaaaacaagctgacggcagccgcagttctccgtgtccggcttgaagcaccgcttcccaaaggacgcgcttcttaccatcgtgtcgttctccgaaaagctgtcgccgaagttctcaagggattcgatcctcgcaaaccgaaacgcgaccgcagcaaccccgacggtgaaaacaaaccttcgcacggctgcttgtttcgtacgccggaaaccaatcggcaactcctgggtaatccaaacaacgaggctgaatacgaacgatggaaacaacggtggctttcccaccagaagaattaccagcggtacattgcacgggaacgattgtcccccggcagcggagaggcatttgttcgctccgagtatcacgccgcccaaagctaccgctggctggcgtcgcagagcaacaaccatattgttcgacatcggttgacaatcctcgatcgactcttacgcgacatcattgccgaccagaactattgcgcgggcgacccaaaacgcattcgccgcatttccattgaagtcgccaacgacattctgacgttctctggtcttgaacggaaacaactgtcgggccaggtcatgccatctttgcgcgaacatcatgatcacgtggtccggttgttgcaacaagaactcaaggggacgcaatgggaaaacaaaattgatggcgagttgatttggaaagcaaaaatcgccgatgaccttggctggtggtgcccctacaccggaaaaaagtattctccatgtgaactcgccagcggtgaaatggacgtggatcacattatcccgaagtctcgacggctaaccaacgccatgagcgcagtggtggtaaccttcaagaccatcaacaacctcaaaggcgatctcacggcatgggagtttgtcgaacggtatcaagatcagcccgtcggtccacatggagaaaaagttcgcaagctctgggactacgaacgtttcgtgaaaaatcctgacaacgaaatggacaaaccgcggctcagcggtgaaacgggccactcagattatccgcgatggccgaaatacttgcccggttcgcggcggaagcttcatcccgactacgttcgccgtaagctccgtcgccgttacctgctgctgaaacactatgagaaggacaaggacacttttactccgcgtgacctcacgatcacttctcacttgaaccgtctcgcgcaacaggtcttgctgcgctccttaccccacctcgccgagcaccaaatcactgcgattccgggcagcgtaatcggggtgttgcgcgacgcacccggttggcgtttgcttggttgcctcgacggcgctgcgaccgccgatgtaatacgaaaagtcctacaactggatcacgaagggaaaccgatgtgcgcttctgatgtcgcccctttgatgaagcggatcccgaaaccgaagggagaaattcgagaattgacgcacttgcatcatgccgtggatgcttgcgcgatcgcaatcatcaaccacttgctacccaaagacggcaagctttgggagttggtggcgaagcgtgagctgacggacgcggacaagaacgcctacgacgacctacgccaaaagaatcagagccaatggcaacctcgccgccttgcccgattgttctccattgtccccaatctcgatgacaaaggccaacaacccaaacacgaccacaaatggcgaatccgtccttgccggttgaaagacgttctgcctgacattggtgctcaagtgaacaaatgtctcagggagcggcgcgtcgtcgaacacaccccggcggatatgagcggacttgccgccgaggaaactgtctggcgcatttttgacccgtccgataatcatccttccgcaaggcgcttgaaacaatggtttgagaagaaaatcaaggacggagaaatccagaaattgcccgacccaaccaatgaggccgacaagacagttcttatcgtctgccgcaaacgccgtgacgcaaaaagcaatgacaagggcaagacactccacgataccggcaatgtctggcgttgggtgtatgatgaagtcaataaggtgcgcgttgtcggcctgaatccggggaaattacaccgtataaaggcagtgaaactaatccgcgaaaacttcggcatcgcgctcgatccagagccaaccatcgtccccttccataaagtctggcagcgcctcatggaactcaaagccaaaaacggaggcaaaatgccccgcgtcctccgcaacggccagttgatccgggttctaagcggatctcgcgctggcctttggcgcgttacctccgtaaagcaaactgaagcttatgggttggtccttgacctagcctacccagacagcgtccaccttagtcggcctaatgctccagtagagcaacttctcaaagaagggctcgaaatcctcaagcattccctgaccggatatgatgcgtctgtggtggcgtatgcgcctgtcaagcgtcgtccacgcaaacccaaagccgcccaatcagagcaataactgaccacggttagaaaactgaggcgatgcagtgtcctaccacatcgtcagcatagatagcccgcagtgctccattacctgtcgcgacggacagttgacctgcaaaacacccgatggtgaacggaaactgcccatcgaagacgttgcttccatcatcatcaccagtttctccgcctccatccacagccaattgatcgtggacgccgccaaacacggcgtcgcactggtcttttgcgaatcattcaaacccgtcagtctcctgttgccggctaatcgctccaccgacaccctccttacacgcgcacaggtcgctcttcccgacaaactgcgtgaacaactctggcaaaaaaccgtggacgccaaatgccagaaccaagccgctctcgccgaacatctggcgccaaacgatccttccttggggttgctccgtgagactgctcacagccgcaaaccgcacaaggaatccacgtgtgccaagctcttctgggccatctggggacgctgcctcgatcagccagagttttcccgtgatcacgcgacccccggactcaatagcctgctcaattacggttatgctgttctgctttccaccgtcctgcaaaaacttttcggcgtcggtcttgacccaacctttggcatctcgcacctgccgcgcgagcgcagcacaccactggcctacgacctcatggaaccgttccgtcccatcgttgactggcgtgtccaccaatgggtcaaacaacaccccgatgccgcgaattgggaagtcaccaaagaatttcgcaaatgggtcacagcgtttccgttagagcgcgtggactatcttgatttcacgctcgaaatccaaggctgcatcgaaggtgtcatccgaggattccgacgcgccatcgtcagcaaacaactttccatgtataaaccatggacaccgagaaattcaagatgggctggttgattgtcgctttcgatctgccggtgatgacacccgaacaacggaaacgagcgaccgatttccgcaagttcctgctcgatgacggattccaaatgatccagtacagcgtttatgcgcgtccgtgcgtcagcttcgcccgacaggaaacgcatctcagccgcgtcaaacagaacctgcccgaagagggaagcgtccgagccatttttgtgacgcgggcgcaatgggaacgctcctttgtcattcacggttcacccgccaaagaaaccaaaccagaagaccttcccgaacagattcaactctggtaaccccctgcggactggcaggatcggtttaccgattctgccagccccgcgattggaatcaaggcaaagctgcgccggagggcaacaactacagggtcacattctgccagccccgcgattggaatcaaggcaaagctatcttcgggcatcatgcgaaagttaagggattctgccagccccgcgattggaatcaaggcaaagcttcttcgctatcgcaatccaaaacacccttattctgccagccccgcgattggaatcaaggcaaagcatggtgtccaagtcggtgcatagggtcctaattctgccagccccgcgattggaatcaaggcaaagcacgctgccggtgttgcccggcaacgcctcgattctgccagccccgcgattggaatcaaggcaaagcagccgaccccttcagcggccccggcatcaattctgccagccccgcgattggaatcaaggcaaagccgtaaccaggccaacatcacgctgtaatcattctgccagccccgcgattggaatcaaggcaaagcttccacaatggaacacatttcaatgtcaggattctgccagccccgcgattggaatcaaggcaaagctttcaaaaagcttgtaagggtggttcaattattctgccagccccgcgattggaatcaaggcaaagcgctgccggcagtgtagcagaacaaagcttgattctgccagccccgcgattggaatcaaggcaaagctcgcgctccagcaacgccaccgcgcgggttattctgccagccccgcgattggaatcaaggcaaagcttggcccggccgttgggcgtgctgacgatcattctgccagccccgcgattggaatcaaggcaaagcgtgctcgcttgtcaatcaa

SEQ ID NO: 495 - DNA, 14756 bp, synthetic construct
  misc_feature 1..14756: note = Synthetic
  source 1..14756: mol_type = other DNA
ctgatactcccctataaaaatggctatttatcaactgtttgttgtgacatagccaaatataaaaaattatgacataaaaaaagaagctctcttcttatgcaaaagagagcttttgttttagtctgtcgaagctattgcctgatgggctgtggttttctgtaggtgttgagggttttgagcaatccccgcaaaactacggggtttgactcgcattctctaaggatttcagcttgctcctgatactgatcactattcattctctccaccggacagccataggtctgctccaggtattgccggtaatggggaatgtaatcggccaaattcaaggcggaaagcatctgactcagcggtatcttcttctgtgtagtcgaagattgcggccgggaagtccgccgtgatggactcttttcctgccgaagcgatgcggcattgccgtcatcatcttcttccgtgactatgccgagcatggcggaaagcgcatagcgtcgtccataggtacaggctgaaccaagcccctgagcatcattttttgccagcgggatcatggccagactcgcctgatactggccagtctccgcatgaacaagcttggtgacaaggccgaagtatccgggctcggctggaaccgggtactgagtcagccaaataccgttttcaatcagtacggaacgacagcagtccataacactgttcagtgtcgcgtacttgtttttgataaaaggattgacggcatctttaacagcaggttgaagctgcttctgcacattcagaagcgcttttgccaattcacgtatatcatctgatgcatatgaaaattccatgcgataacctcacattatggatttgaatggaagcatatgtcctgatgctgacaccaggaacagtgcattccgatatttttataaaagttaccctgcaggatggcttgggatatagacagcagcatggagtatgtctgctggaaatcctttcggctccgtgcagagttgagccatacgactttgggattcttagttctgacaaggtacagataagaaaccggaatacagctgttccatccgaaccggctggccagaaggtacgcataggtactgagttccagggaacgctctgcctgccagtcaaacggagttcgtgccgaagtcttgatatctataacccggtaaattccgtcatctgtgcagtctatgagatccatgtatccgcgaagcagtatgttttcatggacctcacctgtctcaggattgaacaacggatactcaaagtacgtttccatatccacgggattaagaggatcaatctgcgtgagaaatgtctcagcttccttgagtacgctgtcctgagcgttcttcatggcttccgggctttcatattctgtgcccgtcagctcgatgtccttccagaattcgtcggatgccactctggagatctctgcaatcttgtcaccgtacacaatggtgttctcgatgacatgatgaagtgcagagccttccagcatggccttcggcgttttttcaggaatgatcttgtcgatataggtatattgatacttctgagggcacagggtaaacgtgccgattttggacttggagagtctcagagtggtcatgattcctccgaaaaggagggcggcgagaaatcccgccacccttttgaattgtgacgggaacaagcctgtgccttaatcgctcatgcggatttttcttcggggaagattctccagcgactgatcaatggcagcaagcagctcgctcatttttccgtgcatttccgttttgaaggaaacgtcggtacgaagccgtgcgggagatacgccgtccacaatgcttttgcattgctgcaccagcgactccagctgttcatcctgaaagatgttcctgtcgtcgaaatgagacagaaactcatgcagattctccacagcagaagatcggaggcgttttggcgttccgtcggttccgttcagcttgtcggtcagattggataccagatcgacaaactccattctcagcgcctcttcggcttcctgacgtgcctgtgccatgagttccttgaacttggtcatttcctcctggtacagagaggctgggagtattcgagatgtggacgggccgaccgtgaggtaacgccattcaaagcgaaagcgtcccttcagctgatcggcagaaggatagtccaattgatcgaagagttctcccagcttctccgctgcttccgtgatggcggaaggataccagtagagaaaactttccacggaacaatcgtaatcgttcttaaacgttgaaagctgatcctgtattgttgggatcagctttcgtggcacgaggacacagcctcgaatgggaaatggcaaggccagctttcggatgtagtttcgggccttgccggttatttgtttgatgggagccgtggattctggatcaaggagaagttttcgccctttcaggtagtccacgttcccgacctcagccaggagtgcgggcggcagttttctgtcaatgctccagcaggttgccgtgagctgaagaagcgccgcatccttgaagatatcagaatacgacacgtcggactcctaatggatggaataaccgccgttcctgcacacgggaacatgacgggtcacttctttccctttcttattaatataggaaagaggtgtcagttcacgggagatttcctccccgagaacctgcttgatgaattccgaagcttccaggcacgatttgcccttgaagccggaagtttccagcgtgacttcgcctgtggcgtcgatggaaatggtgatggtcttcatgctgttctcctacactgcggtcagggttattttcagggtattgtcgaccttcttttccgagtagaaatagttatggcattttgcctgggccttcacgacttccgccgtgtatgcctgcttgagcagttcgccatgatggccgacagcctttctgagtccctgatcccagtcgtcaaagagcaggatgtattcatctccacgtctgatgacgccgatctcatagccgagtttggccgtgggaacctgtatggcatggtcacatttgccgagttgttcctcggtaatatccgtgtgaatcttcaaatcttcgggatgcaccactcgcccataccacgtataggttttctggttttccacgaagcgaagattgagccgttcgcaggttctcttgagaatgttcagatccttaatctgaagtttgattttagcgatgtgcgacatggttgcctcacttggctggggtaagagtttttctggctacggaacggatttttctcacttcctgtggagcctcgtcgggagtattggctattcttgctctggacatggcccaggaacgcaaggcgtcaatttcttccttcatggttcgggaaagcggaatcaggttctttctggcttcttccagaccgtcaaagagggaatccctgataatctgctccagttcggaaccggtgtatccgttcagctgctccgcccattcaaggggcatggcagttccgtattttctgttcataatggcaatgatctcccttcgctcctcaagagcaggaaggtcgacaaaccagatggaatcaaatctgccggagcgcaaaaactccgcaggcaattccttgatgttgtttgccgtagccacgatgaacgccttgttctgatcattcatccatgtgaggaaatgagagaacatgccgctggtggttccgccgtcgctgcttccgttgcctttgactcctccgaacattttttcgagttcatcgaggaaaaggacacagttgccgaaggcgtctatcaccttggtcgcttctctgattctccgttccgactcgccgacaagggaatttttgagttgccctatgtccaggcgaagcagaggaaaatccagcatggaagcgacggcacgggcggacagtgatttgcctgttcccggaatacccacaagaaggattcctttgggtttaggaagcgaggaatcaggggcgtaggcctgtgcgcggttctggatgtagcttttcagtcttttcagaccccctacgttctgcatgtcggcagggggataaagctccagcagaccagatttcttaatcatctgcgctttggcttcagtgatgaccttggaactgaaatagccttttttcaccagcgataagctgaaggcagtttctgcctgaaattcagtcaaaccagtggcgagccttgaggcttttcggtttgttctgatgttggtggtttcgccgatctcggcctgcaggcgcatcaacgcctcttcatcgggcagcttcatctcgatgagatgaaagaatggttggagttgaatcggcagcgcaggtaatggggaaaccatgaccagacagttgccgacgctcttccagcgaagaattccattgaggatggactggcagacgacgggatcgtcaagaaagtgctggagtccatgggcaatgagaaccgtatccttcacggtggaaagccattgaacagcttcgacagggttttggatttcgttgagagtgaaggatgacggggccatgccgtgaacaccggaaacacaatcccaacggcagatctgccattcgggaatcctcctcatgagttcatccgctcgatgcggttcctgagtctgtaacaggatggcgggaaaaccggctttcagatagtcagtaatcataataaaacctcctatctgatactatttctatatgaaaaagccctgtattaaatacagggcttgataaaatatttttctttgaaaaatagactggttagtattttgccaactcgtcctgtatttttctgacgagttcggtggcagtcattcccatggcctgagccagagcaaagataacagtaagactggcggatctttttcccgcttcaatcccgacaatgtagactctctgaagacctgcctgatccgcgagagcctgctgagttaagtgcctctttcgccgttctcgaagaatgacggtgcctgtggctacctgaagggaagggttgctttccatacctcacaagtagtgggtaacttgacctgaaaagtatatgatagtatacatttttaacctttgaaaaacttcggatgtacttctcccaacaaataccggagaaatacgctcttctttttcttaaaaggatttcaaagtattataagtattcaggaggagtcggaatgcttaccaaaggtgccataggaaaccttatcaacaggtatagggcagttttgaaaaaatgcacgctgatcaatgtatttggttcgctggccgttgcgtccatgctggtcatgggaggaacgtcctgcgcgaatgccgttgatttaagcgacctgacggatggagtcatttttaaggacggggccgcaacagtagaccctgacagtggaaaatatgctgcgggcagcaaagtcacttctgacgacagcactcttgataccacctcgatttccctgactaacaaaccctttacaggcgagctcaatgctggcagccttgccttcggtaaagatgtgacagctacggttaaggatgcctccatttccattaatggaggttccttcaccggtcttatggaagaaggagaagaagagccctgccccatccgtggcggcggcatagctgccaacggtagcacatccattgtagagaaatccgctatcaagattgacggagctaagctagagaacacgttgatctgggctggcggtgtggcggtggccgaagaggatggaacgattaacggcacctccatcacaaatgaatctaccatcaccattaataatacagacgcttctgacgttaccgtatacggcggcagtgacagcggtcatgtcggaacgtccaccatcaccgtctcgggaaacagcgaggttgaaaccatctttgcgggcggtgacaacgacactgtagagaacgtgaccattacggtcggagacggtgccactgttcataatatcattaccaatggctctcataattcccaggtagaaaacgccaccatcgtcatcaacggtggtaatattgcgggataccaggggaatgccatctacaaggaagcgaccggcggaacgacggagaacctgaagatcgagctgaacgatggaacaatcaacggcaacgtcattgccgatgcaggtaccgctaccatttccgtcagtgatgaagctaaaattttcggtgatatcatcaacaacagcggaaatacggggcttgatgttgccgacggtgccatcatgaccttagccaagggcgatgttaaagtcgatacgctcagagcacagtctggctcgactattcttgttgggaacgaagactcggcaggcagactcgtggccgcctctgccgacctcaacggtgccggggtcttccttgaccctgcatggaaagacgatccttccgttgatatcctcgacaacgcctcccatgccgtgttcggcggtactaaagtcaacggcaagctgacggccggacagaactctatgctcgtgctcggcgatacctcttccgactgggcaatgggcgcgttcaaggactccggtctcacctggggtaagaacggcattacggctgctctcgccattgccgattctcagacgctcgaaagcaccggttccctgctggttgacggcagcctgaccagtgccgacttcgccaacgccggcgacgccacctttgccgataagtccctgctcatggtcaacggcgccgcagcttccggcaacaacgtcgctctcaccggaacggagaccggaaccctctccgttgccgacggtgccaagctgtatatccgcgacgcgggggtgggcacctacacgatcaccagcaaattcaacacaaccgatctcaacggctggcaggatgatgacctcattctcaaccgtctggtttcgggtacgacgagccttgatgaaaacggcaacgtcatcgttaccacgacatccgaggatatttcccagctctaccccggaatcaagcccgtcaacagcctgaacgcgctctctctcgacagcgactccgactatatgggcgtccgtttcctgagccgagccatggataagaccatgttggcagacaatgccgtaacctcgacggtcaatgaagtttcgcagtccgccgtgactgccggtgttcagaatacctcactgcgtctttccgatgccgcttccgatacggtgcttcatcacctttcgctcgggaactatgattccggcaacagcttccatcaggacggcgttgatatgtgggctactcccatgtacggcaacacctatatgcacggcatgggagcttccggtacgtctgttcgcggcaactacggcggcatagccttcggcgctgatacgcagataggcgaagtggccggcggcaaggtccgcgccggtatcgccctcaatggcggcggcggcaagagcgaaaccagaggtacggccaccagtacggaaaactcctacaacttcggcggaatcaatctgtactccggctggaatctcaacaacctcaacgtgatggcttcactgggctacagcatcggcgaccatgacgtgaaaatgaacctgccctcctccatgcagatgggacaggccaaggccgatatcgacactggcgtgtttacagcggatctgcgggccgaatatcagatcaagacgaactggctcgatattctgcctcatgccggtgtgcgttatacgtcgctccatacggacagctataatctcaaggtgaacggttccacgctgaacaatgtgaagtccgatacgcagaacattgtccagttccccgtgggcgtcacggtgaccaagaacattgatgccggcggatggaacatcaagcctcaggcggatgtctccgtcattcccgccaccggtgaaaagaaggccttcaccaaggtgcacttctccggtgtcgatgccacggacggcttcaacacccgcatcatggattccacgagctgggcgggcatggtcggcgttcaggctgaaaaaggcaatctgagcctcggcctgaactacggtgtccaggcctccagccatgaaaccgatcagggtgtccggttcactctgggatggaagttctaatttctgagcagtaatgcttttacgctccccgtcaggtgtatgcctggcggggatttttttatcaggataggaaaataccgacgttgttgaagaagtaaacaataaaaaaagaccgggaagcctgcagacttcccggtcaaatacgttcgcccccctataagggagacgaccttaccgtgcttgcgctccgataagtcccctgctaaaggtactatctttttatgctctccaatgttatttgtcaagatatgtcttttgaaaggagagcctcatgcgcattgcagaaaacatcgttcttggactcgatctcggaagttcatccattggttgggctcttatcgaagaatccccgatcaccttggaaaaacatattctgcagaaagtatctccagacggaattgtcacctatgccgtaggctctcgtatcatagatgcaccagaagatgccaaaactcatgaacttcttaatgtggcgcgcagacaaaagcgttcggttcgccgcgttatcgcccgcaaggcgcagcgcatgaaggcagtccgcaatctgattgccgaggcaggtgttcccgaaataaaaaatctcgatgccgttcatcatgaaaagggaactccccagaactccccctgggaactgcgcagcagaggattacaatcccctctttccgatctggagtttgccgtcgctctcattcacattgccaagcacaggggtttccgctccaacagcaaaaatgagaacaacgatgatgcgggcaaggtgaaggaatcactccgggaactcgaacgaaagctgaaagaaagcggcgcggaaaccataggtcagtttatggctgaacagtccgacagaagaaaccgcaagaactataagggggaagcgcagtacacgcatatggtgatgcggagctggcaggaacaggaagtacatctgctgttcgagcgtcagcgtgacttcggaaaccgtcttgcggcgtcgggcattgaggagcgtttttgctcgctggcgtttaatcagcgggaattgaagtccgtagcctccatggtcggcaactgcgtttttctcgaacatgaaaaacgggctccggcgttctcccctacggcagaatttttccgctttcttcaaaaagtcgtccatctgcgcgtcagggaaaacgacgaggtgcggcctctttcattggcggaacagcagaccatgatcgagctgttcggatgcacggcaaaaatcacctataaaagtgtgcggagaaagctgaagttcggtcccgatgtatttttcgatgagctctcctaccccatgagcaacggcgtgatcgatatgaaggaagaaaacgccgatgtcgtaaggcgttccggtgcgtcgtgcgcgggcaccatggcgttgaagagctgcctcggccccgagctttttgaaaatctgcggcaggagcgtaccggcgaagacgaccgctatcccggctggcccgtcatagacagaatagccaaaattctttccgacaacgacggtttcgacagcatggaacatgaactggcagagctcgatatcgacgactcgatcagaaaaaacattatggtctgcgccagggaaggtaagttcagtgcttttcgcggaaccatgaatctcagcgtcaaagccatgcgtgccctcattcccttcatgcgcaaaggcatgcggtacgacgaggcctgtgatgctgcaggctttgatcatgccagagaacgcgaagtggaaatcaacgacatacgtaatcccgttgttcagcaccttctgcgcgaagtgaagcgacaggtaagggccgtatgccatgaattcggactgtggccggggcgcgtcaatatcgaaatgcttcgcgacgtgggcaagagcgcgagcgaacgcaaaaaaatggactccggcatccgctccagaacatcggaaagagagcggcacagaaaggcgctggaagaaaaatggaaccgccccccttccgctgccgagctcaagcggtatgagctctggctggagcagaacgagcattgcgcgtatgcgcagcttctcggcgcggattctccggtgtatcgaggcgcccccggaggccacattccgctggactggctgaaggacggcatgaatcatgtgcagatagaccacattcttccacgcagccggacattcgacaacagccggaacaatcagtgcctgtgccttgccggagccaatcagtccaagctgaacaagactccctttgaatggaagggaaatgccgatgccgaggcatggcatcgttattcagtgtggataaacgggttgcccgtcaaggcccgcaagaagcgcttctttctgctcaaggatctgagcggggaagtcgaaggtcgttttcacgcccgcaacgtcaccgattcggcctacacagccagactcgtcgcccagtggttccgcaatgaatatgcctatcggctgaaggatgcgccggatgaggaaagaaactgtcgccgtgtctatactcgtccgggcgcagtcacgaactttttgcgtcatgtatggggcgttcagagcctgaagaaaaatgaacaaggcgaacgggaaggcgatcagcaccatgcgctcgatgccgtcattgtggcctgctgcacggaaggcatgcttcaggccatcacccgtcagttcaagaaaaacgaactcgaaggcttgaacgaccgtttgccgaggccgtggaatcatttccgcgagagtctcgaaccggtgataaacagcgtttccgtttcccgcgaaataaaaagcaagaagaccggggcgctgcatgaagagacgttgcgctctttgcgggaagaaaccgtgaacggtgtgaacaggcagatggtctatgagcgcaaatgggtgaacgacctgaccatgagagacctggaaaacatcaaggatcccgaacgctgccggaagcttgtttcggctcttcgcacatggcttgccctgccggaaaaaagccgtcctccgtttaccgacccggactccggcaatgtggtccgccatgtgcgtgtgcggcgaggcgagttttccagcggcgttacgctgaagcgcggcagcggcgtggcccaggccgacaatggagagatggcgcgcacggacgtgtactcccgtgacggcagattctaccttgtgcccgtgtacatgaaggatattgccgacggcagactgcccctgcgggcatgcagaaacgccacgcctgaggctcagtggcccgtcatggacgagtcctatgaatttctgttctcgcttacgaaaaactgttatgtgctgacgaagaagcgggaaacaatcagggagggatactatgtcggcatggatcggacgacggctgccatcagcctgagccttgccgaagacaagcagaagaaaatcaagggaatcggcgtccttcaactggatcattttgaaaaatatatagtggacaggctggggcgtcgggtccgcgtgactcgggaacgggatccgaggcgctcatgaactggcgcggcatacacgtaagcgaaccggcccggctttccgtaaaacagaatcagcttcttctggaacgacgcaacgaaacgttcacctttcctctggaggacatggcgtttcttatactggatacgcagcaggtctctcttacggcagcgctgatggcccgctgtgcggaggcgggctgtcttgtcatctgctgcaacgacaagcacatgccctgcggcagcctgttgccttttcatacctttcacagacacgctgaaacgctgcagcggcagatcaccctgtccgaagtacgaagaaaacgtctgtggcaacagataatacgccgaaagatacataatcaggcatggagccttcacagggcaggcagaccggatgagcaggcggaacggttgtccgttctttccgccaaggtgaagagcggcgactccgacaatgtggaaggcgtagccgcacgcctctactggcaatactgggaggaaagtttcaacagagatcaggacggaggggacaggctcaatgtcatgctgaactacggctatgctcttgttcgagcgctcatggctagggaacttgccgcaaggggcttttctccctcgcttggtctgcatcacagaagcatggccaatgcgttcaatcttgccgacgatatgattgaaccctggcgaccttttgtcgacagccttgtccttgccatccggcgaaaaacatccgggcaggctaccttcgggcttgaggatcgaagagcactggccaacatattcttccagcctgtgaacatggacggttcggaaatgcttttgctggacgccgtaaaaaaacagattgaacagctccgcgttttctatctgaaactgcgggacgacattcctctgccttattttccggaagacgacaggagaggctgacatgcctgaaggcggatcgcgctatatgagactgcttgttttctttgatctgccggttacgcgcaaaagcgacagaaaagaagcgacgcgttttagaaagtttctgctggacgacggatacgtcatgcttcaattttctgtctatatgcgcatatgccgggggcaggacatggtggatacccatatgcagaaactggagaagaatctgccctcacaaggcagcgtgcgtgctctgcaggtcacggatcagcaatatgcgagaatgaaatttcttgtggggaaaaagaccgtgcacgacaagcccatggagcagtgtcgcctgctggaattctgaaaaagacgtttaaatgcacaaaaaataccggaatccgaaagaaaaatctgcagtttttcctcatgattccggtaagttgttgtgccgctagtctagcaggggactaatcggagggcaagcacggcggcctcttgcgcggcaatgcgatacagtgtagtctagcaggggactaatcggagggcaagcacggcaacgcattggagagtgcgcccgttacatcgagtctagcaggggactaatcggagggcaagcacggccctcgggcagcgcggccttccatgccttgcagtctagcaggggactaatcggagggcaagcacggcacgacgggatggtgggcgtatagtatggccagtctagcaggggactaatcggagggcaagcacggcgtcggtggggcgcgtaaatgttaccgtttcagtctagcaggggactaatcggagggcaagcacggccagccaacgacaatcaagaaagctcttactagtctagcaggggactaatcggagggcaagcacggcatgcacgcgctgagagatacgccgcagaagagtctagcaggggactaatcggagggcaagcacggcgtccctggaaaaaacctacgctctggccgaagtctagcaggggactaatcggagggcaagcacggcgtcaggctctgtatcgcggctgggaaacaaagtctagcaggggactaatcggagggcaagcacggcgattatgactcagttctacagctacttctcagtctagcaggggactaatcggagggcaagcacggctccataaagccgaacaactggacaaatccgagtctagcaggggactaatcggagggcaagcaaaggggattctcgccggaactttttgttctctcttgcctctcttcaacatctgtataatatggcataatcatatagaaatattgttgatatcatagcgaagtcacttatagaaaggagcccccatgcactgcccgaagtgttcatcggatacgatgataccggttgacttccggttcctgtggaacctgttcaacgtacacgtccgtggtcaaaagatccggcataaccgactcagaaaacaacttctcttctgccctcactgccgaagattttacatcatgtcggacctgtagatccgtatctctcacctcataacaccatcaaccgcaaatcgccggattcctcacggagtccggcttttgctatttaaggaggctattatgccgaactgggtatccaacaccgtgaccccactcaatgaagcggctgcttcattcactcgtgagagcatcgtggatgagaaaggtgaattctgcttcagcaggcttgtccctcttccgcgtgagctctcaaaaaccagttctccgaacagaatcgtttcccccgaggaaatgcaggccttcaaggaacggtatgcggagcgggtatgcacggagtatgagcaggaaggactgctttatgttgagcatccgtccggcttcatcgaaagctgctgtaccgccgagtgtgcccgaaatctcatcaaacgattcggagccgcagactggtacaccttcacaaacagccattggggctgcaaatgggatgcctgctgccgaaaacatgacgacaccagctacttcttcgatacgccctggagctacccagagacgtttacggaagtcatggccacatcatgccctgaaggccactggcaatggcgatgggaagaggaacagggcttcggcggaatctttgagatccggaacggggtcatcattcacaccgactcctgggatatcccggaagaggaataatcccatgcccatcggcaaacgaactgtctctccctgatcttgtccctcattatccccgtcagtaccatattctggcggggatttttttatgctggcatacttgtatcaaaaaatagtgccgacattgacgacagaaaaattaatggatcaataacaacag

SEQ ID NO: 496 - DNA, 23738 bp, synthetic construct
  source 1..23738: mol_type = other DNA
  misc_feature 1..23738: note = Synthetic
cgacacgcagtacatccggctgagcgatgccgcatgctctttccagggagcggacaaccggcccgtgaccgtcgaggtgcatgccaacccggcggaatggaaggccgaggcatcggcttcgtgggtaacgatatccgatgtgacggccacttcgcttaccgtcgaggtcatcgacaatgacaccgagggtacgcgcgaggcggagataaccgtgacgtccggtgcggcggaggcggccatccgtatcgtgcaggtggccaaagactacgtctttccgcgttaccgctgccatccggaattccagtacggtacggctatgtcgccgagcggtcggtatgccggcggtttctattgggagtatgacgacgagagcaatctgaactgctatccggtggtgatagatgtcgccacgggtgagtggaccgaactcggaccatatccccaaacgcttttcagccttttcagcacctcctgcatcagcgattacggcgatttggtcatagcgaccgagaacgatgggaacgtcatgtttcgtctcgacggcagttacgaggagttcaagactccggcgggcttcacgagcaatccgcagataagccaggttgcggccgacggtacgtgggtaggctggtgtggcaaagacggtacctcgtatcctgtcaaatgggtggacggtgtggcggtagagctcccgaagcccgcgctgaattaccgtgacgagccgataggcgacgtgcaggcccgcggcatctcggccgacggccgcatcgtttacggaaccacgtgggataacttcgatttcggcatggtctattgggacgaagccggcgaagtacattatgtgggcgaggatgtgcgttacgtccggacggtggacaggcccgacggatacggcggtacccggaaatacaacctcgctgacgggatgtggacgacggccaccaacaccaacgtcagcccgaacgggaaatacatcgccggtacgttccggagggagagcatggacgaaaccggtcaggtgaacgaaacgaactacccggcctttttcaacaccgaaaccggtaagacggtgatattcgaagagctcgtcggaggcggaggcgtttcggcgacgagcgacggcctgggctttacggttgacagcacgttcgggccgaattccggcaaggtggtggatatcgagaacggcattgtgctcgggagcgccctcgaatggatagagtccacgtacggtattctggttccggccggctacatcacctacatgcccgacagcaaggacaggttcctcggcgccatgctgtataccggcggtccggtggtcgagggcatcaactggtacgtcggaccggcgagataggacacgattgttttcataaaatttttcaggcgggtgcgccgggcggttttcgttcggtgcaccttttttgtgcgtgcgtttcgctgcgcaggtttcccggaggggcagcgacaaacgtaggtatcgccggccgattcttttcacgtgttttaggtattgccggagccaggcggacaccctacttttgtctccagataaaaagatttttagccatttctttaaagtcggtaaggccggcccccgcggccggccttttgtctattttgacggaatgttatctttgcagaaaacaacatacgccatgcagagaacaggaaaatataccaaggacgacccgatgagcgacctggtcagcgacaactacaggatattactgcttatgagccgcttcggtatcgggctcggtttcggggagagttccataggcgaagtgtgccgtgccaacggcgtggatacctccaccttcctcatcgtgaccaacatgatgctttacgatgagattccggccgatgcctacgacaaggtctcgatggagggtctcctctcctacctgcacaactcgcacgactactttctcggattccgcctgccggccatccgggagaaactcgctgcggcggtggggacgggcagcgacctttcgcgggccatcatgaaatatttcgacgactatacggccggtgtccatacccacatggcctacgaagaggaggtggtgttcccctacgtacgcgccctgctggaggggcgccgccagcaggattacagcatcgacatcttcagccggcaccacgaccaggtggagacgctgctcacggagttcaagaacatactgattaaatactacccgtcggccagtacgaacgaaatcaacaacgtgctgttcgacatcttcaactgcgagaacgacctcgcttcccacaatgccgtggaggacctgctgttcgtcccggcagtcggaaggctggagaaaagagtggaggaggaaggatgagcgttacggtcaagataacggtggcggagccttcggtcatcatacgcagcggcatcatcgccgtgatagggagtgccgagaacctgaaggccgagatttacgaggtgagcgaaatcgaccagttgcggaacgtgctttcgtggcagcatccggatattctgctggtgaatcccgcatcgctcggcctctttccgctacagcagctcaagaaggatacgggcaatcccgacatgaaatgcgtcgcactgcagttcgcatttaccgaccatgccgccctgaaaagttacgacgatgccatatcggtgtacgacagtgccgagacggtgaacgacaaactcgcccggctggtcagcgaaccggagcgcgacaagcggcacgaatcgctgagcggacgggaaaaggaggtcatcgcctgcgtggtgcagggtatgaccaacaagcagatagccgacaagctcttcatatcgacgcatacggtcatcacccaccggcgcaacatatccgccaaactcggcatccacagtccggccggtctgacgatttacgccatcgtaaacaagctggtggagctggacgacatcaaggactccgtagaggagcagctccccggagattaggattgcagccggaaccgcgggcctgccgctgagagtcagcgctggcggtaacgggctaccgtacccgcctccacgaactccgccttggctgctgtccatgcccggaaatggggcgaggcgttatgcgcggcgacggcctcttcgtctgcccaccgttcgatgaaacagaaggcgcggctgtcggccacatcctcgtaaaggtcgtaaaagacgttgccgcgttcggcacggctcgcttcgatgagaggctgtaccgctttcagaaaatcctcctgtttaccctcccttatcacatttctggctactatcgttatcatatcgttcgttgttggtgtcgtgtcggtaccatctctgtcgcgtgcggtcaggcgatgtcggcagtccagtaggagaaggtacggcgcgaaccgtcctccatgccgacctcctgcgaccagcggtagggttctcccagccgaaaggcgacggactgccggaagaggggcccgccgtaacagagcgtatggtattcgccgttctcgccgcagaggtcgattccggcggggaagtccgccaccgtcgcgcggttcagtctgcggccgatatactccctgcccaatcgctctgcccaggtcgtggtgatgaccgcctccagtcccgaagcgaggaacgcttccatggcctcctgcggcgagagttcccaaagcggttccaccacctcgataccgtagggccgtagacgctcttcgcggtaggtgcggacgtcgtgcagaaagatgtcgccgaagatgaaacgggtgactccctgcgcccggaaccgttcggcagccagccgcatggcatgcgtatcgtgttccggctcccctcccggcgttacgttcaccgtgcagagcggaatgccgatggatgcggcctgtgcccggagtacccgttcgggaatggcgtgcattgtggagcggccgtcggcgccgctgaccgtcgtcagaagcgatacgacgtcgtatttctccgagcgcagggccgtcagcagtgcgagcgccgaatccttgcctccgctccagttgaagacggctttcatgcgtgcgtccattccgattcctccgtcttttcttttgtgaacagtccgccgaccagcgtgaagtaggggggtaatacggggccttcgctccagcgcagcgggagaccgagccgttctttcgccgtgcgggctacgtcgaacccgcaggcttccagcgaagtgcgggcccggtcgggataacggcacggtttcccctcggtacgcagacagccgccccggccgcacagcaaacagctgcccgcaaaaagggcccggctgccgggatgacgcttttccgcttccagcaggcgggcatccatcggtcggcgggcatcctctacgatggcataggcggctgcggccgcttcggatacgtcggccggccggtgccgttcctcggcgtccaatgttacgaccgccccgatgatgcggatgtggccgtagccggcaagccgttccagcgggtcggtatcgaaaggtggacaaccccatatccggccgtaattaccgcatgcccggcaatattcctcgatgcggcgtgcgtcgcagtagctgcggaggtaatctctggcgggcaggctggcggttatgtagcgggtacagggcatctcggtgcctgcaaagatagcgaacgcgcggcggattgccgcacttttttccgtcggcttcattccctgtggacatttctattttttgtaaagcggccgtaacgctttcgtaacgggctccgggtagttttgcggcgtcaaataattgttcgggataaagatatgagattgtacacaccgagaattctgtcgttttttcttgcgctgtgccccttccttgcggcggaggcggcgcagccgctttactccgtgtcgggaagggtgaccgatgccgccacgggcgaaccggtgacaggcgccgtagtcatggtcaaggatacctacaagggaaccgaaaccgatatggagggccgttggcgcctcgacaaccttgccgcgggggattatacgttcgccgtcagtttcatctcctacaagagcatcgaggtgtcgtgcagggtggccgccgatgtggagggggtggatgtctgcctcgaaagcgattcggaagaggtcgaagaggtggtcgtgaaggcccgtatgcggagcgacaccgagatagccatgctcggaacgataaaggccgttccgcaggtcacgagcggtgtttcggcggcccagatatcgaaaagccccgaccggaacgcttcggaagtcgtccgtcgcgtccccggcatcaccatcatagacgaccgtttcatcatcgtgcgcggcctgtcgcagcgctacaacaacgcatggataaacggactggccgtcccgagtaccgagacagacagccgtgccttctccttcgacatgattcccagcagtcagattgacaacctgctggtctataaatccccctcgccggagataccgggcgacttctccggcggttttgtcaagatagtgaccaaaggtatccccgaagaaaacagcatcgaagtcggttattcgaccgggttcaatgtcaggacgcaattcaggcagttccgcatgaaccccggaagctgtacggatttcctcggtttcgacctcggcaagaggccgctcggccgctcgtttccggcgcacatggacctcgtcacttcgcccgacgagataacgaggctgacgagagaagggttcaacaacgactggcgcatccggagttttatccccatgcccgaccagcggctctccttctcgatggcccgccgctgggatacgaagcgcggccgtaccgtgggcaacatcaccgccgtcacatacagcaatacgtttaaaggagtcgaaggtatcaagaacgcccggtacggcatctactccgcggccgccgacacgcccatctatctcgacgattattatgacaaccaatattcgaacgatgtccggctcggagcgatgcacaactgggcgttcatcctcgacgcctctaaccgtatcgagttcaagaacctgctcaatatattggggcgtaaccgtctgaccgaacgccggggcatcaaggacatgagcagcatgtactatctcgaacagaccgagatgcagtactcttcgcgcctgacctatacggggcagttctccggcacgcaccacctggccggtaccgatgcgacggtgacgtgggatgccggttactcctatgccgaccggaacgaacccgaccgccgcatcgtctccaatatggccggtatcggaagtacggatgacctggcggatgtggtgacgggcaacgacaacatcaaacgctacttccagaccctcggcgaccacatcgcttcggcttccggcaactatgtgcagcagttggcctgggggggtatccgacccacgttgaaggccggcatctacggcgagtaccgttaccgcagctacgaccagcgcgagttcatctaccgttacgacaacctttccgccgaagagcggcaatattatctcaagctgcctttccaggagatgctgtcgcccgaatggctgggagcggacaaggtctatatcgacgagataacccgcaagaccaatgcctacaccgccgacatctattacggagcggcttatgcggcgctcgacattccgctcggaaaattcgatatctatgccggggcacgtctcgaaagctacaccacgaagctgacgcgagaccgttcggatgcacccgaacttatcctgatgaccaccaagacgcaccacgacctcaatctgctgccttcggtcaatgtcacttaccggatagacgaccggcatcagttgcgggcggcttacgggcgttcgctcaaccgtccggagctgcgtgagctttcccctacggtctattacgatttcgacctcttcagcgagatagccggtaacgagaacctcaggacggccgtcatcgacaacgtggacctgcgttatgaattctatcccgcaccgggcgagacggtgagcctcggtgccttctacaaacacttccgcaatccgatagagtggacctatatcgacatgggcggttcgctccgctatatgtatgagaatgccgaccgggcccaaagctggggtgtggagctcgatgtgaggaaaaacctcggctttatcggtatgccgaacctttcgctggtgctcaatgcggcgtggatatacagcaacgtgacctttgtgcccggcgaggtggtgtccgaacccgaccggcccatgcagggacagtcgccctacgtgataaacgcgggactctattacagttccgaacgactcggactcgacgtggcgctgctctacaaccgaattggcaagcggatagtggggctgggcaagtccaacagcgtcaatcccgaccccaatacgctgattcccgattcgtacgaaatgccgcgcaacgtgctcgatttctccgtatcgaaaaggatagggcgacgggtgacgctgagctgttcggtgaaggaccttctctcggaggacgtggtgtacaagcagttcccgaagttcgagaaggacggacagatgtaccggcgggaacaggtcacccggcgctacaatcccggtcagagcgtatcgctgactgtctcggtaaagctgtgaacgatattcgacaggacagacaatagagaaaacaccaatttttaatcgaacagaaaaagatgaaaaagaacatcaagatggccgccgtggcatgtatgctcctctcggcctttgctaccgtaagttgcgacaagaatacggacaacggcggcgagaatcctccgcagggcgaaacgttcgaactgggcgacggttcgaaggataatttcgaaatcgcttccgacatgacgctgacctatccgaacgtctatacgctcaaagggttcgtttatgtgcccgacggtgtgacgctgaccatcgagcccggtgtggtgataaagggcgacaaggctacgcagggtacgctcattatcgaacggggcggcaaaatcatggcacagggtacgccggaacgcccgattgtcttcacttctgcccaggctcccggcagccgcaagcccggtgactggggcggtatcatcctgctcggcaaggcgcccaacaacctcggcgaacagaccatcgagggcggcgtgcgttccaaacacggcggtaacgacccggcggacaattccggcgtgctgagctatgtacgtgtggaattccccggtatcgaatactctacggacaatgaaatcaacggaattaccttcggttcggtcgggagcggtaccaaaatcgaccacctgcaggtatcctactcgggggatgactcctatgagtggttcggcggtacggcgaatgcgaaatatctcgttgcctattcgggttgggacgatgatttcgataccgacaacggcttcagcggcaaggtacagttcgccatgggcgtgcgcaatccgaggataggggacaagtcggcctccaacggtttcgaatcggacaacaacggcgacggtgcggctaccgaaccctacacctcatgcgtgttcgccaacgttagcctgttcgggccggtgtccaatcccgcatcctatactgaacaggccggcgccgaaggtagcccggtcgatgcgagattccaggccgcgcttcatctgcgccgcaatacccagctcagtatctataactccctcatagcggctttcccggtagggctgattatcgagaacgacaaagggtctaccacacaggattgggctgagcagggcaaactcaacgtaaccaactgcgtgatggccggcatggtgaagaattaccaggatgcacagtattggaaggatggttcccagttcgacgatgaggatgcgggtagtttcgccgacggttatttcaaccgtgcagagggtggaaatagggtgttcgcagccctctccgacctcggcctcagcggcaatccgctcagcctttccgctccggtggtcttccccggcagcgacagtccgcttgcttcgggtgctgcatggacggaggagaaggtggcttcgggcttcgataaagtgaactatatcggtgctttcggtccgaatgagaccgctgccaccaactggacgagcggctggtgcaatttcgacccccagaatacggtttactaaacgtcggcaggttggtcaatttgtcggtgggcgggctgctgcggcggtccgcccttttcccgttccgcggcggagcttccggtgtgccggcaatgcatgcggggattgcgttccgtgcaggaatattacagcccgaggtcttcgtcaatcaagaccaccgtaatcctccctttcggatggcatttgtgcagaatgagccgttcgttgcatatccgtcggggcgatgcacaatccatgcaccggcccgttttcacgcacggcgtgtcgaaatcctcatgacgggccgcattgcgcggggcggccgtttcgcggatacgcctgaaggcggcatcgccgtcctccacgattttgttccgaccgacggtcaggatgacgtgccgcggtccgaaggctatcggagcgatgcggttgcctatcatgtccagccaatgcagctccccgtcgagggtgacggcattcgcgccggtcaggaacaggtcgcataacagcgcctgccggcgtctttctatcagttccctgaaaggaacgccctgttcgaaagtgtcgatgaacggataggtgcgctgcgtccgcagccactccaccgtccccgtcgcgtagagcgtcatcgagtcgccgaaggagatactcgccggcgcgagttcggcgatgcggctgcggatgtattcgccggcctcgtgtgcgtcggccgctgtcgccacctcaaaaccgttgcgcctcagcctgtcggcacatctctccgttgtctttgcctgttccatcatgtgtctccgttatgggcggttccggcagatgttttccggagaccgtaaaaaaagtctccacggagtacgcggagacataggtattaaaacctgcggcccatggccttattgtggtaagatgtagaagttcttacactgcaaatataagaaaaataagtgcacaaatccaaaaattttccttatttttacaaaaaaaccgccaatttatggagaaaagattgggtatagatgtaggaaccaattccctcggatgggctatcgtggaggtggacgacgaaggatgtacgctgctcgaccgaggggtggatatctttcaggagggggtagcacgtgagaagaatcaggagaaaccggccgtgcaggacaggaccgatgcccgtgccctacggcggcactatttccgtcgccgtttgcgcaagatagccctgttgcgggtgttggtacggcacgacttgtgtcccgcattgtcggaggagcagttgaacgcctggcaggggaaggggatttatccgttggacgatgcgttcatccgttggcagcgtaccgacgacaatgcagacaggaacccgtaccgcgaccgcttccggtgtctgaccgaagaactcgatttggcctgccgcgaagaacgttacgtgctgggcagggcgctgtatcatctgtgtcagcgccgcggatttctgagcaatcgcaaggatgcgggaaacgaggccgaggagggtaaggtgaagcaggagattaaaaccctttctgccgacatggccgctgcggggtgcgaatatctgggcgaatatttctaccggctttaccagcggaaagagaagattcgcaaacactatacagcccggaacgagcactatctggccgagtttcgtgccatttgccggaaacagcggcttgatgaggagttgcgacaggcattggaaaaagccattttctatcagcggcccctcaagtcgcaaaagggcttggtaggcaagtgtactttcgaaaaggacaagagccgctgtccggtgtcccatccgcgcttcgaggagttccggatgctccagttcatcaacaacgttcgggttacgggtcccggcgatgcggagccgcggcccctttcgccggaggaggtggagattgtccgtccgctgttcctgcgcaagagcaaaccgcatttcgatttcgaagacattgccaaaaagatagcgggcaaagggaactatgcctgccggggcgagttgctgcaggcgccgtaccgcttcaattgtgccggcaaatcgacggtgacggggtctcccgtatcggcccttttcgcttcggttttcggagatgattggcagcgtgagatttgcagcctgtatacgctcggtgccgggaaaaacgaggagcagatactcaacgacgtatggcatgtcctcttcgcctttgaggacgaggagcggttgcagacctggttgcaggagaaactgcagctttcggccgacgatgcgaaaaccctggcggccttccgtctgccgcaggggtatgcgtcgctgagcctgaacgttatcaacaagatacttccctacctgcggcgcggataccgctacgacgaggcggtattctttgccaacctcggaaaggtgcttccggcggaggtgtatgccgacccggccaggcgccgcgaagtggagcaagggatttccgcccagatggatgatttgggcgacggagagaaaacacggaaggaggaacgtattcgcgattatctgcggcgttattggggcgtagaggagaagcggctggagcgcctttaccatccttcgatgattgaggcgtatccgtcggcgtctcccaacggacagggtctcctgcagctgggttcgccgcgcatcccggctgtccggaatccgatggccatgcgagccctgttccggctccgcgtactactgaatgaactcctgcgcgaaggaaagattgaccgtggcacgaaaatcaatatcgagctcgcccgcgagctgaacgacgccaacaaacggaaggccatcgaacgttaccagcgggagcgggaggctgagaaccgcaaatatgccgaagagattcgccaacagtatgtcgaagcgacgggacattccatagagccctccgaagaggatattctcaaataccgtctgtgggtggagcaggggcattgttccctttatacggggaagacaatcgggatttccgagtttcttggcgacggccggcggtacgacattgagcataccgtcccccgttcgcgtgggggagaggatgcgcagtacaacaagacgctgtgcgaagaggaattcaaccgggatataaaacgcgacaaactgccgtcggagctggccaaccataccgcgatattggcctgtgtcgagtcgtgcggatggttcgagcgcatcgaggggttggagcatcgggtctggggggcggaccgtcgcgcaaagagtgcgacgaccaaatcggcgaaggatttcgccattcaggaccggcactactggaggatacatctcgattactggcgcaggaagtgcgaggcctttaccatgacggaggtgcccgaaggattcagcaatcggcagggtgtggatgttggcatcatcggtcggtatgcgcggctctatctgcagacagtcttcgaccgggtttatacggtcaagggtgctacgacggctgcgttccgcaggatgtgggggctgcaggaggagtatgcggcgaaagagcgcgtgaatcatgtccaccactgtatagatgccattaccatcgcctgcatcggaagccgggagtacgccctgtgggcgcagtacgttcggcaggatgaactctatcggcggggggaagcggataaaccccgttgcggcaagccgtggccgaccttcaccgagaatgtccgggcgacggccgatgagctgctcatttcgcatcacacgcccgacaacatgcccaagcagagccggaaacggctgcgtgtgcggggaaaggtgcagcggaacgacaggggagaggtcaaatacatgcagggcgatactgcccggggtgctctccatcaacagacattttatggagccatcgaacgagacggcgagattcggtatgtcgtgcgcaagtcgctcgaccaattgctgcctgcggatgtggaaaaaatcgtggatgaggcggtcagacagaaagtaagggaggcggtcgaggcatacggttttaaagaggcgacagacccgacgaaacacaccgtctggatgaacgaggaaaaacagataccgattcggaaggtgcggatattgaccggtgtgaaaaatccgattctcctgaagcctcatcgcgatgtatccgttaaggagtataagcgatattaccatgtcgtcaacgacgggaattactgcatggcgatttacgaaggcagagacaggcagggcaggttgaaacggacgtttgaaatcgtcaataaactggaggcggcccgttatttcaaacggagtgcggaccgggaatcccggcccgatttggtaccgctgtcggatgtcaacggttattcgctcaagtatctcttgaaaacggggacgatggtgttgttttatgaaaattccccggacgagttgtatgaatgttcggtcggagagttggctaaaaggttgtacaaggtcgtgggaatggcgcaggatggtcgtgtccagtttctgtttcatcaggaggcacgggaccagaaagccgttacggcggagtgtggaatgggaatttcggttttcgatgcacgccatcctgctccgaagttgaggataagagtttccaattttaaaatgtttgtcgaaggctatgacttcgaactgacggttacgggggaagtaaaattcaaacggtaattgcttcatggtgaaacgcgcgctgttcttttcgacgccttatagcctgagtcttcgggacaatcagatgattatccgtacgaaggaggcccccgacatgcagcggaccgttccggtcgaggatatcggggtggtggtgctggaggaccgacagacgtccgtgacgctgccgctgctgaatgcgctctcggataacaatgcggccgtcatcttctgcggcgacgaccggatgccgaacgccatgctgatgaatctcgattccaaccggacacagggcgagaactaccggacgcaaatcgaggcgagcgagccgttgaaaaaagggatatggcggcaaatcgtcgaggcgaaaatccgaaaccaggccgccttgctgcagaagttgggcaaagacggggagcggttgaagccctattaccggaatgtccgcagcggcgatgcggacaaccgggaggggactgccgccagaatttactgggcagagctgttcggccgggatttcgttcgtatgcgggagggagatgttcccaataacatgctgaattacggatatacggttctgcgggcggccgtcgcacggtcgctgatggggtcggggctgtttccggcgttcggcattttccaccgtaaccggtacaatgcctttccgttggccgacgatgtgatggaaccttatcgtccttttgtggacgaattggtgtacgggctccgtatgcagggcgagtcgcaactgacgcaggaggtcaaggggaccctgctgcggatactgttcgccgatacgcgtttcgagaaggtaatgcgtccgctggatgtcggcctgacgtttacggcggcatcgctggcgaaatgtttcgctggaacgcaaaagaagattgtttaccctttgttggagtgacaggatgtcggaagtccgtttgaatgcatatcgtatcatgtggctgttcgtgtttttcgatttgccgaccaataccaaaaccgagcgtcgtcatgcgactcagtttcgcaaggccctggagaaggatggcttttcgatgatgcagtattcggtgtacgtgcgtcactgcccctcgaaagagaatatggaagtacatctccgtcgggtgcagaagtcgatgccgcctgccggatataccagtatcctgagcgttacggacaaacagtacagtgagattcggaactattgggggaaaagcgaacgggcccggcccgagatgcctcagcagctggaatttttttgatatattgctctttgaaatacgaaattacatccgaccaacttccccggtgtgcggcaggacgttttatgcatcggtgtcatatgtgtaacgtgcagaatatgaattactgccatgcgcgaggttgtggtttgatgtagaattggaatgagaaacaacaatctgtgttccctttctccgctgaaagcagttgtggtttgatgtagaattggaatgagaaacaacgagcaaaggacgtagctggcaaccttggaggttgtggtttgatgtagaattggaatgagaaacaacatgaagctccgcggatggaacatctcctttgttgtggtttgatgtagaattggaatgagaaacaaccaaagtccgtaggccagccgctcctccgcgttgtggtttgatgtagaattggaatgagaaacaacgggcacacctcgatatatcgcacggtggtcgttgtggtttgatgtagaattggaatgaggaacaacctgtcatcggccggaatgcacacatagccggttgtgatttgatgtagaattggaatgaggaacaacgtaatttcgaaggccattcccggaactatgttgtggtttgatgtagaattggaatgaggaacaacgggcacattttcgctgttgcctacctcgagttgtggtttgatgtagaattggaatgaggaacaacaaccggcgttcggctgtttttaggaagaattgacagaccgggcgtgcccggatgtcatgggggggacggttgaggctgcggtctgccattgctgttcaggttggcgggagcatgttgcctgcggaaggaaaatgtgtgccggatatctgtgtacaagatgtatcggaatataccggtaccttcggattttgcggataatcaattaatctttatatttgcacaccctaacgacgcccggatggcggaatcggtagacgcgctggtctcaaacaccagtggagcaatccgtgccggttcgaccccggctccgggtacgcttgatgatacaacccagctgatattcagttgggtcgtatcgtttaagaggagatgtagaacggtttttctttgcggtaccattgcctcgaccgtttggcaatctctgtgggtgccggattgtacaatgttgctaaaacggaaactccggttccccgcggacaaatatggcgaggagccggagtttcccgacgatattactggattagaatccggccgtgaaatagattccggcggggaagtgcgtgtagttctggtagtctgcaaccattgcgggcgtatccgaattgaggtcgtataccgagatatcgttcgtgaggaaactccagccgtagcccagaattgtattgtagtagtactcacccgtgacggggtgtacggccggcatgttgtaaattataccccagttcacgacgttcggcttcacatcgcccagcgtttcggtcgtattcgtggagaacgtgtggcggtagattgtcgaggtattgttgcagaaatagatttcgtcgcctttggcggaaatagccggtgtcgcaccccagcctgccgagacgccgccttcggtcagggtgtgtttctccatcgtgtagtcggtggctgacaatttgatgatttgggccggactggtcgaacaggaaacccatacgtagccctcttcgtcggacttgatgacgccggtcaccgtaccctccattgctatcgtttcggcgatgttgccgttttcgagtatcagtactttgctgttcgccggaacgaacaccttgtctccgacgaccgccatccggtttttcagggcgccggccgtaccctctatctgtttgaggctcctcgaatcgaggtcgagggtccatacgccggcattgtcgcggatgtaggccgtgcgaccgaccacagccacatgggaaggccacgagagcgacgaacaatcgtccttgctgaaattgtccgtgcgtttgagcgttttggcatcggcttcgaccagcataccgtcgttacctccgttctgcgatacgatatacagtttgtcgtccgttatgaacaggtcctgagccgcgttgccgagctcggtaccgttcatgcgccagtaggcgtagttgatgaggcgtccgtcggatgtgatgtaaatgaccgacccgttgtccgacgacggattgccttcgttgagaacgaatgttccctccgggtcggagtaatccactgccgcgatacgtgccgatgccagcgtcgtccgctctgcacggtcgatggcaatgagtgaaaggatgccttccgtatagtaggagctgccggacgccggggccgttaccgttaccgttttggcatgcgggttgagtttggccgaccatccctgcgggacgtgcatcaggtcgaccgtcgctacatcgcccgtaaacggaagttcgcgctcttcaccgaatgcgaataggtagtaattgtccacattggtgccgcccctgggcagggtctcgggaaagacgaatgcgaacccagccgtcgaagttttcggtatgacaatggtcgtcttcccgtcagagagcgtgaaaaccacttccgtatcgccgtcctccaccttcgagaacaacgagtcgccgtcctgcccttcggctgtgacgcccatcggcgtccaggtcgtgccgtcgagcgacatctcccactctttcgtatcggaattgatgcgtagctgcggggtgatgccgtcggaaccttcggcctttattttccgcccgtcgatttcgatgattcggccgtcgagcgcccagtagtacagcccgtcttcgtcttttatgaccgatatggacggagcattggttccgttggtaatcgttgccgtcgtgccgtcggaaaagttgatggtataaccgttttcggtcttgattaccgaagtgactgtcatattcttttgcagtgcctccaccagtttccgaagggtttcgatgcccgaattggcattcctgaccgcctcttccatggcttccacgcggtcgttcaggtcatcgaccgcttcccgcagctcctcatcgtcgtatggggaacagctccacattgcggcgccgaacaggacaaccgccagacaggtaaacagttttttcatgtcgtttatgtttaattgaaagattgaatgagtttcaaagacgaaaaaaggccgataggcggatgctggtttacggcaggtgtacaacgaaccgaagccggaaaaggagagggacgcaggaacggagaccctttcccggaacgaacgtcgacagggtatgtaagatttcctcgccattcggattacgcaggtgactgcatggcgggagggaatgaaaatcaaatcggaaaagtgtgccagagggccgaccgagccattcgattcctacccgaaacccgcgggtgcaaatccatgtcgttaaggcaggtcttctgactcgtcccgttcaccgcgccttcccggtatcgaaaccagtggcaaagagtgcggtaaacgacttctcccgaaggaggggacatacagcagcgagtactgttccggattctcaccggattcccttttcatccggtgcggaagcccgaaccggaaccataactgcgcaaaggtagcaatcttttttgcgagttgagatatgaaacgataaaaatcatataagccctcttcgaaagggaaaggaggattcatgaaacgatggccgaccgcaattgtagggggcggcaggggaggatggtgcggaaccgttgtcgtgtctgtattcgaacggacgggcgaggcttctcctgcttgtcgtcggactccggcgcagcatcgggaacggacgttctctttgtccgtactgcggatggtcggggggccggactgccgggaaagtcgtcgggacggttcaggctttttccctgccggcggctttccggatagctgtcaggataccttccgtgtcgtagccgcaaatccgtttcagttcggctatcgtgccgtggtggatgaaagtatcggggatgccgagccgcacgacctctgcggtatagccgttggcggagatgaattcggcgacggcgcttcccacgcctccctccacggtaccgtcctcgacggtgattatccgccggaaccgccgcccgacgtcgtgcagaatagccgtgtcgagcggtttggcgaaccgcaggctcaccacttcggcggagattccctcctcctcggcctgtactgcggccttcagggcatcgttggttacggtacctatcgccagaacggcgacatccttcccgccgcgcagggttatcccgcggcctatctccatccgtcggaatccgccgctccagtcggctcctatcccccggccgcgcggataacggatggcgaacggtacgcccgacaggagcgccgtgtacatcatctccttgagttccgcctcgttggccggtgcggctatcgtcatgttgggcacggagcgcatgaaggcgaggtcgaacacaccgtggtgcgtcactccgtcttcgccgacaaggcccgcacggtcgaggcagaatatgaccggaagccgctggatggccacgtcgtgaatcatgtggtcgtaggcccgctgcatgaacgacgagtagatattgcagaaaggtatcaggccgccggccgccagtcctgccgagaaagtgaccgcatggccttcggcgatgccgacgtcgaagcatcggtggggcatctcccgttgcaggatatccatggagctgcccgtgagcatggccggtgtgacgcctacgacgcgttcgtcgaggcgggcgagttcgaggagcgtataaccgaatacgtcctggtagcggtcgggctggttgtcgcccggattgacgagcagttcgccggtgacgggattgaacctgccgggggcgtgccatatcggcgggttgctttcggcaggtttgtaacccttgccctttttggtaacgacgtggagcagtttcgggcccggaatgctccgcatgtcgcccagtatccgtaccagcgacttcaggtcgtggccgtccacggggccgaaatagcggaagttgaggctctcgaacaggttgctctgcttgagaatgctctgtttgacgacgttgccgaaattctgtatcgcgcgccgcatccgggggactcccgacatggcgttccatacctggtttttcagccggttgtagtgttttgacgtggtgatgccgagcagatactccttcagcgctccgacgttgggactgatggacatgttgttgtcgttcagaatgaccagcatgtccgcattggatgctccggcgttgttcagcccctcgtaggcaaggccgcccgtcatggcgccgtcgcctattacggcgatgacgttgcggtggatgccctgcagtttgttggcctgggccatgcccagtgcggccgagatggagacggaagcgtggcctgccccgaaagcgtcgtaggggctctcctccatgcgcggaaatccgctgatgccgcccaacttccggttcgtgtggaactgttcccgacggccggtgagtatcttgtgggcataggcctgatggccgacgtcccagaccaccttgtcgtccggcgtgtcatagacgtaatggagcgctatggcgagttccacggctccgagactcgatgcgaggtgtcccggattcacgcagagttccgataccatgaagtctctgagttctgcagcgagcgtttccagttcggggacggagagtctgcgcaggtctttcggagagtttatgtcgtcgaggtatttatagcccgtctttaccatgagaggagtgtacgtatcggggtacaaagatacccaattataactatttctgaaaaaaatcgtatcttcgtgtcgtataacatccgaggtaggctgtaagatgaaatataagagaatattgctgaaactgagcggcgagtcgctggccggcgatggagagtacggactttcggccggggtactcggttcgtatgcgtcgcagatacgggaaatcgccggggccggcgtggaggtcggcatagttattggaggaggaaacatattccgcggcatgcagggtgcggagaggggattcgaccgtgtgaagggcgaccagatgggaatgctcgcgacggtcatcaactcgctggctctggaatccgcgctgcgggcggaggggatgcaggcgaaggtgctgacttccatatgcatggagccggtcggggagtattactccaaggacaaggcggtggattacctgagcaggggatacgtcgtgataatcggtggcggaacgtccaatccctattttacgaccgacagtgccgcagcgctccgcggcatagagatagaggccgacgtgctgctgaaagggacgcgggtggacggcatttacgatgccgacccggagaagcatccggaggcacggaaattcggcgagataactttcggggaggtgtatgcccgcgggcttcggattatggacctgacggctttcacgctctgccgggagaacggcctgccgatagtcgtcttcgacatggatacgcccggaaacctgcgcagggtagtccggggcgaagcgatagggacgttggtgagggaatagccctgcccggccgagaggaaggatatcactttacaaaaatacgattgtttatgaagagaatattgtcaatgctttttgcggtgttgttctgttgcggtatcgcgtccgcgcagggcgacgtggagcggaccaccctgttgaagaaggggatggatgtgcccgaattttccgtacggatgctggacggtacgacgctgacttctgccgagctggagggaaaggtggtgctggtgaatttctgggctacgtggtgtcccccgtgccgcaaggagttcacacggctgcaaaaggatatcgtggaccgtttcgaggggaaggatttcgtacttctgccggtatcgatagatgacggcgaggaggccgtcagggagttcatgcggaagaacgggtacgaatttccggtagctttcgacggggacaagaaactttacgggatgtttgcggagaaatacgtgccgcgcaactttatcatcggcaaggacgggaagatagctttccagacggtcggttatacgcccgacgaattcgacgaaatggtcaggggcatcgaggccctgttgaaatagaaaacgggacaatttttgattcaagctacataaaaccttaacgtttatgactgaagaagcaaccctgatattggacattgccgaggagaagatgaacaaggcgcttgagcatcttgtcgaggcgctgctcggaataagggcgggaaaggccagccccaatgtattgaaaggaatcatggtggattactacggttcgcagacgcccgtttcgcaggtggcgagtgttaccgtgcccgatgccaaaacgatactcatccagccgtgggagaaagggatgatacccgtaatagagaaggcgatactcgtgtcgaacatcggattgacgccttccaataatggtgagcatatccggctttcgattcctgcgctgaccgaagagcgccgcagggagctcgtgaaacaggtgaaaggcgaaggggagacggcgcgtgtgagtgtccgcaatgctcgccgcgaagcggtcgaggctttcaaggcggcccagaagaacggtatgcccgaagatatggcgaaggacggtgaggcggaagcccagaagctgaccgaccggttcagcaagcagatagaggaggcgttggccgagaaggagaaagagataatgaccgtatagctgcggtcggcagctccgtaaagcgatggcaggctgccgggacggattccgtccctgcagcctgccatttcggggtgggcaaaagatggttgcgtgtccgaatttcctggtctgtcgttggaacaggccgggttatggattgtctatctttatccggtatttggcaagcaggcccggcagggaggcctgagagaaacgcgcaccgttgagccggttggtttccgggtcgatagtaaaaccggaagaagtcaggaaatccgcacttctcaggtcgttgtcggtaaaggaggagccctgcatgtcgcaagcgtcgaagagaacgcctttcaagatgcacgattcgaatacggtagcgtgcatccggcattgccggaaaacggagtcggcggtgatgtgcagaaacaccgcatcgtcgaagatacactccgtgaaggatgccgacagtctgtgtgagctgtttctctctccgaatgatgttccggacatcttgcatccggagaacgtcaccccgtccattaccgtattcgcgaatgcggagaagctgaaatcgcagccggtgaaacgacagtcgagcaggataatgccatgcaggagcagtgccgtgaaggtgccgcctccgaatacgcatttgtcgaatacggtaccttcctgaaaaagggcgtccgcctcgttttttccgaatgttcgtccggttatgatatcggcttccataaatctcagagcatgatggggatgccccggtagaagtcgaggattttggtcttgaagaggtagctgtatttggcctgggcaagctgcgagcgggcgttcacgaggttgtagagcgcaatgctgtaatccaccggcgaagccgcgccgaggttgtatttttcctccagcatgcgaaacgcctcctctgtcgtggtgacgtttttagccgccgcttcgtactgttcgtaagctcctactgcgtcgatataggcctgccttatctctttgttgaggttcttctgcattatcatataatcgtattcggccctgtggcgggcgatgcg

SEQ ID NO: 497 - DNA, 23699 bp, synthetic construct
  source 1..23699: mol_type = other DNA
  misc_feature 1..23699: note = Synthetic
cgcaactgatgtaatatccgcccgaagcggcgtaatttcccatcgagacgatcacgggtttcgcctgctggaggaggctgacctcgcgccagatgatctcggccgctaatgcgctcccgccggggctgttgacgcgcagcaccaccgctttcacgtcgtcgtccttgcggatttcggccaatgtctcggccagcgcattcccgacgatctgtttgttccggtcgccggcatccacgatgtcgccgtcggcgtacaccagggcgatctcgtcggtcgctaacgcgttgcccatcgtcgcgcgtcccgcgctccggcggccggcgaatttgtaatcctccagagggagtatcttcggttcgccggtcgaatcctgccccgacaggcgggccagttcgtcggtcatctgatcgcggtagtaaaggctgtccacgaatcccagccgcacggcgtcgcggggggtggccacggccagccgcgacgcgtagctttgcaggctgtcggctgcgatttcccggctctcggcgatctcgctgacgaggtagtcccagacggaacgggtcatggactccatctgcaaccggttttcatcgctcagctgctctcgaataaagggttcgccggctcccttgaatttgccgtgccggatcaattcggcttgcacgccgagcttgtcgagcagccctttgtaaaatatcacgttggaggccagcccctgccaggccagcccgccctgggggttcagatatactttgtcgccggccgaggcgaggtaatacccgtcctgggaatagacgtcggcataggagacgacgaatttaccgctttcgcggaattcggccagtgcctgacgcagttcgtaaagggtcgaaacggaggagggaatggccatgggcacgttcaggtagatgccgtcgatgacggggtcttcggcggctttcccgatcagggcgacggcttcgtacagggtggtctgctcgcggaaactgaattcgttgtaatcgaacaggtcgatggcgctccctttcgatttgtccacaatgggctgcgccaggtcgatacgcaatatggtgtggggatgtacgggaccggcgctcttgcttccggaaccgataccgccgatggcggctatcaatccggcgagcatcatgaaactcaatatgacaaaggcaatgccgctgacaaatatggccaacaaacaggcaaaaaaggtcttgaaaaaactattcatcacaaatctatccctttaactgttcgtttatccgtacattgagagtagagtccactgttctttctttgaaaagaaagaaccaaagaaactttcgagcaggtttgcaatgcctcagtttgtcgaaaaccttttcttgcagacttctttgttctgtaacagataggggacatcgggcataacgatattaaagtcccctatccgttacagaacaaactttcaaaggcaaaggtcatccgccaggctcaagagatgcgcaagcatctcaaaaagtttttctggttctctttgttcacaaccgacgctgccagcgaatccagagaccgtttacgggctatggtaagcggcgaggaggaaaacgagcgtagcgaagttaaagagaacagtcgcctcaaacctgaacagtacagataaacgaacggttaaaatactaatttgcgctaagatacgattttttcgggagaacaggcgcaagaatgcgaataaatcagtatcttcggaaatcgtataacaatcaaactatcgcaaaaaacagacagatatggtcaataaagttattctgatcgggaacgtaggcgccgagccggaagtacgcgcattggagaccggcataaaaatggcacggctgaggatcgccaccaccgaacgcatctacaactcctccaccggcgaaaaacgcgaacacaccgaatggcacaccgtcgtcctctggcgcggtcaggccgacttcgccgagaaatatatccgcaaagggagccaggtttacgtcgaagggaaaatccggtcgcgcgaatggaccgaagaagccaccggcaacaaacggtacgccatcgaaatcctggccgacgaaatccgactgctcggcgggcaacggagaaacgacggcaactacggcgaacaccgcggcgggccgcaaccgggacaccccgcctacggcagccggcaagaggcgcagaacaccgttcccggactgcccaaagacgccgacgacctgcccttctgagccgcccgcggcagggaacagcgggaagctatttttcgtaccttcgcgctatgcctaaaataaactttcgacacgacagcgcccccgccccgtcccgcatcgcggacgacacggagcgcagaatcgcctggtaccgccagcggggacatgaagtccccccgcggcggctcatcaagacccccgaacagatcgaagggatacgcctcagcggaatcgtcaataccggcgtgctcgacctgatcgaagaacgcatccggcccggcatgagcaccgccgagatcgaccggctcgtgtacgactacaccgtctcgcacggagccgtacccgctcccctgaattacgaaggattcccaaaaagcgtgtgcacctccatcgacgaagtggtctgccacggcatccccagcgacaaagtcatactcaaagagggcgacatcgtcaatgtcgatgtttcgaccatcctgaacggctattactccgacgcctcgcgcatgttcatgatcggcgaagtgtccgacgagaaacggaggctggtcgaagtgacgcgggaatgcctgcacatcggagccgaagccgccaaaccgttcggattcgtcggcgacatcggcgcggcgatccagcggcacgccgaaaagaacggctattccgtcgtgcgcgacctgtgcgggcacggcgtggggctggaattccacgaagagccggaagtggcccattacggccgccgcggcaccgggatgctgctcgtgcccggcatggtcttcaccatcgaaccgatgatcaacatgggcgactggcgcgtcaccgtcgatcagcgggacggatggaccgtgcgtacccgcgacggcaaaccctccgcgcaatgggaacacacgttcgtcatgaccgagtcgggcgtaaaggtcctcacgcattagcttccgggccgagcggcgcactgccgtccgttattctccggttctcagccggaagttgaagcccggcccgcacaccgagcggcgccgcagaaccgaacagggagaccatctcccgattcggggtgagatcttatgcgcctgcacaacaaacagcccgccgtgccgccgcacggcacgacacccgacccgaaacatgtacggactggccgactgcaataactttttcgtcagttgcgagcgcgtcttcgcgccccggctggaaggcatccccgtcgtcgtactgagcaacaacgacgggtgcgtcatctcgcgctcgaacgaagccaaagccatcggcatccgaatgggccagcccctgttccaggcctcccccctcatccggcggcacggcgtgcaggtgctgtcgtccaactatgcgctgtacagcgacatgtcccaccgagtgatgaccaccctccgctcgctggttcccgccgccgaggtctactccatcgacgaagctttcctcgacctgtccggcataccgaccggcgaactatccgcactggggcgccgcatcgcctcgaccgtgcgccgtcataccggcatcccggtcagtatcggcacggctccttccaaaacgctcgccaaaatagccagcaaactctgcaaacagtacccgaaactgcacgacagctgcctgatgtaccggccggaagacatcgccaaagtactgcggacatttcccgtacaggacatctggggcatcgggcggcggcacggcccgatgctgcgcggagccggcatcctcaccgccggacaattcgtacaggccagggaagagtggatccgccaccgcatgggagttgccggccttcggacctggaaagaactccgcggcgaaccctgcatcggattcgaacacacgccgcccgccaaacagcagatatgcacttcgcgcagtttcgccgccgaagcgaccgatccggacgacctgcgccgggcggtggccctattcacggcccagtgtgcggaaaaactgcgcaggcaaggcagcgtctgcagcgaagtgcaggtcttcatcgccaccaaccgtcaccgcccggagcttccccaacagtacgcgaaccgtatcctgtcgccgccgacgccgacagacagtacgctggaactgaccgtactggccgaacgcgccctgcgcagcatcttcacgccgggattcggatacaagaaagccggagtcatcctcagcgggatcggcccccgcgcggccgtgcagacctcgctgttcgacccctcggaccggggacggcaaacccggctgatgaaagcgctcgaccaagtgaacggccgcttcggccgacacacgctcgtcaccgccgcgcaagggttcgatccggtaaaaaccaatcgtaaccacgtctcgccgaactataccacttcatgggacgaactgccggaaatcaaagtctgaaaccgaccgccgaggtcggtcgccggcccgttacgaccggagacgaagctccgttccgcgtaaaaagcgatccgtttttccggtaacggacgaaaatcggaaccgttgtgctatttttatggtcgattattaacctaaagagcgatggaaaaccgattactcgacctgaacgcctcctccgaccggctgccggacatcgacctgcccgtggattttttcgcctgggtggacatcaccccggaggtgttggggtggtacaacatcccctgcaagatcaaagccggcatcttcgtcctctgtacggacggcgaactgacggccacgatcaacctgaaagagtgccggatcaggaaaaaccacttcatcgtcgtggcgccgggcagcgtgatccagttccacgattcgggtaccgatttccggctttcgttcgtgggtttctcgtcccgtttcgtcggcaaggtgaacctgctcaaatcgacgatggacttttttccggtcatgatcgaaaatcccgtgctgccgctgacaaccgaagccgccggcatctacaaggacctcttctcgctcctgcaccgaatgttcaccggcgacatgctgatccatccggaaatacaacggtgcatactggaatcgctgctgtacggcatatcgggcatgtacaaaaaggcggaaagcgaagacgggaaccgccggctgagccgcggcgaggagatatgcaaagaactgttgcggttggtgatgaaacattatgctagagaacgccgggtatcgttctatgcggacgagatgcgcctctcggcccaacacctctgcacgacggtcaaacaacaaacgggcaagacggtggccgacctgatcgcggaggtggtcatcatggatgccaaagcgctgctcaaatcgaccaatatgccggtcaaggaaatttccatttcgctgaatttcccgaacgtatcctttttcggcaaatatttcaaacgctacgtgggcatgagtccgcaacagtaccgcaacagctgaccgcttccgaccgggcgcgtgcccctttctcacggagggaacacaaaacggcaaccatacggacatttcgtccgacgacctgccggacaagtgccgtatatcggaacgccgccttttagcgccgcacgatgaatatctcgtttgaaaagaaccggatcgaaccgccggaaatcggactcgcaggggtataaaaattcaggcgccgggaccagataccgcataaatgcggtaaattggctgaaaaaaccggaggcacggtatcgtctcggtcaatgcggcaatgcggcctatgcttcgaaatcatctttttccgcttgctttcgccggcctttgcgcgggtactctgctggcgacctccgacgcttttatcgacagccggatactccccaagcggtacgcattcgcattcggtatcgcggcggtactgacggttgcggctattgccggccataccgattgcgaccgatgccggagacagacggcgcgattttgcgccgtcgtcatcggtgccgcctgtctcgcagaggctgtcacaggcatacttcaattcatgcaactatggcccccctatggaagattccgcgtaaccggtactttcgacaatccggcgggctttgcggcagttttatgctgcgggttgccgttcatactgtcatttttgaatgaggaacgccggacgatgcgttattcggctgtcgccgccacgataccggtcatcgtcggaatcattctgtccggctcccgtaccgggatgctatgcgccgtcatcgttctggcggtccgcgtttccggtgccgtcagacgctggaaatatttacggcagagcgtaccgttgctggcgctcttgctgctggcgggactctatctcctgaaaaaggattccgccgacggacggctgctcgtctggcgttgttcattggagatgataatcgacaaacccctcttcggccacggtcccggagggttcacagccgaatatatgaactaccaggccgattatttccgaacacatcccgacagtccatacgcgcagctggccgattcggtccatcacccgttcaacgaatacctgttggcggcggtcgattacgggtgtctcggcctgctcgtgttgatcgtgtcgggcgcggcgatcgtacggaggtaccgccgggcagccggaggagatcctataatccgggcggccggttcgtgcctgttggcaatcgggattttcgccattttttcgtatccgtttttctatcctttcacttgggcaatggcattgttcagcctgtggatcgtattcggatgttcatggctatcccgcctgttgcctcgctttttagcaatcggggcggcagcaacgctgtgcgtattcgccctccgggatatgcggaatcaatatgcctggcaacgtgccgaccgtatggccactgtcggggatccggcaaatgcgctgccgttgtacgaaaagtcgtatccgaaacttgtccgggatcggcattttttgtataattacgcatacgtattgaacgaggcgggggaatatgccgagagtctggcgatagccgaggcgtgcagcgagcgatgggccgactatcacgtggagttgctgcggggcgatgcggctttcaaactggaacggtatgacgaggcggaacggcatttcgcgcaggcggcccggatgtgcccttcgcggtttatgccgctgtataaattggttacgatctatcaggcaaccgaacggaagaacaaggcgtacgacttggcgaaacgaatactggccaaggaggtgaaaattccgtctgcgaccgttacggccatccgccatgagatgcgccgaatagtcgatacgacgaataaagttcaataacctaaatccccgtaaccctgaaaagagagacattacgaaacggtttgacactgaccgtcctgtcgatgacgatttgtctgtcggcagcaatgtcggtaacttcctgccagaaacagagtttcgaggaagaattgtctgcaccccgaagcgccatgaacaaaaccgagttaccgtatctggattttacgaccggctacgacggcacaggcattgcgtccgacgaagattgggaggtaatcatgcagctggctcaacgggtgaaactttcgaaagagagcggcctatgggaagcgaatgtccgttcggcggatgaaatcaacgtttcgccggaggttttcgcctttttgactcaaacgatcgaaaacagcaatgccaaaattcttgcacatctgaccgcgaggagcataatgccgcgcaaattgatacccggcgaaggagatccgctggaagagccgacccggagcgattgcgtcgcttcctgtttcgggtggatacacgacatgatgggtttcggaccgtcatacgattcggcgaactcgtggattaacagcactttcggaagcggggtgccgagtagtcaaatggaatctacactcaaacacttttatggcccaaataatgtatcctcatttccggtcaacatccagggagacaactataagtacaatgaaaagaactcagccgtcattctaaaccataaggtcaacgattcgaccggccacgccgttatctatggaggaaccagcaatgggacgcattgggtgacagacccccagaacggtgctatggatttggtggacccttcagatgtgatatcagcctatgaagttcggcaataaatcgattctgccaaaatggattttcatctggggagcgatcctaacgggccccatctccgatgtgtcggcacaagtcatccctgcgatcagggcggcgagattcgtttcgaaacggcatcgtgtcattcggcggataccccgggggttccgtgtcgaacaaaagctcatccacctctggaaatacggttattcctggacgttcgattccttaaacgattcgtggaaacgtttcagtaaaaccggacaagtcggtgcgttgttccgatcggacgaccgacaatgcgaagtgatatacagcgtcgccttgggattcgacaaccatcgatcgtggctccgaaacgatctgctgaatatctcgcaagggcaggacaccgctcgtttcgaagatcacgtaaccgtaatgaccggtcaggcagttcgaccgttcaacgccgattcgatgtttctgctcgaactgccgatcgaaccgatggagcgggacggatccctctatacccgctgcgtgaggatgtatctgacccggaaagggcacacctttctggatttcgtctggttcttcaccgacgagggttacgcccgacgacaggaatatctgcgggcgatagagggaaaggtctatttcaagaaagaacgataaaatgttatccgcctataaggttacgaaataaaccgaccatgcaaaaattggtttttctgatgtgggtagcgatcgtaatagggattgccccccatgtgtcggcccgaacggtttccgcagtcaaagccgccagacaggtttcgagacagactcatgttgtccggcagatacctcgagattttcatatcgcgcaaaaacaaatctatctctggaaatgggacaataatgggaaatccgattcattaacaggctcggtgaaacggtgggccagatcctgtcaggtcggcctcctgcttcagtcggacgacttgcaatgcgaggtcatatacagcgttgcttacgggacgggaagcaattaccgaggttggatcaaatatgatctgctggatatttcgcaaggacaggacactgctcgtttcgaagatcacgtaaccgtaatgaccggtcaggcagttcgaccgttcaacgccgattcgatgtttctgctcgaactgccgatcgaaccgatggagcgggacggatccctctatacccgttgcgtgaggatgtatctgatccggacagggcacacctttctggatttcgtctggttcttcaccgacgagggttacgcccgacggcagaaatatatgcgggcgatagagggaaaggtctatttcaagaaaaggcaggaaagcccgcaccgtccgacgaagtaaagagacggaataaccgcggatgcgtccatattacgactgcatataagttcaaccagtatacacatttactggatctattatttccgttcgagtcacctccccactctatttcggagcggttgccggcacatgctcccggcagcaccggcagcgccccgtcaggcagcattccccgtccgcaacccgcatcgatcccgtatcaataaaaaagtctccacggagtacgcggagacaggtaggttgaaaaccttcggcatatagccttattgtggtaagatgtagagttcttacggctcaaatataccaaaaaagaacggaattttcacacattttattaatttcactgaaaataccattcttttatggcaaaagtattgggcctggacgccggcaccaactcgctgggatgggccatcgtcgaagaaaccgaaacgggatatatcctggaagacaaaggtgtacatatcttccaggagggcgtcgcacgcgataagaacaacgaaaaaccggccgtacaggatcgtaccgacgcacgagccctgcggcgtcgctatttccggcgccgtctgagaaaaatcgaactgctccgggtgctcgtccgctacggtctgtgccctccgctgaccgaagagcagctggaagcatggagggagaaaaaacgctatccgctcgacgcggctttcctccgctggcagcgtaccgacgacaacgccgagaggaatccctaccacgaccgctaccgcgccctgaccgagacgctcgacctcagcgacgagcggcatcgtcatgcgctcgggcgcgccctctaccacctcgcgcaacggcgcggattcctcagcaaccgcaaggaggccggcaacggaaaagaagaaggagcggtacagagcggcatcgaaaacctgtcggccgagatggagaaagcagggtgccgttacctcggcgaatatttctaccaactgtaccggcggaaagagaagatccgcaagcgatatacttcgcgcaacaaacactatctggccgagttcaatgccatctgcgaacggcagcgcctgcccgaagagtggcggaaagccctgcaccgtgcgatttttttccagcgaccgctcaaatcgcagaaaggatcggtgggcaaatgcaccttcgagcgtaagaaaagccgctgtccggtctcgcatccgcgattcgaggagtttcggatgcgctcgttcatcaacaacatccggctgacggcgcccggggacgacacgccccggcccctgacgcggctggaaacggaaacgatcctgccgctcttcctgcgcaaaagcaagccgcacttcgatttcgaggagatcgcccgcaggatcgccggcaaaggacaatacggctgtcaaggcgaccgcaacgaggccccctaccggttcaacttcgcccgtaccgccaccgtcagcggctgccccgtaacggcatcgctcatcgccctcttcggcgacgactggctcccggaaatatgccggctctaccggctcggcgaggggaagagcgaagaacaggtgctgaacgacatctggcacgcgcttttctcgttcgacgacgaagagcggctccgggcgtgggcggccgataagctccggctcgccgacgaacaggccaaggctttcgccgccatccgtctgccgcaggactacgcggccctgagtctgaacgcgatcaacaagatactgccttatctccgccgcggctaccgttacgacgaggcggtattcctggccaacctgaaagccgtgcttccgccggcgacgtatgccgacgaaacccgccgtcttcgtatcgagcgcgacatcgccgaactgaccctcgaatcccgacgcgaaccctacgtcaaatacgactcgaaagagcgtcgcatcgacgactacctgaccgaccagggcgtccccccggcccgtctgaaccggctctaccacccctcgatgatcgagacctaccgggcggcccgacccgacgcgcagggactgctgctgctcggatcgccgcgcaccgcttcgatccgcaacccgatggcgatgcgggctttgttccggctccggaccctggtaaaccggcttctgcgcgaaggcaagatcgaccccgacacgaaaatccggatcgaattcgcccgcggcctgaacgacgccaaccaacgtaaagccatcgagcaataccagcgcgaacgggaagccgaaaatcggaaatatgccgacgaaatccgggcgcaatacgccgcagaaacgggactgaccatcgagccttcggaggacgacattctgaaataccgtctttgggaagaacagaaacacgtctgcccctacaccggaaaacagatccgagtttcggactttatcggatcggctccgggtttcgacatcgaacatacactgccgcgcgcccgcggcggcgacgattcgcagatgaacaaaacgctttgcgaaagccgtttcaaccgggaaagcaaacggacgaaattgcccgccgaattgtcgaaccgtgccgaaatcctggaacggatcgaaagtttcggatggcgggaaaaggtcgaatcgttgcagaaacagatcgaggcccagttccgaaaggggagaaacgcccccacgaaagaggaaagggacagcgccatccaacggcgccactacctgcgcatgcaacgcgattactggcgcggaaaatacgaacggttcgccatgaccgaaatcccggaaggtttcagcaaccggcagggggtcgatatcgggatcatcgggaagtatgcacggctctacctgaaaacggttttcaggcggatctatatcgtcaaaggttccacgaccgacgctttccgtaaaatgtggggattgcaggaagaatacgcccgcaaagagcgcataaatcatgtacaccactgcatcgacgccatcacgatcgcctgcatcggccctaaggaatacgaccgctgggcccggtacgccgccgatgaagagcggtaccgctacggggcgggagctaggccgcgtttcgacaagccgtggccgacctttaccgaggatgtcaaagccgtagccgacgaactgctcgtctcgcaccatacgccggacaatatggccaaacagacccggaaaaaacttcgggtacggggcagggtgaagctcgacgccgccggacggccgatctgccaacagggcgatacggcgcggggacgactgcatcaggacactttttacggagcgatacggcaccaggacaagctccgctacgtgatccgcaaatcgatcggcgacttgcagccggccgatgtcgaaaagatcgtggacgaaaccgtcaaggcacgcatcaaggaggcgatcggcgaagtcggattcaagacggcgatgaatcccgacgaacacacgatctggatgaaccgcgaaaagggagtcccgatccgcagggtacgcatcttcgccaatatcacccagccgctgccgtgggacaaaatgcagcgcgacctctccgttcacgaatacaaacggcgttaccacgtggccaacgacggcaattactgcatggcgatctacgaagggaccgactcgaaaggcaggacaaaacgctcgttcgagatcgtgaacctgctcgacgctgccggatatttcaaagccagcgccgaccgcacggcccgtcccgacctggtaccgcgcacgaatgcgaacggccatccgctcaagtatctgttaaagacgggtacgatggtgcttttctacgaaaattcgcccgccgaattgtacgactgcccgcccaaagaacttgccaagcggctatataaggtcaccaaaatggcaaagaacggccaaactgcattcatgttccaccaggaagcccgcaacgacgacaaactgaaaaccgactatgcggagaaattcgggacgaccgccccaaaagcattgaccaacggctactcgtcggtcgattaccagcagccccacccgaaactcctgttaagcccttccagtttcgatatgtacgtcgaaggttacgacttcgaactgaccgttaccgggcaaatcatcttcaaacacgagacgccatgctgaaacgcgcccttttcttttcgactccccactgcctgagcctgcggaacggacagatggtcatccgtacccgcgagacccccgacgcgcaaaaaagcgtaccggtcgaagacatcggattcgtggtgctggaacaccaacagacctccgtcaccctgccgctgctcaacgccctgtcggataacaacgcggcggtgatattctgcggcgacaaccggatgccgaacgccatgctgctgaacctggattccaacacaacccagggcgagagttaccgggatcagatcgaagcgagcgagccgctcaaaaaagggatatggaaacagatcgtcgaagccaaaatccgcaaccaggcggccctgctgaacaaattgggccgcgacggcaacaaactgaaaccccattacatgaatgtcaggagcgcggatgctgacaatcgcgaagggattgccgcccgtatctactggaccgaattattcggtcccggctttatccgttcccgcgaagggctgccgcccaatcctctgctcaactacggctacacgatcctgcgggcagccgtggcgcgggcgctcatgggatcgggactgctgccggcattcggtatttttcatcggaaccgatacaactgctttccgttagccgacgatttgatggaaccctaccgcccctatgtagacgaacgggtgtatgacctttacggacaagggcaccggcatctgacgcaggaggcgaaaagcgaactgttacgggtgctattcacggacacacgtttcgacaaggtagtacgaccgctcgatataggacttaccatcacttcggcttcgctggccgggtgtttcgccgggacacgcaagaaaatttcgtaccctctgctggagtaaccccatgccggaactacgactaaatgcctatcggattatgtggctgttcgtctttttcgatctgccgaccaacaccaaaacggagcggcgccatgcggcgcaattccgcaaggcgttggaaaaagacggctttacgatgatgcaatactcggtatatgtccggcattgcgcatcgaaagagaacatgcaggtacatatcaaacgggtgcggcgttcgacgcctccttcgggttatacgagtatccttgccgtaacggacaaacaatacggcgacatcctgaatttctggggcaagaccgagtgcgccaaaccggacatgccacagcaactggaacttttctgagaaattggttaaatttgttccttgaaatagaaaaacgcatcaaatcggcttcgccggcgtttcccgctttggttttcacagccgaagaaaggctataaagcactaattaacaacccttaacggtcccggcgttgtggtttgatgtagatttttaataagatacaactcaggaagttcggaaggataactcacacggttgtggtttgatgtagatttttaataagatacaactttctggcaatattgtgtttaacaccatttgttgtggtttgatgtagatttttaataagatacaaccgcgcttctgtaagtactcttctatcaaagttgtggtttgatgtagatttttaataagatacaaccatccttagccacggaagtaccatagttctgttgtggtttgatgtagatttttaataagatacaacctgtttgcgacgggcagagggggactgatgttgtggtttgatgtagatttttaataagatacaacttccgggtcgttgcaagtggcaccgtcgttggttgtggtttgatgtagatttttaataagatacaacgaaagaatcgctgacggccctgtatcacggttgtggtttgatgtagatttttaataagatacaacaatgccgtctgtgtatgagtaacagattgtgttgtggtttgatgtagatttttaataagatacaactcggacatactgcgtcccgtcggccctatagttgtggtttgatgtagatttttaataagatacaaccaaaaatccgagaaccctacggaggcaaacgttgtggtttgatgtagatttttaataagatacaaccaatctcgtgagtttactttcgaagcgaaggttgtggtttgatgtagatttttaataagatacaacggtttaatacgtactattggtattccagcgttgtggtttgatgtagattttcaataagatacaaccgtcgattcggcttgtgcgatactggaaggttgtggtttgatgtagaattttggattatgccggaaacttagacggctccgcaaagcgtccgacggcaggaaactaagcaaaagccgcgtcgaactttcgttcaacgcggctccattgtgcccaggacaagactcgaacttgcacgccgtaaaccggcactaccccctcaaagtagcgtgtctaccaatttcaccacctgggcaattctatttcaagattccctgtcgccaaggaaattcgttccgctcgaaaaaaacgtccgacaatgcaactctccataccgctcccccctcagccgcaccgtctttacaaactggcccgaaccctgctaccctgcggacagcggcacaaaggtaacgctttttcggttccgtgcaaacccattcctcaaaaaaaacagaaaaacccgccacagaccgcctccccacacaccgaaaccgggaaaaatacctaaatttgcaattcatacgttttccaacggaacacagaaacaaaaaccaaaggtatgatcaacatcaccttccccgacggcagcagtcgtaagttcgccgcgggtaccactccgctccagatcgccgaatcgatcagcccccggctggccgaagaaactttcgccgccaccgtgaacggagaaagctgggacgtgcagaaacccatcgacaccgacgccgaaatcaaactgcacaaatgggacgacccccaggccaaacacgccttctggcactcctcgtcgcacctgctggccgccgccctcgaacagctctaccccggcatcaaattcggtatcggaccggctatcgacaacggcttctactacgacgtggactccccgacccccatcaccgaaagcgacctgcccaaaatcgaacagaaaatgctcgaactggcgcgggaaaaacaacgcttcgtccgccgcgaagtgtccaaagccgaagcgatggacacctacacgaaaaaaggcgacgagtataaatgcgaactaatcggcgacctgaccgacggcaccatcacgttctacaccaacggctcgtacaccgacctgtgccgcgggccgcacattcccagcaccgcgcccatcaaggccatgaagctgaccgccgtggccggcgcctactggcgcggcgatgaaaaacgcaagatgctgacccgcatctacggcatcactttccccaagaaatcgatgctggacgaatacctggccttggtcgaagaggccaagaaacgcgaccaccgcaaactcggcaaggaactcgaactgttcaccttctcgccccgcgtgggccagggtctcccgctgtggctcccgaaaggggccgccctgcgcgaacggctcgaaaacttcctcaaaggcgtgcagaaacaatacggctacgaacaggtaatcaccccgcatatcgggatgaaagacctgtacgtcacttcagggcactacgccaaatacggcaaggactccttccaaccgatccataccccggacgaaaacgaagaattcctgctcaaaccgatgaactgcccgcaccactgcgaaatctaccgcagcaaaccgcgctcgtacaaagacctgcccgtgcgcctggccgaattcgggacggtttaccgctacgagatgagcggcgaactgcacgggctgacccgcgtgcgcggattcacccaggacgacgcccacctgttctgccgccccgaccagctcaaggacgaattcaagaaggtgatcgacatcgtgctctacatcttcaagaccctcgacttcaaagagttcacggcccaggtatcgttgcgcgacccgaacaacaaagagaaatacatcggtacggacgaaaactggcacaaagccgagaccgccatcatcgaagcagccgccgaaaaagggcttcagaccactgtggaactcggcgaagccgccttctacggaccgaagctcgacttcatggtcaaagacgcgctgggccgcaaatggcagctcggaacgatccaggtagactacaacctgccggaacgtttcgacctcacctacaaagggtcggacgacaaggagcaccgcccgatcatgatccaccgcgccccgttcggctcgatggaacggttcgtggccgtattgctggaacacaccggcggcaagttcccgctgtggctcacccccgaacaggccgtcgtgctcccgatcagcgaaaagtacaacgactacgcgaaaaaagttgctaaattgttgaataattgcgaaattcgcacccgcgtcgatgaccgcaacgaaaagatcggccgcaagatccgcgacaacgagctggcacggacgccgatcctgctgatcgtcggcgagaccgagcaggcgaacgacaccgttacggtccgcatgcagggcgaaggcaaagaccggggagcgatgaccctgccggacttcacccggatggtggccgacaaagtggcggaagagatccgtccgatcgccgacaacatctgacggcacgcaatttgctgtcagcctaccgaaaaccaaccataactcaaggaggacacaaccatagcactaccaccccgccccagatcgccgcggcccccgttccggggacgcgtgcagaaagagaacccgcaccgaatcaaccgggagatcacggcaccgcaagtaaggcttgtgggcgataatatcgaacggccggatgtctattcgctggccgaagcgcttcgcatggcgcaggaacaggaactcgacctggtggaaatctcgcccaaggccgaaccgccggtatgccgcatcatcgactaccagaagttcctctaccagcagaagaagaaagccaaggagatcaaagccaaggccgtcaaagtcgtcgtcaaggagatccgcttcggcccccagaccgacgaccacgactacaacttcaaactcaaacacgccgaaaacttcctcaaagagggagccaaggtcaaggcatacgtcttcttccgcggacgccagatcgtcttcaaggatcagggggagatcctcctgctgcgcttcacgcaggacctcgaagagtgggccaaagtggaacagatgcccaagctcgaaggcaaacgcatgagcatcatgctcgccccgaaaccgaaaaaatagcatccgcgccatacggcaggtatgtcatagagggaacactattaaccattaaataatttcgaccatgccgaaaatgaaaaccgtcgccgccgccaaaaagcgcttcacgctgaccggcaccggcaaagtgaagaggaaacacgctttcaaaagccatatcctcaccaaaaaaacgaccaaacagaaacgcaacctcacccacacgggaaccatgagcgccatcgacacgcccgccgtgaagctgatgctggtcaaataaccccgcatgggagaggaaacgcttacgattgatcgtaaaagcaggccctgaagcggttgtccgggggcctcgttaatcgaaatccgggaaccgtagtccttttatttcaaaccgaagatcgcgcccggcggaacctccggggttccccaagcatcgtccaggcccagccgaaacgatcgccggccggtcgaaaaaagcatcgttatgccaagaagtgtaaacgcggtagccagccgggctcgccgcaagaaggtccttaagctcgccaaaggcaatttcggctcgcgctcgaacgtatggaccgtcgccaagaacacggtagaaaaaggtctgacctatgcctatcgtgatcgcaagaacaaaaaacgcaacttccgcggcctgtggatccagcgtatcaacgctgccgtccgcgccaacggaatgacctactccgaattcatgggtaaggtcaatgccaaaggaatcgccctgaaccgcaaggtactggccgacctggcaatgaatcatccgacggctttcgccgaaattatcaaaacggttaaatagtgcgcctgcggccccggaatccggggccgcagcttttttaaaggcaggggggaaacggaagattccgtttcccccctgcctttatctggctgcctgcttcgatacaccccgaacctgttcgacggtaatttccctctatcgatctgcggtgccgcctgaatcgaatatgcccccccggcaaaaaatccgacggagccgctccgaccgaaagctcttgtttgtccgaacggtccggcacaaggcgatgtaaatccgggcaaaagaccaaaaggatccgacgcgagccgaaaaaacgccgacgaaaactgtcgttatatcacggtaaaaatcaggttggcataaaggttgcgataactccggaacgatactttcccccgtctgccccgccgtggaaagcctgcgtaacggacgaaccgggcaaaagatacgacgcccctgcattcgggcgaagagataacccgcccggtcatttttcgacccattccgcagcctcccggcgcacggaccggccgtagttccgcaaccggacggcgaaaggaaccgactccggaccccacagaagattccggcaaaattatacgaacaaccgatacgcgcagcctcaaaacctccgaatggacgaagccttccataagaatgccccgcaggcaaaacggatccgacaacagctgcaaccgcccgctgatgcggaactcgagttttaactgtaacgatagcactatacttattcgaaaggcaactatatacgcctttaccccaatcgggctccggtctccccatacggccctgcggtgtcgcccggcacaggagaccgggagtttttcccgagaagaacgcgggtcgcaatatcttgaaagtcaggcctacgtataaaacagggtacaaccgtatatagttaccgtttgaaaacacaaccggacagaaatatgaaagacacgaagaaaaacgcttacgaaccggggactcccgaaataacccccggtctgcacatcgacatcaccgccgacggcccttatctcgtatggggcaagattcccatccgccaggtattcatcatgcccaacgacgaaggcaactcctggacctataaagcctcggcacatccctacgaaacaggcgaagacccggtcgccctctgccgttgcggccactcgaaacgcaagccttactgcgacggcagccatgcgcaggccgacgactgggacccgacgctcacggctccgcaccgtcccctgctcgccgacgccgaaacgatcgaaggcccgaccatgaatctgaccgacaacgaacgctactgcgcattcgcccgtttttgcgacgcttacggacgcgtgtggaacctgaccgaagcctccgacgatccgaaagcccgggaaatagccgtttacgaagcgaaccactgcccggccggtcggctgaaggcgtgggacaaagagagcgggcggccctacgagctggaaaccggcccggaaatcaacctcgtggaagacccggcgatcggttgcagcgcgggcctgtgggtacgcggcggaataccggtaacggatgccggaggctacacctatcaggtgaggaatcgggtaacgctgtgccgctgcggacagtcatcgaacaagcctttctgcgacggcacgcacgcttcgatgaagttccgcgacggcctgccccacgaaccggacggcgaagaattctgaaacgcgcgtgctgacagtccgaaaaaaacgcctgtcctttgcttacgggacaggcgttggcgaagggaaaccgacaggggacaacggggctacatccatcttttccgtttgaagaaatagagggtaagcccgatggacaggaacatcaacccgatggcgaactggaaaccgtattcccattcgtcgaacggggcgaggcggtagttcatcccgtagataccggcgatcagggtcggcggcatgaagatcaccgaaaggatggtaaacatcttgatgatcttgttctgttcgatattgataagacccataaaggtgtcctggaggaattcgagccgttcgaaactgaaatcggcgtggttgagcagcgacccgacgtctttgatcataatggtgacgcgcgggtaaatatcgttggggaaccgttcgctgcgctggatgccggacaggagccgctgacggtcgaagatactttcgcgcaggatcatggtgttctcctgcaaccggttgatatccagcagcacttccttatcgacgcttttgtccacgtcgttattgacggcattgagggcggcgatgcggcgcgagatgatttcgaccatgtcggcgtcgaggtcgatacgggcttcgaggatcgaaatcagtacgtgataaccggtggtataggaccggtagttcatctgtatcttgcggctggcttcgctgaaagtacgcaggtcggtgttccgctcggagacaagcagaccttcgctgaggatgaacgatacggtctcgacttcgaaccctccttccctgagtatggtgaaactggtgttgcagatgatggagtcttcgagttcggagtaccgggacgaggtctcgatctcttcggcttgctggcgggtcagcaggttgatgtcgaggaagttctctacgagtttgcgctctttggcggtcggaaccaccaggtcgatccacaacaggtcatcataccccagctcttcgaacactttgggctcgggatcgcggatgatcttgttgatcgatttcaaatacaatatgatcatttcactcgctcctctgttaatcgttaataaacggttcgtttattcgccctgttttaggtttttggagacaactgttctttttcttcagaaaaagaaccaaaaagactttcgagcagttgtgtttcgccttaagctccgtagtcctttggcattgaaattttctttgtgttgccattaccgggggctaatcagatctaactatgttaaatagcccccggtaatggcaacataagactttcaaaggaaagggtatccggcaagctcaggagatgcgcaagcatctcaaaaagtttttctggttctctttgttcacaaagagaacagtaccctcaaacctaacagcacgaaataaacgaacgattaattagtcggcgacagaagggtcgagtcagccgggcgatatgattttttcccagaacaggcgcattgccctgcgtttgcggtcatccagggagaatttgatcgaacgggtcagatagcggtacgcctcgtcgaaatcgaaatcccgcgaacgattgaccgtttccgtgatcgactccgcgacatgctccaccccgtaagccagcgcctcgttcagacgcggggcatactccagccccgcccgcgtacaggccacccacgccgcgaacacgaaaggcagcccgcccgtcagggcggcccactcctcggccagatcgaaacaataggcataccggtgcgccgctttcagggcgaacaccttgtcgccgatcgccaccatcgcctcgccgtattccagcccccggcccgcagcggcagccgatccgcaatccgcaaaatcgacccactgcggcccgatgcgccaatgttcccgcgccaatacccgtaccagttgtaccgaagtgcgcgaatgagaatcgagatagacccgtcgcacgtcgcacagcggcgtgtccgacaacaggacgaccgtttcgaccggcccttcggcgccgatgcaaaaatccgtaataacctgaggagtaaatccgtccggagagagagccggaacggaggaaaacgaaaaacccggaatcagcggaacggccgccgcgggcaccaaagcgatgtccgtatctcccgcaatagcggaagccgcacagagggacggtacctcaagcgagagcgcaatatccccccctgcaagcaaccgtcccg

SEQ ID NO: 498 - DNA, 23678 bp, synthetic construct
  misc_feature 1..23678: note = Synthetic
  source 1..23678: mol_type = other DNA
accaaccatcgccagaaatgacctgataaaacggtgcacaaacagcaaggtccgcattccgatcgaaaacaactgtcccggagcaaccatctattacacgaccgacggaagtgagccgaccagtcgttcgacgaccggagacagcgtaacgctctccagcggctttaccggcggtcgcggaaaagaggaacaggaccggatcgtcgtcgtcaaagtcatggcaatgctcaacggagcgagcagcgacacgaatacatacaaaattaccttgcagaaagacatcaagcactggattgagatataatgatgaattttgtcagcgcacctgtcactttccagcgggaagagaacgctctgtcggtcgtccggaacatcgaggatgtggtcgccatgatcgacaatctcgtcgagttgattgtcttcacaccccggggcagttttacggccgatcccgatttcggattcgagtactggaattacgaatactcgaacgtatcctatcgtgatttcaacaacggacacggcgccttgccccgtttcggaaatgacgaggcaacaaaaaaaatgtgccaaaacagtatccgaaacagtctggagacctatgctccgcagctgaagcacatcgacattctattggagatgaataccataggagcagacaggcagccgcgaaaaaggatcttttccaagtacgaagtctccgtgaaggtcaagggtgctctggacgacggactggggacgatccgtccttatgaaaagaaagtgcttttttacgtcgaaccgacagtctcacacatcagcatatagccgtcgatggatacgatactggagaaaagaatcaacgaggccatcgagcagatcaaccggatgaccgattcgccgatcgattatcggaccatggatccaattgccaagatgatgctcgtgtcgttgattcacgaatgtcagaaattgcaggattatgtggatggcatggagcaaaaaatcgtcgaccggttctgcgaatgcttcataccgggagacaagatcgtcgccatgccggccatcaccctgatcgagccgaagatcagacaaaacagcacagatccggtcacgattgaaaatggagcgctgttttgctacaagtccgcaaatatcaggtcattcatcaactacgtccctctgttccgaagcgttgcgcttccgtatgacgagctctatgtgcttacgcccgacagagccttcacctcgggggcatcctacccgatatcgatggggagtcggaattgcctgtgggtcggcatccacgtctcgtcacgggtcgaaacgctcaagggtgtcacgctgttgataaggggaacttccggactcatgccgtcgaatctccgtgtggggacaagcgacacgccaatcgcatttgccgacatgtcccgcatggaagagctggaaatggtcgagcctttcgacgcccagcagtcttccgaacgattctttacgatgcttgacaactggaaagacatcctgctcgatccaacggacgggaccctgctctgcataaccgatcctgccgtcgacagagatttgtacaggctgcgttcgtatcccagaatcttccagcactggctggaaagcgaagtcctcgattgtttcaaggacggcacgctctggctgcaaatagaatatcccgaaggatacgagataccgaccgattgttccgtcgtcgtaaacgcggtaccggtggtcaatgtcgatgtcaatacgctgacattaaccccaacggctcccattgcgaaactgcagaaacaggacgacgcattttttctgcaggttttggagacaagcggttccacgcacaaacagggattcgccatgtcggccgaggaggtaatcgtccgggactttgacgcctcgtgctaccacaacggagatctgtatcgggacgtaagaaacctgtacaaccatttcatagacgactactacgccttcatcgaatacaacgggatcaaggacggtgaaactatccggctgctgcgggagacaatcaacaaaatcgggaagagcgtcggatcgccaaacccgaaatacaagttcgacagcggcacctatgtcatgaagaacatgaaccagtttccgccatccgccgcaacggccgtatcttatactacgaccatgggaaaggcgggaaacgcacccagagccggggagacaatgatcaacagaaagctgccgactatcgagaaggaagttcggatcatcgtcccggcacgtggcggctcggacaaggcctcggcggacgagcgatacgaactgctgcgctattacacgctgacgaacgaccggctttattccaggaaagacatcgatgcctttctgcgcaaggagttgatcagagaattcgggaaggaggagtttcggagaatcatcatccgcatgaacatagagggggcagccggtacgaccaaagtacaacgcggcctgtacgtcgatctcgagttcaaggatcgaaaaaactacgaccatgcggtcgacatggcattcgacaggatgatgcagcagcgaatccggaatctgtcatgcatcgcaatgcccgtcatcattacgttaaggaatcttgaagagtaacccatgtatctgaaaaaatctccccgtccgaaatacgatccgcaggttcgccagctgcagatcaagctcaatgctattcggacgaacatacatggcaactggccgcatttgacaacggacggacttttcggcacaaacacggaacaggccgtaaggggatttcaatgctatcgcaacatcacgcccgtatcgggagaggtcgggaatacgaccatgaattacatcaatgaggcatatcgccatgttcccgttatcaaaaccgcacccgcatcgacagcagccgcggcgggtctgtccggcgaatctgctcccggcttaagcaagatcatcgactatgctgtcgacctgataaaggagatgcatcaactcgtccagggagagatcaagtatgccatgagcctggggaaatgcgccccacagacggttgtcagccatttcaagagctccatgggcgatctggatccgaaaatggcccgactgaaacagttattcagaatttacacggaaaacagggctttgattgcgcagagcgattcgcttgccagaactccggcctacacggcccgcaacatcagggagcaaatgacctcacggagtgtggatcgcatgcgatccagctatctgacgcaagccaggatttcggcgaatcaggcagcgtcaatcagcaagaaatatatcaccggactgcaaaaattcgacatcacgaccaaggtatccagattattcagccaatacggaataacgggcaacatcaaaatcacccgattgcgaaccatcaagatcaaagccggaggaatatttctcgcatacagtctgaaagacatcgtgtgggatttgcttcagttcgaccagtggggagacgagcagtggcagaacagactgacaaaacattgctacgaatttctggatcaggccattgtcggcgccatctcgggcgtgatcgccaccgtgatcgccggtgtaggattcggaatcgccggaatcgccgttccggccggagtcatggttgtcatcgtggccgttgccgccattctgatcggccttttcatcggatggcttattgcggtctgctacggagaggatttctccttcacgaaatatgcatttgaaggttcggcctcgcggatcatcgaaacagtatacggaatccaatgaaacgcctgattttgctcttcctgttgttgctttcgccgctccgctactccacggcacgggcccagtcttcggcagacatccgacattacatcgcttcgtatacccgcattgcgctggaacaggagaagaaatacgggattccggcttcgatcatactggcacagggcattctggaatcgggggccgggaccagcgagctgacccgacaatcgaacaaccacttcggtataaagagtggtaaaaactggaggggaccgtcatactacgcctgggatgacgaaccgcacaaaagcgcattccggtgttatcggtcggccgaagagtcctacgaggatcactcgctgctactgaaaaacagcaacagataccgcatgctgttttcctgcaacccgtatgattaccgcagttgggcctggggattgcaacacgccggatatgcgagtgcaggaaattatgccgaagcgttgatcggatacatagacgcctatgcgctgtatgccgtcaacggcggagtaaaacttcgtcccgggaggcctgttgtcgagatccggtcctcggatgacaggcaaccgatcctcgatccacggtgccggatgtccgattcggtgcaaacggatgaagagcgatccgtcctcaagataatgaaactgtatattgtcgagataaacgacacgagatgcaccgtcctgcgcccgggagaaacgctggcctccgtatctcaaaaatacaacataccacgccaccggttgttgtcctacaacgaattgtcttcagaggccggcgtcaaggccggggacatcgtatacctgggacccaaaaagagcaggtaccgaggggcacaggatttctacaaggtaaaggagggcgacaccctctacggcatatcgcagatgttcggcatcaagctggacagactgtcgaaaatgaatgacatccatctttttgccgttctccgtcccggaaccaacatccggctcaaatgacagcgcaacggtctcaaggagatacacaccggaagactctttttcaaagaacacaacatacacacatgacagatatcgaacaactggcaaaaaaaggcgaacttttcgacggccgctacaaacttctgaggacactcagcaccgaaggcggaacggccgacgtctggctggccatagacgtcaatacgagagataatccgcaactgctcgacgaacaggccgttgcagcagacggagaagaatccggcatgcttgtcgcgattaaaatctaccggcccaaaaacgccctcgacatcgaaggcgaacaacgattccgggacgaatacaagatcgtgcacaattgccggcataccaacctgctgcaacccaccaacttttcgatttgcaacgacaccccctatctggagctaccgtactgcaaaaacgggtcttcggagttgctgatcggcagagagttgtccgacaaggatatatggaagttcatttatgacgtctcctccgggctgtcgtacctgcatgcctgcaatccgtccattatccatcaggacatcaaaccggcaaatgttctgatagacgactaccacaattacgccatcaccgatttcggcatcagctcccaaagaggcggcaaacacagttattatgtcgacgaggagaacagcgggaccatggcctacatggctcccgagcgcttccgggacaactacaagcccatcgccgaaagcgatatctgggccttcggagccacattgtacgagatactgaccggcaatgttccatacggagaggagggaggcaagaatcaactggaaaacaaggtgccgttgaagccgatgagcggcaaaatatccaaagacatacagaaactcattctgtcgtgtcttgcgctgaatcccaaggaccggcctacagccaaccaaatcattctgctcgccgacagacacctgcattcgaggggaagtctgctgaagtacgtgtcaatattcgttgtcgtgacagccgcatgtttcgcgctgtatcgtttcatgaaacccgaaccggttgtattgtcccaaagcgaagcgtacaccagggcccttaccctgctggacggcgaggagccggaggacgtagctaccgggctgaatgtcatggacagcctggccaacacggaatacgtgccggcaatatacgaaatggcaaggacatacggctggtactccgactccatctccctgaagcggaaaaggaagctcggcatcggatactataccgagggggattcaaaatatatgcccgtatccgacaaatacaacgacaaggcgagagagctgttttcaaagatcatcgagatcgagacctccgatcccatcctgaaggccaacgccgcataccgactggcgacttactgcaacaacaagaacagcgcttacggacaaaatttcaagaaggcaaaacaatatctgctggaatcgaagaaatatgcccttgaagggaacgacacggccctattgaaaacaatcgatacattcatcgaaagcatcgatgcctatacgcgaactttggataacaattaatacagtaaaaacagtagaatgagatgaaaaaagtaatgcttttattttcgttgattctgtccggcatctgcgcccacgcgcaaatgtccagatgggtcattcagccggtatacgacaaaatatatctggcgacaggagccccattcattgtcagtgattcactggggaccagtacgctatgggacctcgaaggcgaaaagatcgccatgacgacagactcgattcatccctacagaaacggatacgccatcacgacgcgtaaagggacggatgtcatcaccggattctatgatctgcatggagagttcactcccacacagaaagactataccattgcgtaccccgattgctgcttttccgacggatacatgattgtaaaggcaaacggaacgtatcgtttcataaataccgaagggaaagaggtcccgtatgacgacttcatcaggatatatccctttaacaacggatatgcagtatgttccagatatgaatttgccgacaagcgaagaaatccatactacacatatgtaacggacaagttttccacgctgatcctctcctacaacaaccgattctttgaaaaaagcgatatcgagttcctctcctcgctgagcgatgagggaagaggaatcgccattatcaaacgccggttatactattttgacaaggaagagctcaagttgtcccccatatttgccacccagacagagaccaatatcaagaaacaggtcgcaataaccggaagcatcgaggaaagcatcacctatacaagtgaccttatctccattgacgcatacagtgacaagaagaagaaagtggttttttatttcgatcaggaactcaagccggtaaagatcgttttcccagatcggaccgaatatttcaaggagcgcgaggagattccttttgaatactcttcaccctattcggcattcaactccgaaggggtatacggattgaaatacaacaacaaagtaatactcccggctcagttcgagaagatcggactctgcatcaacaaattggccgcagcccggcataacgggaaatggggtatgctgacctacgacagcgacttgaaataccgactgatcatccacgacggcaaagatatcgcattccgacacaaagatgtagggacgaccataaaacttgagttgcctccgatcatttcggctgataaatgccgattcgatgtcgggccggaatacgggtgcaccatcgacaagatgtcgctcgaaaccaagaatacggagaacggcaactacgtccagtacaaatgccgattgtccataccggattcgctgcccgacgtcattacggagatcagatatccggtacaaatcacctacgaaggcatccgtcatccggtagcgaccatccgaacgaacgcatggcattacaaatacatcaacgtggatctggatgactcggagacgaccatcaatcagggtaatgtttcattcacaatcaacatatcggcagacaaacaacccggcgaaagcgactatcccttcgacgtggacatcaagacagactccctgcgcacggagctgatcaagatatccgagacccgatacaaatgcaacctgttctctttggccgaaggcgtcaacaccgtcaatataaacattctggaaagcggctgtccgccgtcgatcttcacctttgagatcacctacgtcaagcccgtggaaaagagccgcaatactcccgaggtcaaggaggctgtcaagatcgagaaaaaaatcaatgtcaagcggtcggctccgaaagtcgcggcaccggtacttcccatttgagcaacagacagaataatgaaagtaaacatatcagccaaaagcgacacggggctggaacggaccaacaacgaagacgcctttgtcttttgccaggacctgaatcggcagaactgggacgaagccacccatggatacatcccggcgggagacctcggaagctttgctgccgttgcagacggaatgggaggagccaatgcgggagaaacggcatccaatatcgcactcgataccatcaagaacgcattcagggcagatattgtcaaatccgtcgtttcatccgaacaagacatctgcgcctatatccgggaggttataaaaaaggctcatgaagccatcatgcagcatgtgaatgccgatcctgataccataggaatgggcacaaccatcgtcctactgtggatgattcgcggaaaggccttcattgcctggtgcggagacagcagatgttatgtatacaatccgcgaaaaggaatgcatcgtctgtccaaggaccattcactgattcaggaactcatcgacaagggcgaaatcaccgtcgacgaatcctacgaacgtcccgacggcaacatcattacgcgatgcctcggcgatacggactcttcgagcgatcccgatctgacaacctacgttgtccgtcccgacgacacgtttctgctgtgcagcgacggactctgcggatactgccgggacaaaacgatccgcaaaacactcaattcgtctgttaccgacgtggataaatgcagcgatgccctgatagacatatccttgaaaaggggcggatacgacaacgtcaccgtagtgctgttatccgcaatagacgacaactccgcaaccttgcgaatcccgttcctgtccaaaatcaggaactggttcgcatgacaccacgacagaagcgaccaacatcacatcatctttttcaggagagggctcggattgcatatccgggccctctcttcgcatccgcagccatactcgattcggcttcggaaaagatggacggctaaattcctggcaaaagaacctaatggagatgctgcttccgacctttctcggagcaggccctttcgggtgtggttctccggcaggagccgcaggcaggattgtgccgcaacaggagcctgcggctgtcacacatccccgtcgtcgggtatttgctcaaaaaatcacgaaagatttggttcactttatgtgatcttcccgccacggaacgcgcgggaacgagccaggataaaaaccgctacgaacatgaaaccgatcatcacccacttcaccgacgacgacctctacaagttcacgatgtgctgcgccgtcatcgacaacttcccgagagcccgcgtccggtactccttcaccgaccgcggcaagaccgtctaccctgccggattcgccgaacggcttaccgagcagatcgccctgctcgaagagccggtcatccccgacgggaagatcgacttcatgaagcgcagctgccccacatcctccaccggttctacaactacctgaagggctatcgcttcaaccgccggcgggtcacctgcaaccggcggccgaccctcggaagcgaaacacgcaaaagtcctgcatacgacgaagagcgaccacccgacggcatccgggtggcggccgaccgtcgggagcaaggcctgcacagaagcggagcccatacgggcattccatccggcatcaaacagaccgcccgcattccggcggagcggggtatttcgatacgggaaacggcagaaaacaaaaagtctccacggagtacgcggagacagtaggtttaaaaccttcggcatgtagccttattgtggtaagatgtagaactcttacaacacaaatgtaagaaaaagattctttttccgcaaatttttacctaattttacagaaaaaggatttttttcacatggcaacgatactgggactggacctcggcaccaactcgctcggttgggccgtcgtcgaagagacggagcacggatacacgctcaaagagcagggcgtcgacatctttcaggagggtgtcgcacgcgaaaagaacaacgaaaagccggccgtacaggaccggacgaacgcccgggcgctgcgccggcaatacttccggcggcgccttcggaagatcgacctgctccgggtactcgtccgctacgacctctgtccgccgttgaccggggagcagctgaccgcatggcggaaagaaaagcactatccgctcgacgaggcttttctccaatggcagcgcaccgacgacaatgcggaccgcaatccctaccacgaccgctatgtggcattgaccgagcagctcgatctcggcaaccggcagcaccgtcatctgctcggccgggcgctctaccatctggcgcaacgccgcggattcatcagcaaccgtaaggaggccggcaaggagcaggaagaggggacggtcaagagcagcatcaggagcctcacagccgagatggaggcggcgggttgccgttacctcggagaatacttctatcagctctatcagcacaaggagaagattcgcgggaagtacacctcgcgcaacgaacactacctggccgagttcgaggccatttgcgagaggcagcagctgcccgacgaatggcgcaaggctctgcaccgggccatcttcttccagcgcgacctgaaatcgcagaagggagcggtcggccggtgtaccttcgagccccggaagagccgctgcccggtatcgcacccgcgcttcgaggagttccgcatgctgcaattcatcaacaacatccgcatcacctctccgcaggacgccgcgccgcgccccctgacacaggaggaggttgacgccatacacccgcttttctaccggaaaagcaagccccatttcgaattcgaggagatcgcgcgcaagatcgccggaaaggggaaatacgcctgccgggaggagcggatcgaggccccctatcgcttcaacttcgcccgcacaacgaccgtgtcgggatgtcccgtcacggcatcgctgatcgccgtgttcggcagcgactggcttcgcgaaatgtgcagtctctatctgctcggagagggaaagagcgaggaacaggtgctgaacgatgtctggcatgtcctctttttcttcaaggacgaggagtgtctccgcacctgggcgctggagaagctgcaacttacggcggagcaggcgaaggcttttgccgccatccgtctgccgcaggactacgccgcattgagcctgaatgcaatcaacaagatcctgccctacctgcgtctcgggtaccggtatgacgaagcggtcttcctggccaacctcaaggccgtattacccaaagaggcatacgacaacgaggagcggcggcacgagatcgaacacgacatcgccgaactgctgcttagctacaaacggaacctttatgacaagtacgactccaaggagcgccgcatcgccgactatttcagcgaccacgggctcgacctctcgcgattcgatcggctctatcacccctcgatgatcgagacctaccgcaaggcgcagcccgatgcagccggcatcctccggctcggttcgccgcgcacatcggcggttcgcaatccgatggccatgcgggcgctgttccgcctgcgggctctggtgaaccggctgctgcgcgacgggaagatcgaccgcgacacgaagatccggattgaatttgcccgggaactgaacaacgccaatctccgcaaggcgatcgaacagtatcagcgcgagcgggaggccgaaaaccggaaattcgccgaggagatacgcagccagtatgccgcggagacaggccggacgatcgatccgacggacgacgaggtgttgaagtaccggttgtgggaagagcagcagcatgtctgtccctacaccggacggcagatccgtatttcggatttcatcggcgccgatcccggtttcgacatcgaacataccatcccgagggcccgtggaggcgacgattcgcagatgaacaaaacgctgtgtgagaaccgttacaaccgagtggtcaaacgatccaaactgccaaccgagctctccgatcatgcagaaatcatggcgcgcatcgagtcgttcgggtggcaggagaaggtcgagagtctgcaaaaacagatcgatgcgcaaatccgcaaaagcaaggccgcagcaacgaaagcggagaaggatggcgcgattcagcggcgccactacctgaaactgcaacaggattactggcgcgggaagtacgaccggttcacaatgaccgaggtgccggaaggattcagcaaccgccagggtgtcgacatcggcatcatcggccgctacgcccggctatacctgaagacggtctttgaacatatccatacggtcaagggagccacgacctccgatttccgcaagatatgggggctgcaggcggagtacgagaaaaaggcgcgcgtcaaccacgtgcaccactgcatcgacgccatcacgattgcctgcatcggccaccgggagtacctcgcatggaagcggtacgccgaagaggccgagcgctaccaactcggagagggcgaccgacccgacatcgaaaaaccgtggccgacctttacggaggatgtcaaggcggtggccgacgagttgcttgtctcgcaccatacggccgacaacatggccaaacagacacgcaaaaagctgcgggtccgcggccttgtcaggctcaacgatgcgggcaagcccatctacatgcagggcgacacggcccgggccctgctgcacaaggataccttctacggagcgatcgagcgcgagggcgaaatccgctatgtcgtccgcaagtcgctcgggcagctgcaactcggcgacgtggacaaaatcgtcgacgacgcggttcgcgaacgtgtccgggaagccatcgaagccgtgggtttcaagacggccatgaatgccgacgaatacacgatctggatgaatcgggagaaaggcgtgccgatccgcaaggtgaggatatacacgccgagtgtcacgcaaccggtagcgctcaagaaacagcgcgacctctccgaaaaggagtacaaacaggattaccatgtcgtaaacgacggcaactactgcatggccatctacgagggcgtggacaaaaagggcaagaagagacggaccttcgagattgtcagcaacctcgaagcggcccgatacttcaaggcgagcaccgaccgcaacgatcggcccgacctggtgccggtagccgacacaaacggctacccgctgaaatgcatcctgaaaacaggcaccatggtgttgttttacgaaaacactccggccgaactttacgaatgcacccgcagggaactggcaaaacggctgtacaaggtaagcggaatgagtacgttgacattacagcaaaaatacagatatgggacaattgcattaaaacatcatcaggaggcccggcccgccggagagttgaaggcaaaaagcggcgaatggaaacagaatgaggaatacaggcctgtcatatcattgctgcatacccaactcaacgcctatgtcgaaggttatgatttcgagctgaccattacgggcgagatcaaattcaaacacgcgatgccatgctgaaacgagccctgttcttttcaaccccgtactgtctgagcctgcgcaacggccagatggtcatacatacccgcgaagcacccgagatgcggaaaagcgtcccgattgaagatatcgggttcgtagtccttgaagatcaacagacctccgtcacgctgccgctgctcaatgccctgtcggacaacaacgtggccgttattctctgcggcgagaaccgcatgccgaacgccatgctgatgaatctggactccaaccggacgcagggtgagaactaccgcgcgcagatcgaagcgagcgagccgttgaaaaaggggctgtggaaacaaattgtcgaggcaaagatacgcaaccaggcagctttgctgcggaagctcggtcgcgacggcgacaaactgaaaccctactacatgaatgtcaagagcggcgacgcggacaatcgggagggcattgcggcaaaaacatattggtcggaactgttcggtgcggatttcatccgctctcgcgagggtgctcctcccaacaatctgcttaactacggatacacgctcctgcgtgcagctgtggcccgctcgatcatggggtcggggctgtttcccgctttcgggatttttcaccgcaaccggtacaatgcgttcccattggcagatgacctgatggaaccctaccggccctatgtcgacgagttggtgcatgccctgtggatgcaaggccgccaccagctgaacaaagaggtgaaaagcgaactgttgcgtattctgttcgtcgacacacgtttcgacaaggtattgcgcccgctcgatgtcggacttacgtttacgtcggcttcgttggccaaatgtttttcgggaatacagaaaaaaattgcataccccatattggaataactcgatgtcggagctgcgattgaatgcatatcgaatcatgtggttgtttgtctttttcgacctgccgaccaataccaaggccgagcgacgccatgcggcccagttccgcaaggcgctggagaaagacggctttaccatgatgcagttttcggtctatgtccggcattgtgcctcgaaggagaacatgcaggttcacatcaatcgggtaaggcgttcgatgccgccctcgggctacacgagcatcctggccgttacggacaaacaatacggcgatattctgaatttctggggaaaaagcgaacgggcaaaaccggatataccccagcagttggagtttttctgagatattttgctatatttgttctttgaaatacgaaaaaagacatcaaatcgacttcgccgacgaacggaaagcagatttcgggaatcatcaaacggctgcaaaatacgcagaatcaaccgatagccgtcccgacgttgtggtttgatgtagaaattcaataagatacaacgactatcgttgcgacggacttcgatatttcgttgtggtttgatgtagaaattcaataagatacaaccgagaaactgcgcttttgtgttaaaaatgtgttgtggtttgatgtagaaattcaataagatacaacgttgcgaacgggaacgagcgctgctgcaccgttgtggtttgatgtagaaattcaataagatacaacatccaagaactcgagattcccaaacgcctgttgtggtttgatgtagaaattcaataagatacaaccgagaaactgcgcttttgtgttaaaagtttgttgtggtttgatgtagaaattcaataagatacaaccgcggcccgccgccgatgcgccgccgcgccgttgtggtttgatgtagaaattcaataagatacaacatgcccggcgtgcggctcgcggccgcacggttgtggtttgatgtagaaattcaataagatacaacaatgtagcgattataatatcgagggatcgagttgtggtttgatgtagaaattcaataagatacaacaacgtttcatctgcgcaacaagagtattgagttgtggtttgatgtagaaattcaataagatacaacacctcgaattcgacgacgatcatgagccgggttgtggtttgatgtagaaattcaataagatacaacgcccagtctcaaaatctgtatagcgccaaggttgtggtttgatgtagaaattcaataagatacaaccgaccgagttgttcatacatgttgtcgtacgttgtggtttgatgtagaaattcaataagatacaacttcatacaatcgccaacgtttcatctgcgttgtggtttgatgtagaaattcaataagatacaacacgggaaacggcggaagacagaacgtaccgttgtggtttgatgtagaaattcaataagatacaacttacgataattcaatgcaaggacggcaccagttgtggtttgatgtagaaattcaataagatacaacaaatagttctatatttgtgatgtaaacctgttgtggtttgatgtagaaattcaataagatacaacagaactgcgactcaaagaaggcatcgagagttgtggtttgatgtagaaattcaataagatacaacctcacacagctctcctacctcggatacgagttgtggtttgatgtagaaattcaataagatacaacgtttcgtagaccgcgtgacatggtgatttgttgtggtttgatgtagaaattcaataagatacaacgggggggtgtgtttttctcttatacggaaagttgtggtttgatgtagaaattcaataagatacaacttgatgtgataatagctttcaacttttgcagttgtggtttgatgtagaaattcaataagatacaacaatacacgaaacgaacgaataacgccaacgttgtggtttgatgtagaaattcaataagatacaacgaacaagcgggcacggtatgttgtcaaatagttgtggtttgatgtagaaattcaataagatacaactcacctgctgcatgtcgacgaatagcgaggttgtggtttgatgtagaaattcaataagatacaacagaactattttttttaaaaaaacaagaactgttgtggtttgatgtagaaattcaataagatacaacacctttgctttttgccttgtacccgtcaagttgtggtttgatgtagaaattcaataagatacaaccgagctgttcatgtattcatataaaacatagttgtggtttgatgtagaaattcaataagatacaacaaacaccttacaagagattgacatcaaactgttgtggtttgatgtagaaattcaataagatacaactcgataacaagaggctgaagcatgaaatagttgtggtttgatgtagaaattcaataagatacaaccaacgtgcgcgcggaacgttgatcgaaattgttgtggtttgatgtagaaattcaataagatacaaccagcgtgttccatgtatgaatgatttttcggttgtggtttgatgtagaaattcaataagatacaacccaatggactggcccgtatactttccgttgttgtggtttgatgtagaaattcaataagatacaaccaactgtaaagacaaaaagacaagacaaccgttgtggtttgatgtagaaattcaataagatacaacacctcgctgccaatggcggcgaggtccttcgttgtggtttgatgtagaaattcaataagatacaacaacaagcgggcacgttatgttgttaagtatgttgtggtttgatgtagaaattcaataagatacaacagactggacagtgatcgagacagtagagagttgtggtttgatgtagaaattcaataagatacaacttgccctggaacttttataaaaagattaatgttgtggtttgatgtagaaattcaataagatacaactataggcaacataagcttttccatgtatagttgtggtttgatgtagaaattcaataagatacaaccgacctatcgtgcctcgttcaaggggtacgttgtggtttgatgtagaaattcaataagatacaacattcaatcgccttttaattcacaaaaataggttgtggtttgatgtagaaattcaataagatacaacaacattggataccaaaattgaggaattaaagttgtggtttgatgtagaaattcaataagatacaacatattggggttgttcattggtagttaatggttgtggtttgatgtagaaattcaataagatacaacataaaattaagagaaaaagataattcaatgttgtggtttgatgtagaaattcaataagatacaacggggctcgaaacgttcggatagtctgaacggttgtggtttgatgtagaaattcaataagatacaacgcattttgatacgcagtcgctacggcgtcagttgtggtttgatgtagaaattcaataagatacaacttcgcaaattctcatactcctcgacatgctgttgtggtttgatgtagaaattcaataagatacaacaaaaaaccataatgagtgagatcgcctgaagttgtggtttgatgtagaaattcaataagatacaacaatgtccgtatcgctcgcagtgttgaggcgttgtggtttgatgtagaaattcaataagatacaactcgcgtgcgttgataaagtcgatacgcgcagttgtggtttgatgtagaaattcaataagatacaacattttctactaattgctggaggtctctacagttgtggtttgatgtagaaattcaataagatacaacttataaagggaaaaagaaagaaaattatagttgtggtttgatgtagaaattcaataagatacaactttcagttttaacatttaattaaattaaagttgtggtttgatgtagaaattcaataagatacaacgccggggtgcaagaaacgttcggatagtctgttgtggtttgatgtagaaattcaataagatacaacactcttcggcgattaaagaaacttcgagagttgtggtttgatgtagaaattcaataagatacaacgcacgtcgtgcgctctcatccgcacgaatagttgtggtttgatgtagaaattcaataagatacaacgccaaagcagcaacaatggccgagacaaggttgtggtttgatgtagaaattcaataagatacaacagctggctcgtccagatcggcccacttaaagttgtggtttgatgtagaaattcaataagatacaactgaaccacgacggattctcgagtgccttctgttgtggtttgatgtagaaattcaataagatacaacgggattgacaacattgtgtgaatattattgttgtggtttgatgtagaaattcaataagatacaacacgccggagttcgtcttcagggctgtgcgagttgtggtttgatgtagaaattcaataagatacaaccgaacgggatgctctgtatgagtacctgagttgtggtttgatgtagaaattcaataagatacaactgaaataggcggtataacacccccttaatggttgtggtttgatgtagaaattcaataagatacaaccgatacctatcataatatcgaggaattgaatgttgtggtttgatgtagaaattcaataagatacaaccaaacgaagctctcctttcgtgtactgatgttgtggtttgatgtagaaattcaataagatacaactaccgcggctatccttgtctaccgccatgcaccgggccatatcaactgcacgggtcgttacctatgcatcccctgcccgcaccatgtgatcatcggctaacatcttcgcctacgtgtacaacaactacccgctgtacggagactggcagcgggcgctggcgactacaccgtttcgacgtcacccgtccagcacggcgatccgaccttcacgtatattacctgctgagaataccgggccgagtgctgaatattccgcagtggcgggaggtcgtaaagctgaccatgcgcttctgaacgagcggctgcttagcgccgcactccgccacgcggccccgacccgcaggcctgttcagcacccggggagggactgtgcactatccgtaaaatagttaaatttaccgagaatccgtatattccgccaggccgtgcggtgatgtatctttgtcgtgtgaaagcaaaccgacaaaagaacccatgaaaagaccattctggattccctggctgcttctgtcgatcgccctctctggatcggcgtacagcgtctccgatcctgtgtcggacgaaccgcaacagagccttcccggagaaagcgggaagaacgacgcggacgacaacagaggcgaacccggcggacgatacctcggcgcctgctgcttgcgtaccggaaacacggagcgaatggctcggagcatccggtccgcatcggacagcgacctgatcgtcgtggagccgaagcccctctatgaggcggattacaacgcgatgcccgagcgcgcgcaggccaaactgggtgccatcgcacaaggcgattttccgcctattaccatctcagcagaggcgttggaagattgcgacatgcacttcgcgggctctccgatctggttcaggcacatggcctcgccgatgcagaccttccggcacgagaacgccgatcggctggccacaaacgtattgcgcttcttgcgggcagcggcagcagcgggatcggcatctccgaacgggatgcggtatcgcttggtgcacggagccgtgtttgaagagtcgctgctgctgacgtcgggttcgctcggcagcatggagacgcggattgcgccgtgactcgacaagccggaagcaagcccgcatcgggccagtagataccaacggaagacaaacaagtattgaacaaacacaaaacagcaaaacaatgaatacgaactatccgaccatcgccctcggaacctggtcgtggggcaaaggcgtggccggcggcgaccaggtatttgggaaccggaccggcgagagggagcttcgtcccgtatttgacgaagcaatgaaaaacgggctgaacctgtgggattcggccgtggtctacggcatgggggcctcggagaccattctcgcgtcgtttacgcgggaacgtcggcgcgacgaagtgctgatctccaccaagttcacaccgcagattgccgatctgtcggccgccgaccccgtggcggcaatgtgcgaaagcagtctctcgcgtttcgggaccgatcacatcgacatgtactggattcacaatccggcggatgtcgagcgctggacgccgcggctcatcccgctcgtcaaaagcggcaaggtccgccgtgtgggggtctccaaccacaatctggcacagatccggcgggcggaagagattctcgcggcggaaggggtccgtctgtccgccgtgcagaaccactacagcctgctctaccgctcgtcggagaaggccggcatcctggattactgccgggagaagggcatcgacttctgggcatacatggtcctcgagcggggcgcgttgagcgggaagtacgacacgcagcacccgcttccggccgccagccagcgcggcgagacctacaatccgctgctgccgcaaatcgaaaggctggttgccgtcctgcggaccatcggagcgaagtacggcgtctcccccgcacagatcgccctggcgtgggcactggccaagggaacgacgccgatcatcggggtgaccagcgtttcacaggtcgaggatgcggttcgggcgatacggctctccctgacggtcgaagagatcaaccgcatggaggcggcggccgaggagacgggagtcgatacgcgcggtgcgtgggagaaaccgatgatatgaaccggctcatgaaacgaaaagtcctgatgtgcgtgctgggtgcggccttggcggcctgttcactcccggcacagacggtcgatctccacacccacatcatcatccccgaatatacggaggtgctgaaagcgcacggggcggaactcgaggagacctttccgctgccgacgtgggatgccgggcggcacatcgccttcatggaccgtgcgggcatccgcacggccgtgctcacgatgcccgccccgcagccctactacggcgatacggaggagtcggcccgctgcatccgccgcgtgaacgaagcctcggccgcggtcaaacggcagtatcccggacgcttccgtttctgcgcctcgctgccgctgcccgacgtggatgcggccatccgcgaagcggtctatgcgctcgacacgctgggggccgacggggtgaagctggcgaccaacagccgcgggcaatatctgggagccgcggaattggatccgctgatggaggtcctcaacgagcgtcatgccctcgtcatcatccatccccaccgcccgacgccctgttccggggagatcatcgcggccaccccgctggccatgtacgaatatccggccgagaccacccgggccgtggtgaacatgctcgtgcggaacgtgccggtacgctacccgaacctgaaggtggtcgtgccccattgcgggtcgttcctgccgctggccctgccgcgcatgaaatccatactcccggcaatggtcaaccagggctacatgcagccgatagactgggaagacaacctctcgcatctctacttcgacctagcgggcagcccgaccggcgaagtgctgcactcgctgctgaccatcaccgcgcacgaccacatcctttacggttcggactatccctacctgcccgacgccgtgctgcaggccaacctgcagcggctgaagcagacgctcgccgcggaccgggagcttgccgcatacgcggagctgtttctgtggaagaacgccgaacgcctgtttgtcaggagcgcaggttccggcagtactccgacggagtgaggccctccatttttcggaacatgcggctgaagtgctggggatactcgaatccgagacggtcggacacctgggagacggactctccggcggccagtccgttcttggccaggcggataacaaaccgacggatgtggctgctcgccgtctccccggttgtctttttgatgacatcgccgaaatagttggctgacatgcacagccgatcggcacagtactgcacggtgggcagtccgagcttcaactgaagcttctcgtcgaaatagtcgcggagcaggcggtcgaagcggacgagaatgtcggagttctcgatctttcgggtcaggaactgccggttgtagaaacgctggcagaagttgagcatcagttcgatatagcccacaagaatgcggttctgaagttcgtcggccttcttgccgagctcgtcgcgcatttgtctcatcagggagaccagcgtgtcgtgctcttcggcagtcatgtgcagggcttcgttgacgcggtagtcgaagaacgaatactccttgatgcgcctttcgagagggaacccgtgcagcaggtcgggatgaaacagaagcgcccagccggtgattgccacccgttcgccgttgtcctccttgcctcccacctgtccgggagccacgcacaggagggtgccctcgttgtaatcgtatttgccacaaccgtagtcgagctccacatcggcatcgtcgcgcaggaaaatcccgtacacgccgtaattgttcaggctgtggcggatgggtgacacctcggcatagtcgatgacgcacaccagcggatgccgtgcggggcatccgagatagctgccgtaatcgtttacgttccgaaccttcaatatgttgctcaccacccggtcgatttgtcacaaagatacgaacatttcccgcacaaagctgtatgcgggaggaaaaatcagtaaaaatgggctgccttgccgacttatggttacggtatccgggcagaagcgcgcgtacctttgtgtcggacaaaacagagaacacagatggaacaagccggaaatctctccaacgagttgtgtgcggacgacgtagtctgcttcattgcggaccgccaccacgttacgccgcagcggcttctgcgcgattttctcgacgggaagacctccctgtctttggaacccaacgaggtcgaaatcctgaaggggctgtccggaccgaccgccaacaacggaacaaccaactcaaaaa

SEQ ID NO: 499 - DNA, 23678 bp, synthetic construct
  source 1..23678: mol_type = other DNA
  misc_feature 1..23678: note = Synthetic
gctccccgtcccgctcgcggcgctgatcttcttcctgctgcagggattcgccgacatcaacagctcgccggtctcctccgtcaggttacataatccggcacgggatttcggtgcagtctccaccgacacgcaaaccttaatacccaacttgcgctgcggatcctctttgtaatattcgaagatcgaataccaggcattcaacaccagttgcggattgatctcccggcagtccagcggcaggtaatccttcaaggtcacgcgaagcatcttcttggcggcgcaaatctcgtaatccacccgactctccgtgagcgaacagatcgctgcaatctcccggtaggacatctcctcgtaacgatagacgatgaagacccgccgccgcagaggcgacatgcgtagaagttctccttcgacaatatgcatgacctcggccatcaacagactcttcggatcatcggccgtctgccgcagcacattcggggttggcaaatttcaagagcgttttttccaccggcacggcgacgaagaggctccccgtccgagcggatcgtgccggccttcccgcggatgagcgcctgcggcacccctccgcatcggaacacgttaccgcttcgcaaccgggtcgtgacatcggcatgacaggagatccgctgtacgggtgtatcactggatttcggcccatgacgtgttttttatgacattttgccccgtccggcctcaacgttcgactgaaaatgcgtacctttatccgagcaaaacagtctgaacccgtgaaacaccttctcctccccggtctctggatgtgtctcgccgcaagcctcaacttcggctgcggctccgctccggaaaacaaccccttcgcccgtgccgaaaacggccggatcctcatcaacggcaaaccctgctacttcctgggtgcgaacctctggtacgccccgatcctcgcctcgacgggcgaaggcggcaaccgcccacggctcgcacgcgaactcgactcgctggccgcctgcggcatcacaaacctgcgcgtgctcgtcggggccgaaggcgatgcgggcgtcaccgccaaaatcgaacccattctccagtatgcccccgggcaatacgacgaccgtctgctcgacggactcgactatctgctcgcccaactcggacagcgcggcatgcaggccgtactctatctgaacaactcgtgggagtggtcgggcggttactcccaatatctggcctggagcggcgaaggaaaggcccccattccctgcgtcgacggttacgaaacctatacggactacgtctcgcggtttatccccaacatgcgggcccgcgaactcttcgaaaaccacgtgcgcttcatcgtcggccgcacgaaccgttacaccggtctgaaatacaccgaggatcccgccatcttctcctggcagatctgcaacgaaccgcgacccttcggaaccgccaaccacgaagccttcgccgagtggatcgcccaaacggcccggctgatccgttcgctcgaccccaaccacatgatctcgaccggctcggagggcttctacggctgcgaaagcaacctggaactcaccgaacggatccatgccatccccgaaatcgcctacgtcaacctccacatctggcccagcaactggcgctgggtcgatcgcaacgcgctggccgaagggttggaaaacgccaaagagatgacccgaaaatacatcgacatgcatctggagatcggccggcggctgaacaagccggtcatcatcgaggagttcggattcccgcgcgacagcttccagtttgcaaggaacacgccgaccaccctgcgcgacgcctactacacggagatcctcgaccggctcgtcgagtcgaaacgtggcggcggggtattggccggagccaatttctgggcatggggcggcgaggcccggcccgaacacctctactgggagcgcggcgacgactactgcggtgatccggcccaggaacagcagggtttgtactcggtcttcaacgacgactcgaccgtcggactgatccgccgcaccaaccaactgctcgaatagcacgcctggttgttcagagatgatagataatctcgttatttttcaatcggtatcccgttggattctgcattgaaaaacaggggggggggagtgtccgctcaaccagattctcgatatgcgagacaagacgctctcgatcatcaggccgaatgctcaatatccggacaactgccgctgggctgttctgaaccgcaagaaccgcaagaaccgcctgacccacttccttgatacgctgcggggcacgctggttgagttaagccagaagtaaacagttcttccataaacgaccggccgcaaggaactggacagattcctttcctcccggtcgtttaccggtatcagaccgttaggattttcccgattttttgtatctcgcggctgatgttcgcctcggagatcttcgcatagcgccgcgtcatgttcgtattcgtatgacccagaatcttggcgatgatatcgatcggcatccccgaatgctaagaaatattttctaattttgcgactctaacacaggattattgaaataatatatgatgcattcgaaaacagcaagaatactgtattctatcattgcgagcattattataatcttcttctggagaaacataggctttgtaacaacacttttcgatataccgagcaattctatccccgggctgtcgataaaggctttatttcttactcttgctgctttgattttgacgatcgtcgtaattaaaccaaaagaactattcccgtttctcgggttgagcagcaatattctcaaaggattcgggatcgcactcctatgcgtactaccactttatcttatatttcctttgttcggagacctcaatacaaagttgacgttctccgtgatttatgaccgagcgatccttaccggattcaaggaggagttggtgtttcgggcctttatgttcggtttgcttttccgatatgcaaaaacaggcttcttctgggctgtcatattaccagctctttattttggttcggtgcatctctatcaaggtcacgatgttctttcggcgctcgctgctttcggtgtaacctttatcggtgcactttatttcagttggatgtacgttgaatggaatttcaatatatggattcccgtcggattgcacatactgatgaacggagcatggcatattttcatgatagagggcacagaggtcgcggcgggtggcttgatttccaatattgcccgaattatcagcattatattggctattagtatcacaatttattatcataagaagagcggtaagaaagtctttgattatcccatttggggattgtgactttcttcatttctgtatattgcaccatattacgcatagcaatacaagaatttggttttcagcactggaatattgcagagtaatatgatgcacatcagcgaaatagagctaaatcgtgacctgttttcggtccgagcaaaaaaggtcacgatgaaggcctgaaatacttgctgccttttgctttctttctgggtttctttctggccccctctggagcggaaaacggatttccgacccaagcatattcctcgttcacaatcagcgcattatgtgaagcattttcttcgaaggtcactcctgtgatgcggtcatcatgcactcgtttgcatcccaatgctttcgataaaaatagtgaaaattcacgatataataatgtaactgatgcagattctttaggactgattacattatacgattctctccatttcgcctctttccacccgatagcgaccagcccggacttggcggcgacggatgcaagaccgtccccgtgggacgctccgtacagccttgcagccgatactggcaagtcggatctttgcggacgggtggaaagggatggctgtgtcagtctttgaaatgctttcgcatcacaaaattggtcagttccaaccgatttgcccggcgtttctgaaccttcactacttcgtaccctctcttctcgaagaaaggacgagccgtcaggctcacctcggaggtgatttccgcgactccgtattcccgagctctcttttccacgaccgacagcagcagactcccgacgccgacccgctgataatccttgtgcacaaacagcgagtgcagatagccttcggcattcatcgacgagaagccgataatctcgtcccgttcgttcagcgcagctacgtagtcattgcgagccaaaagatctttcatatgctctacgctatccccacacgaagcccagtcctccacctcttcgcgggtgtagtctcgcgcatttacatgaagaacggtctcccgaaacaagatttgcaggtcgggaatatcctcctccgtgagtttcctcagtttatattgaggacttggcggcccaatcttttggcaagcattcttgtccatagaaaagcggcaataattctcggatttctctttcatacgctcgtcgggttattgccctataaagataggcttttaattccagttggcgcacacagtcatccgacaaaatttcattaccggctcgagctgcgtgatttcttcttcggggtgataaagcgtcgtggcccggcgagcggcggatggttcggtgtgcgaccctcgggagcagaccgggcggggctgccccgcagggcgaggtggttcgaagtggcagccaaaaacccgatgcggggtttttgtgccacgagaacacaacctcgctcccttcggttttcggacccgggaatcggcagcacattcgacgccagaagtcgaacggtgcggaatcccggggtcgcaaggtcgtcagcacgaaggcgctcccgtaccggcaaacggcatgaggttcatgtcgcggcaagaatggggagcgtgcagcttttggcccgaacggatcggggcatgctgtcgtccaaccggagacggcgggcaaccgatgggaggtggtcggctcttcagtggggagccgaggaagggatgaatggcgttgtcatggtcggtgttttttgcgtcgttgtgaggataacgacacccatcgcaggtttgtttcaccacggggcgcgattgcgcgatcttgctggtaattgcacactcaaagcaaagggcaccgcaggggctcttttagattcggtccacacagttgataccggaaatggccctgcgcttcagacaaaaacaaccgggccttccgcagaaagtccggtttgatgggagggaacccgtgtcgggattatgctccgtagaaataggaggccgtagcgccaccatcgaccagaaagtcactcccggtgatgaacgaaccccggggccccatcaacaactccgcgacgttggccacctcgtcggccgtaccggggcggccagccggacatcgggcaaacatctccttgtagaagtcgccgcgcggaccgttgaactcgtccagcgccagcggtgtgacgatgatgcccggcgagatggagttgatgcgggcgcctcgccggccccatttgaccgcctcggccatcacgcgcttgacattgcagcgcttggccagctggtaggcgtgcagcgtatcgcggatgttgcggggctgcaaaatctccagcacaagcagctcttcggtcggagtcgtggccagcagccggtcggcctcttcgccgagtgccggcaggcggtgtcccgactggctggagacggttacgccgaccccgccgcggctgatgacccgtccgacctcctccagcagcaccgccgtgccgtagaggtcgacccgaaggattgtttcgacggaggcctgactcggggaaacccccgccgcattgaccaacatcgagacctcaccgcagttccgggccgtgtcgatcaacgcgaggatcgaatcccgcgaggagagatccatctcgaccgggacggcatcgaatccggcccgattcatcgtttcggcaatcgatgcggcgtgctgcgggctcttgtcgccgatgacgatcttcatgccggcgcccatgcggcgggcgattgccataccgatctgtccggcaccggtcagtatcatcacttgtttcatatcctcaatatttcaactgcttcaaccactccagcacctgcttccgggccttctcccgctcgttctgcgccgcggagccccgcacggccagcccgttcagcaccgaagcgccccgacaagcctcccgcagccggttcaccgtatcggagagtccgctcccttcgtgcgtgcagaagggaatgacaaccttgccctgccagtcgtgctgctccagaaacgtgtagacgcacatcggcagatcgccccaccagttgggatacccgaggaaaatgacatcaaactcttccgccgcaatatctccgacgagtaccggacgggcctttgaccgcttttcccgctgggcgatctccgtgcaggcccgataatcgtcgggataaggtgttgccggctcgatgcggaagagggttccgccggtcgcggaggcgatcatctccgccacgatgtgggtgttcccctgctcgatgtggcccacggcgtaattctccccggcgcgcgagaagaaggccaccaagatttttttcgtattcatgtatctctcttttaccaatgtgttctgtgcgtgtgtgaatgccggcagcgatacggccagcagcagagcggtcagcgtcgctccgattcgcttcatggagggtctcatggcaaggtgcgtttgaaaaaggccgtcagtttctcgatggccgggtcaacggcaccgggacgatcgtaaagatcgatgtgcgaatagcccgggattgtatagatctccttatccggcccgggcagcgcctgatagagacgctcggtctgccactcggaatcggcccggtcgccgacgatcagcagcacgggctgtgtcagcaagtaactgttttcgatggccgagaaggccatcttcgtcgcctgactgcggcgcagatagcggttgtcggcccgcggatgccaggcacgtgccgtgcggtagtagtcatacccctcgcggaacgagggtgcggtctccgcggtcggttcgggacacatatagaccttcatcaactctgcgccccgcgcttcacgggtccgctgttcggagacctcctccaacagagcgatctgctcctcaaccgtgcgtccgcgcagccacccctcgcgattggcagcgccaatatccgcggcactcactccggccacggcccggatgcggcgttcggtcggcgccgtagcgatgacatatccgccgccggcacacaggccgagggctccgatgcggtgctcatccacgaaaggcagcgtcaccagataatcgacggcatagcgaatatcctcgacccgctcgtacggggcctcggaatagtgtggcgtaccgccgctctccccggcataggcggcatcgaaggccagtgtcacaaaaccgttttcggccagccggaaggcatacaatccggccgactgctccttgacgctgccggcggggtgaatgctcagaatagccggatagcgctttttggggtcaaaccctgcaggcagaaagagattgccgaccagcacgatctggttgctgcgcaggaacgacaccttgcggaccagaacgccgctcgtcatatcgacgggcgtcacggtccaggcctctgtctgcggcacaccgggaaggttgtcgtgttgcgttcgggctccgacactcccgacagccgcaagcaggagagccgcgatcaaaatttgttttttcgtctgtttcatgtctgtgaataactgttggttggattccaacggcaaaattacgccgcgcacgtcgtcgcgggattatacaaaacacggaaaggcttcacatatccaccgatcctgccgtagcgagggtgaaaactcggccggatttgctaactttgtgagacgaaacctgtaaatccgtccctatggagaagacgctgttgaatatcgagaccatcaccgaatacaacgacctgctcggcgtggagacgctgcatccgctggtgagcgtgatcgaccttgcgaaggcccgtcccatgcgccacatgcggcatacgttcagcttctacgtggtattcctcaaggacgagaagaattgcgacctgatctacggccgccagcgctacgattatcagaagggttcggtcgtctgcctcgcccccggacaggtcatcggcatcgaggacacgggcgaggagttccaaccccgaggctatgcgctctgcttccaccccgacctgatccgcgccacccacctcgggcgccatatcggcgagtacaccttcttctcctacgaggtcaacgaggcgctacacctttccgagcgcgagcgcacgaccttcatcaactgcctgacggctatccgcgaggagctcggccacgatgtcgaccgcatgagccggcggctgctggtcacccagatcgaactgctgctggactattgcctgcgcttctacgagcggcagttcatcacccgacaacaggccaaccgcgacattctgacccgtttcgagtcgttgctcaacgcctacttcacggcggacaatgccctgcgcaaggggctgccgacggtgaaatactgtgccggcgagctgtgcctgtcgcccaactacttcagtgacctcatcaagcgcgaaaccggcaaaacggcccgggaatacatccagcacaagatcatcagtctggcccgggaacggcttctgatgccgtcacacagcatcagcgaagtcgcctacggactgggattccaatatccgcagcacttcacgcgggtcttcaagcgagccacgggcatgacgccgaacgagtaccggaatcagtccgaggcataagcggcccgcatctcaaaaaaatgctgcgacaaggtccgccttgccgcagcataaaagggtgaaacgatttccgttcgttgattcgatacgggatgagtccgactcggcagtttcggtccggcctccatcaaagcggaaactcgtcggcagccggtcgaaggttgcggtcaaggaccgcccggatccccgattcgggatagagcaacaggcggttgccaagtaccgtaaaggggatctgccgccggtcccgcagcgtctgcaaggtgcgcggtaagaggtgcaggcgtgtgcagacctcctcgccggtcaggtagcgctcctcgccgatcatcgggcgtcgctcctcgaaggccttccgcagcgtgcgttccacgacgtccagccgggcgaacaagcgtcgtatctcgccgctcgcttcgttgagatagtccagcggcatggctatcgcgtttgaaaggttttgcgggagagccaggcggccaggtcccggcgtcggtagtagaatttaccgcccagacgcgagcaggggatcgcgccccggtcccggtaactctgcagcgtgcgtttggtgatgtccagtgcccgggcacacctcctcgctgtccaatcacccgtcgtcctgcggtggcgacaaacggcgttccagacgttgagcaagggcggagaggtgttccacccgttcgaggagccgctgccaactctgctccccgatacatacgatcttttccatggtcttctttctgtttggttcgacattccgacaacccttctcagtgggttgcactctgtgtggatggggacgccgaacattcagcgttcccggatccgaaaggcacggcgtttcatcttttcccggtttatgaatctttattcctgcaagtttgcactcggataacgcgcgcagtccctcaaaagtttcgctcgcaaagtaatgtggcagtggttggcgtcgagagggtggacaaactagaaaagaacaatcgaattttaggcactgatataaataaaaaagtctccacggaatacgcggagacggtaggttgaaaaccttcggcatatagccttattgtggtaagatgtagaattcttacatcacaaatatagcaaaaaagatggagatctgcaactttttatttaattttacaagaaacgacttcttatatggcaaaagtattgggtcttgatcttggcaccaactcactgggatgggcacttgtagacgaatctgaacaggggtatgctctgctggacaaaggggtggaaatctttcaggagggcgtcgcccgagaaaagaacaacgaaaaacccgccgttcaggatcgaacgaatgcccgaacgttacgtcgccactatttccggcgacgcctgcgtaaaatcgaactgctcaaggttctcattcgttacgacctttgccctcctttaaccgacgggcaactctccacatggcgtcagaaaaagcaatatccgctcgatgaggagtttcttcgctggcagcggaccgacgacaacgaagatcgcaacccttaccacgaccgttatgtggcattgagtgagcggctcgacctcggagtgcgtacgcagcgttggctgctgggccgggcgctctatcacttagcgcagcgacgtggtttccttagcaaccgaaaggaagcgggagacgaaaaggaagacggaacggtcaaggagagcatcaagaatctgtcggccgagatggaggcagccggatgccggtatctcggagaatacttctacgaattataccagcgtaaggagcggatccgcggcaaatacacatcacgcaacgagcactacctggccgaattcaatgccatctgcgaccgccagcgactacccgatgaatggcgcgaagccctgcaccatgctatcttcttccaacgcgatctcaaatcgcagaaggggtcggtcggccgatgcaccttcgaaccgacgaagagtcggtgccccgtttctcaccttcgattcgaagagttccggatgttgtcgtttatcaacaacatccgggtgacgggaccaggcgacaacgcgccacgtccattaacaaccgaagaggtcgaggcaattcgtccgcttttcttccggcggagcaagccctattttgatttcgaagagattgcccgcaaaattgccggcaaggggcaatacgcctgcaaggaggatcgcacggaggctccttaccgcttcaattttacccgcacggccaccgtgtcgggatgtcctgtcacggcgtcacttatggacatctttggcgacgactggcttcgtgaggcccgcagcctctatctgcttggcgagggaaaaacggaagagcaagtgctaaacgatatctggcatgcccttttctcgttcaacgacgaggagcgtcttcgcgaatgggcatgcaagaacctgcaacttacgaccgagcaggccaaagccttcgcggctatccggcttccgcaggagtatgccgccctgagcctgaatgccatccgcaagatactggtctatctgcgttgcggttatcggtacgacgaggcggtctttctggccaatttgcaggccgcactgccgaaggagatctatgcggacgagacacggcgacgcgcaatcgagcgggatatcgcctcgctgctgctcgactacaagcggaatccgtacgataaattcgattcgaaggagcgtcgcatcgccgactacttcagcgatcacgggctcgatatgtcccgtttgaaccggctgtaccacccttcaaaaatcgaaacctatccggatgctaagcccaatgccgaaggaatcatgcaactcggctctccacgcacatcggccatccgcaacccgatggccatgcgggcgctgttccggctgcgcgacctggtaaatacactgttgcgcgaggaaaaaattgaccgcgatacgaaaatccgcatcgaatttgcccgcggactcaatgatgccaaccgccgcaaagccatcgagcagtaccaacgtgaacgggaggccgagaatcggaaatttgccgaggagattcgccttcagtacaccgctgaaaccggccgcgaaataacgccttcggaggatgaggtattgaaataccggctgtgggaggagcagcagcatgtctgtccctataccgggcggcaaatccgcatctcggacttcatcggagccaatccgggcttcgacatcgaacacacgcttccgcgggctcgcggcggcgacgattcgcagatgaacaagacgctctgcgagaaccgcttcaatcgggataccaagcgggcgaaactgccgaccgaactctccaatcatgccgagatcatggagcggatcgaatcgttcggttggagagagaaggtagagaccctccggaagcagatcgcggctcaggtacgtaaaagcaaaagcgccgcgacaaaagacgctcgcgacgaggccatccaacgtcgccactatttgcaaatgcaattcgactactggcgcgggaaatacgaacggttcaccatgaccgaagttcccgaaggtttcagtaatcgacaggggatcgacatcggtatcatcgggaaatatgcgcgtctctatctgaagacggtttttgaccggatctatacggtcaagggctccacgaccgctgcgttccgcaaaatgtggggtctgcaggaagagtatgcccgcaaggagcgcgtgaaccatgtccaccactgcatcgacgccatcacgatcgcctgcatcggccgccgggagtacgaccgatgggcgcagtatatggccgatgaggagcaattccgttacggagaaagcggcaaaccccgctatgagaagccgtggccgacctttaccgaggatgtcaaggcggtagccgacgaactgtttgtggcccaccatacgcccaacaacatggccaaacagacacgcaagaagctgcggattcgcggtcggatcaagctgaatgccgacggaaagccgatctatcagcagggtgatacggcccgctgccggctgcatcaggagaccttctacggagccatcgaacgggaaggcgagattcggtatgtcgtgcgcaaagcgctcggacagctgcaacccggcgacatcgacaagattgtcgacgatgcagtccgggatcgcgtacgggaggcaatcgatgaagtcggattcaagacggcgataaattcagacgagtacacgatctggatgaaccgtgaaaaggggattcccatccgcaaggtgcgcatcttcacgcccagcgtcacccaaccgattgcattgaaaaaacaacgcgatctctccgacaaggagtacaagcaggattatcatgtcgcgaacgacggaaactactatatggccatctacgaaggccacgataaaaagggcaagacgaaacgtacctttgaactcgtcagcaatttcgaagcagcccaatacttcaaagccagcgccgaccgggaggcacgccccgatctggtaccgttggccgatgcaaacgggtttccgctgaaatgcatcttgaaaacgggaaccatggtcctgttttatgaaaattcgccggcagaactttacgattgcacacccgaggagctgacaaaacggttctataaggtgacgggaatgagcacattaacactgcaacaaaaatacaaatatggaacactctccctgagacaccatcaggaggctcggccagcaggcgaattgaaggccaaaagtggtgtatggaaaacaaatgaggagtataggcccgtcatctccttgttgcatacacaactcaacgcgtatgtcgaagggtatgactttgaactgaccgttacgggtgaaataaaattcaaacacggtaccccatgctgaaacgaaccttgtttttctcgacaccctactgtctgagtctgcgcaacggccagatgatcatccacacgcgcgaagctcccgaccaacggaaaagtatcccgatcgaggatattggtttcgtggtgctggaggatcaacaaatctcgatcacacttccgctgttgaatgccttgtcggataacaacgtggcggtaatcctgtgcggggagaaccgcatgccgaacgccatgttgatgaatctggattccaatcgcacgcaaggagaaagttaccatgcgcagatcgaggcaagcgaaccgctgaaaaaagggctttggaaacagatcgtcgaagccaagatccgaaatcaggcagctttgttgcggaaactcgaacgcgacggagacaaactgaaaccctactacatgaatgtcaagagcgccgatgcggataatcgagaagggatagcagccaaaatctattggacagagctgttcggcagcgaattttatcgctcccgcgaaggttctccgcccaacaatctgctcaattacggctatacgatcctgcgagctgccgttgcccgtgcgatcatgggatcgggactcttcctggctctgggtatcttccaccggaaccgttacaatgcctttccgttggccgacgatctgatggagccctatcggccgtatgttgacgaaatcgtttaccgccttcatacaaacggtcttatgcagttaacccgagaggtgaaaggcgaattgctgcggattctgtttgtagatacgcgtttcgacaagattgtacgaccgcttgaagtaggtttaacctttaccagttcttcccttgccaaatgtttcgctggtatacagaaaaaagtatcatatcccttgttggaatagggtcatgtcagaaacgcgattgaatgcctatcggatcatgtggttgttcgtctttttcgatctgccgaccaataccaaaaccgaacggcgccatgcggcacaattccgcaaggcattggaaaaagacggcttcacgatgatgcaatattcggtgtacgtcaggcattgtgcctcgaaagagaacatgcaggttcacatcaatcgagtgcgacggtcgatgcctccggctggatttacgagtattctgtctgtgacagacaaacaatatggagacattctcaacttctggggcaaaagcgaacgaacgaaaccggatatgccacagcagttggaatttttctaaaaaaacagtattttcgttctttgaaatacaaaaaaacacatcaaactcacttcggtggcgttttctcaatcggtttttcagctcaagaaacgctgtagaacactaaatttcaacagataatgaacccgacgttgtggtttgatgtagaatttcaataagatacaacgttacgacgtgtagcgcgaatcaaaatccagttgtggtttgatgtagaatttcaataagatacaactgggacgcgtaaataacgtttttgagcgtgttgtggtttgatgtagaatttcaataagatacaaccgagaacgggaaaacctatggttggaacggttgtggtttgatgtagaatttcaataagatacaacgattagtaatatcaccgccattagaaggagttgtggtttgatgtagaatttcaataagatacaactcggcatagacgagggctttgaaggtggtagttgtggtttgatgtagaatttcaataagatacaactctgccgataatagggactcgtccttgaggttgtggtttgatgtagaatttcaataagatacaacacgagcacctcctcgtcgatgccggccatagttgtggtttgatgtagaatttcaataagatacaacggcggggaagatcaaaacgtgtgttaacagttgtggtttgatgtagaatttcaataagatacaacagtcggacatcatttcccagtctccgatcggttgtggtttgatgtagaatttcaataagatacaactttgtgccataaccaaaaccaaaatgttagttgtggtttgatgtagaatttcaataagatacaactttcgaccagcgaaagaaaatccatttaccgttgtggtttgatgtagaatttcaataagatacaaccctaacagcagcaaacgtaatcagtaacgagttgtggtttgatgtagaatttcaataagatacaacagctctgtgtcaaatggcaaaagagcgtagttgtggtttgatgtagaatttcaataagatacaaccttatctatgcgatggtttgcgccgctctcgttgtggtttgatgtagggcggggatattgattcccgtgcttacatagcggcggcggcgatgaatggtaaaacgcaggtagatgttcgtggtacggttttgattggtgcggtcttttctgcaaatggcattaatgctgacactcataatgttgcgacattatgcagacaagcgcgagcggtattttaccgccgtaaaacatggttaaacaaatggtaaaacattcttcgggaaacggcgcaaaaaaggcattacgaagagtttcatttcgcacccgcaaaagaaaaacgagcgataatttattgattatcactcgtttattaagagcgaaaaaacgggactcgaacctaaaattatttgcctctatataatatcaatgtgttgtagctgattctttgttgtcgggtcactggtctgttggagtaattttacgttccaatactttcccttgctacaaagcaaagatacgttatatgtttctcatctcaagataagatccaataaatttgatatccgattcttgggtacgattaggggataatcgcagtcgatgaccagtaccttgagtttgcagatgtcgtccagatagctggcgagaagcgtcgtaagagccgacttgccgacacctcccttctgtttgcagatggagatgttccaggaaccggatgtttgttgatcggaaattttcatcgtttgaagatttgagtggttgatgatttgtcgtgttggattttcaactctatatccatgaatgtgcatgaatctccttttgaatggatatatccagaattccggaaatctgtaaatccggaaatatttatttggagaaatctcttctccatcgaatatccatgcgatcatgtgttggtttgaatccatctgcccgcaaggtaatgcggttttggaagattggttcccaatgtcctccggaggcctagcatggccgacaaccgcgctttttaatccctgaagatcctcgtaatattgcagcggagaatccgcccgtgatttttcgtttcggagctgctttttcgggagagaaattgtcctctgcggatgccgaaactgtacccgtcgcttgacgggagcgagctgtgtctttgtatgccgaaaatgatttcgacatacaaagacgctcgctctgcgaggcgggcggtgttctcccaagtcgaaccccaaatcttctatcgaatgacccgtcagcgaaaatgcaacacacaatccccaaccccgagttacaaatactcgttccggctcaacgaggagcaggagatccgcttccggcagatgcttgctgccgccggattggaacacaactacagtcggtttattgtcaaacgactctttgccgagcgtttcgaagtcatccgccgtgacccttcaaaggtagaatttctgacacgtctcaacgatctttacttccagtttcagcgcgtcgggaacaactacaatcaggtggtccgggccatcaacagccacttctccaatgtctcgattccccgccagatcgcctcgttggaacagcatacccgcgaactgaaagcgttgagtatagagattcttaatcttaccaaacaggccgaaggatggttgcgaatataaggacgggagcaaccgtcggcggagccattcgctacaatgaggagaaggccaaccggggacagaccgaggtgctcttctggaatcggatgcttgatccgttcgatagcgcaggccgcatgagtcacgaacggtgcatggccagcttcgaacccttcctgcaggccaaccggcgaacgaccaacacggtcttccatgtctcgctgaacccctcgcccgaggaccgtctgaccgatgagcaactgggcgagatcgcccgtgagtatatggagcggatgggctacggagagcagccctatatcgtcttcaaacacggagatattgcacgcgaacacttgcacgttgtatcattacgagttgattcgacgggccggaagatctccgactcgcacgagtatgatcgttcgatgtcgatcctgcgggaccttgagcgaaaatacgggctacacccgagcatcaaaggccaggaactgcaagaccgggaggaattgcgcaaggtcgattatccgaagggtgatgtcaagcagcaggtctcctccaccgtaaggtcgtgcctgcggcattaccgctgcgcctcttttggggagtggcggacgctgctggaagccttcaatgtctcggccgaggagcgaaccggaactatcgacggccgcgattatgccggaatgatttacggggcgctgaccgatgacggctatggcatcgggacgccgttcaagtcgaaccggatcgggaaggatgtaggttatgaggccctgcaacgctattacgagcgatcgaaaacggctttgaaggagcccggagcactggacgggttgcggggaaagattgcggatgaaatggcgcggtgttcaacccgggcggagttttgcgagcggctgtacgacacgggtgtcgatgcggtatttcgcctcaatgctgcgggacgaatctatggtgtgacctttatcgaccatgagcagggaatcgtagccaacggctctctgttgggccggagtttctctgccaatgcctttgaacagcagttccataccgaagagaggggtagggaagtctcttgggaatcctcggagcaggagaggccttcctcaaaagaatcattccggccggggccgtctatccatccgttggacgcgattctggaattggctgatgtgcaagccttcgaagaacaacaacaagtctccaaacggaaaagaaggccgcgtatcaggcgattataaaaaagaaaaggatgtttgatgaatacaaacatccttttcttttttggaaggatagtttatcggcgcaaagaagtccgatatgctgatatgatataacttgcagagtttaaggatggatagcgtgcttggcatagacgtccccgattcatatcgggatatgtccaaatgcgtatactcaatcacatcttcttgagaatagccatattccgcacgtaattgctgcatacgttcgattaggagcctctgaaagacctgatctttgtattttattttgtaccctttgtatccattttgttataaaggaaagaggccgcttatgttttttatacacgtgatttcacgtgtattcaaatgttttgcctaaatttgtatcgtaggaagtaatcgagaggtgaatttcttttaatctgaaattgtatttgtttatatgcatattgcaataaacttcgagcaataaagaacgagcagacaagaatatttccttcagatgcactgaatagaatttcttgtcaagaaaacataagggacggcttgcggaattagtttacgataaattcgttgctaaatcataatcacatttcggccgtccctttttatttgtcaaggaaatggggaaataacagaacggctatgggaagataatcgccgagatcctctctcaggagtttcaggcagcgttgaatctcacgggtaaccttccgaaccgagatgccatagcgttgagcaatctcctgataggtctgattctcgaaccgatttgcgatgaatatctgggccgagagttccggcatttcggccaatcgccgatgaaaaatctcctcgacctcgctgcggaagagaatcttggccaaatcacactcctcaagagcggccagattctcccggatgctgcgcatctcgagttgatagatctgctgttgtgtcatcagatgctgctgccgcgtacgcagggcatcaatgcatttatgccggaccatgccgaggatgtaggcgggaatattttcggtcacgggaacaatctcttcccgcttttcccagaagtgcatgaaacagtccgtgaccaggtcttcagcggcggagcggtcccgaagataggagcaggctatgagtatgaagcggggcttgtactctccatacaacctgtcgaactcatgcatctccattcgctgaatcattcttgtccgggaagttgattttcaaatctcaaagttaagattttttcgagaaaaaatatagcttctcatgttaattatataatgcattgtcgttcaaaagtttaagttctgtaaatatttattgaatttaataaaaatatttatttgcagacaacgccggaaaatggtggtaaggattgttcccgtcactcgactatataatagaacagcagataaaattcatcttattacgattgattgtacatggaacaggaacttttattcagatattttcggggcgaaacctctcaggaggaggaagaacgcatcctctcctgggtggaagcctctccggaaaaccgggcggaattccggaaagcacaccttcttttcgcggggctggccctttatgcaccggctccagcttcggacactgcaagtccgaatccccgtcgcacccttctccggattgcacgatatgcggttcgtacggcggctgcagtgatcgtggcagtcggagccgcctacctgggaaaggttgtctaccatcactcgctgacagcgcgtgagatgtctgtatccgtaccggccgggcagcggatgcaggtgaccctggcggatggaacccatgtccagctcaatgccggaacgacccttgaatatccggtagtcttttccagcaaatcacgacgggtcaaactctcgggtgaggctttgttcgaggtgacgcacgatccggcgcacccgttcatcgtggagaccttcgcaacggagatccaggtgctgggtacgaaattcaacgtgctggccgattccgggaacggactgttctcgaccacgctggtcgaggggcgggtcaaggtgaccagccgcaaggatccggccgaatccatcatcctgcagccgaacgaccgcgttgtcctggagcatggccggctttacaaggagcgtgtctctgatttcgacgatttgtgctggacggaagggctgattcatctcaagaagatgccgttcgatgagttgatggccatcttcgagcgtgcattcgatgtccggattgagatcgagcgggaaaccatgccgcagattaacgtgatgagcggagaggtacgtatttcggatggggtggattatgctctgcacgtggtccagctcgtatccaccgggtttacctatacgcgtgatgaaaagtcgaatgtgattgtgattagataatgtgattgtgaatttggcaacgatttatccagattgtgcctttaaaaagaaatgcctatgagaaaataaatcaaaaaactcccagactgttatccaacgaaaaaggtctgcagatttggaggaatccgcagaccgcagataatagtcaacttaaaactcagtaacctattatccttaattctacaaaagtatggaaaaaacaggattcgcccaaaaaaacggaagactgtttcgacttgccttacttgtttgcctgagctgtgccctatttacggccaaggcccagactgcccgtatcacgctgaatctgcaaaatgcgaccctggagcaggcgatggacaagatcaaggcgcaaacacggtatcttttcatcaatcgggatgtggaagatctggagagccgtaaggtgagtatcaatgtctcgaatgaattaatcaccaaagttctggatcaactgttcactccgttcgacatcggttacgatatcgatggacgcagcatcttcatttataaacaacaggctgcagcgacacggccggtgccggtctccggtcgcgtgaccgatgcctccgggcaaccgattatcggtgcctcggtgattgtgcgtggcacaacgctgggtgtctcgaccgacgccgagggtcgcttcatgctggaggtgcccgccccggcggcctcgcagactctcgaggtgagttacctgggctacgaaacggccacgattccggtcggctcgcggacttcgttcgcggtgacgcttcgcgaatcggcctcggaaattgaatcggtcgtggtgacggccctgggcatcaaacgcgaagagaaggccctttcgtacaatgttcagcaggtcggagccgaggagattaccaccgtaaaggacgccaacttcatgaattcgctggcgggcaaggtggccggtgtgacgatcaacgcctcgtcgtcgggtgtgggcggtgccacgaaggtggtgctgcgcggtaacaagtccatctcgcagtcgtcgaacgcgctgtacgtcatcgacggtattccgatgtacaacttcggcggcggaggcggcacggagttcgattcgaagggtgccacggagtccatcgccgatctgaacccggaggacatcgagtcgatctcggtgctgacgggcgctgcggccgcggctctgtacggttcgaatgcggcgaatggtgccgtgatgattacgacgaaaaagggacaggccggcgccctgaaggtgacgctctcgagcaatacggagtttctgaatcccttcgtgctgccggagttccagaaccgctacggcacggggctgaacggttcgagcgcgggttccgccgtctacagctggggacaacggcttaccccggctgcgcaaaccggttatacgcccaatgatttcttcgagacgggccatgtctatacgaacgccttcacgctctcgggcggcacggacaagaaccagacctacttttcggccgcagcggtcaattcggacggtatcattccgaacaacgagtacgaccgttacaacttcacgttccgcaacacgacctattttctgaaggacaagctgcggttggacgcctcggcgagctacatctaccagcaggaccagaacatgaccaaccagggtgtctattcgaacccgctggtcccggcctacctcttcccgcggggaacggatttcgatgcctaccgaatcttcgagcgctacaatccggcctcgaaactgatggaacagttctggtcttcagacctcgagggtggtgacctgcgcatgcagaacccctactggattgcctaccgcaacctgcgtaatacggacaagaaacgctacctgctctccttttcggcttcgtacgacattcttccgtggctgaatgtggccgggcgcgtcaggattgacaatgccaattcgctctacacgcagaagctctacgcctcgtcgaacaccacgattacggatggcggcaagaacggccactacaccgagcagcgcgaatacgatacgcagacctatgccgatgtgatggtcaatatcaacaagacgttcggcgacgactggtcgctgcaggccaacgtcggtgcttccatcaacaatatcaaaaccgacatgctgagctaccggggcccgattcaggagaacggactgccgaacgtgttcaatgtcttcgacttggacgatgcgaaaaaacgcgccgaaaaatcgggatggcaggaacagacgcaatccatcttcgcatcggtcgaagtgggctggaaacagatgctctatctgaccgttacgggacgtaacgactgggcctcgcagcttgccaactcgccgcagtcgtcgttcttctatccgtcggtcggcctgtcgtgggttccttcgtcgctctgggatatgggacgcgctgtcgattacctgaaaattcgcggctccatagcttccgtcggcatgccgtttccgcgtcatctgaccgtcccgacctatgagtacgatgctacgaacaaggtctgggcagccaaaacgcattatcccatcggcgacctctat

SEQ ID NO: 500 - DNA, 23675 bp, synthetic construct
  source 1..23675: mol_type = other DNA
  misc_feature 1..23675: note = Synthetic
ctcggcgtatttggtgtcgtctaccccgctgtcgttgtcgatgatgatctcgcacaactgcgtgtcgcgttcgcgcggcagcaggacgtttgcaccggcattttcgagcatgggcaccagatacggcagcacgaaactctgcgtgaagagatcctcgaccgtctcccagaggcgtgagcgctgccaacgccatacgttctccttctggtcgaaatagcggccgtggctctgccacatggctatatgccgcccggcaaggccttcggtgggggcattctgcgacgagagcggccgcacgagtggccgtttcgagcggttggtgaaacgcgtgcccgaaagattcgatgtgcggtaatagtgtgggatgaactcctcgatacggtgattgtcggttatgatcgagagcttgcggtcggcatactccgcgggcaacacggtgcgtacggagtcatatatcgcggcgacgttctcctcacggaatggatagtatgacaatccgatcgatgcgtatatctctatgcgttcgttggttatgcgcgtacggtcgacgcgtaccgagccgcccgacacctcgcgcgcgacgatgcgcgtgagcatctcgcctatctcgcgtttctgggttgcattgatgcccgccgcgtcggacggtgtcggcatgagcatcagcgccgcaaggacgatgagagttatcttactgtgcagtctcatttcggggataagatattaaaaacagcccaaagatacaaaataatgcgttatagcccaacaattcgaatccgatagcgtagttccacctctcggcggcccaccattgcagcaggtagctggccacgggtgacgcgacggctatgagcggcacgaaacgctggtgtattttgcggcgtgtggcaagtccgaatacgaagaggccgagtatggggccgtatgtgtatcctgcaaccttgaatacaagatttatgacgctgtcgttgccgaaacggtcgaagatgagaatcacggctgtcatgacggctgccatacctatgtgggtgcgtttgcgcaggcgttcgagtcgtttttcgtcacggccgtcggcacgcaggatgtcgagcgtgaaggatgtcgtgagtgccgtgagtgccgatccggcggccgagtatgtacacgacacgagccctacgacgaacattatgcccgcgatcttgggcagcccgccctgaacggccaccagagcaaaggcctgatcgcccttggcgggctgcggcagcccctcggcggctatgtagagatatatgagcgcccccaaggcgaggaacagtagtatgacgactatctggcagagggccgtcagtacgatgtttatctgcgagtcgcgcatggtgcggcagctcaggttgcgctgcatcatgtcctgatcaagcccggtcatggctacgaggcagagggcccctccggcgaccatcttccagaaataccgtgccgaggccgggtcgtcgaagaaccacatgcgcgaatatggcgatgcggccacggcgtggcaggcttccgtgaaggagagatccatgcggccgcatacgcaccaaatgcagacgacgatggcggcaacgagacttatcgactgcagcgtgtcggtcggtatgagcgagcggacgccgccccaacgcgtatagagccatacgagcagcatcgtgaagattatgttggcgatgaacggcaggttgaagtgatcgaatacaagcagctgcatcacagcgcatacgacatatatctttaacgaggagcctatgattttcgaaacgaaaaagcaccacgcccccgtacggtgtgtggtgattccgaaacgatcgttgagatattggtacagggagactacgccgtgtcggtagaatacgggtacgagcacgaaggctacgatcatctgtccgatggtgaagcccacggtcatctgcatatatgaaaaggagtcggcggcgacggagcccggcaccgagatgaatgtcacgcccgacatcgcggcgccgatcattgccagcgtggccatataccatgtcgtgcggcggttgccgatgaagaatccggcattgtctgcatgccgccccgatatgtaggccagagtgaaaagtacggccaaataggcgaaaagtgtcagcaaaaccgctatcggtgacataactcacgggatcatttaccgcgcaaagataacaattcgccacaaaataattgtagtgtcgaataagtttaatatctttgccttcagtttgcgaatcgaaacgataaaagcagggattaattgttaatttaatatatttaatatggctaaatcattgaagatacgagatttgactttgcgagacgggcagcagtcgtcattcgctacccgtatgacgcaggaacagataaaccgctgtctgccctactacaaggatgccggtttctatgccatggaggtttggggcggagcggtgcccgattcggtaatgcgatatctgggtgagaacccgtggacccgtcttgagacgatatacaaggctgtgggcgacgtgtcgaagttgacggctctgtcgcgcggccgcaacctgttcggatattcgccctatacggacgagatcatcgacggcttctgccgtaatgccatcgagagcggactcggcatcatgcgtatcttcgatgcgctgaacgacgtgaacaacgtcaagtcgacggtcaagtatgtgaagcagtacggcggcatcgccgactgcgctgtatgttatacggtcgacccgaagtatccgcagccctcgttcttcgagcgcctgttcggaaagcgtgcgccgaagccggtcttcacggatgagtatttcctcgacaaggccaagcagatggcggctctgggtgccgacatgatcaccatcaaggatatgtcgggtctgattccgccccagcgcatcagccgtctggtaaagctgttcaagcagaatatcaatgtgcctatcgacttccacacgcactgtactccgggttacggtctggcttcggtatttgctgccatcgccgccggcgtcgacatcgtggataccaactgctggtggtttagcgagggcaccggagcgcctgctctggagttcatctatatcttctgcaagaagatgggtatcgatatcggtgtgaatatggatgccgtatcgaagatcaacgcccagctcaagggtatacgcaaggagctggagttgtcggtattcggtgccgagaagcccgcacccaaggctttcgaccccatgaaggatacccttcccgccgaggtggacgccctgttcgacaaggccgtgaaggctgcacagagcgagaacttcgaggtgctgctcgccgcaagccagaagatcgaggcctacttcggtttccccgctcccaacgagctggtgcagaaggccgagatcccgggcggtatgtattcgaacatggtggctcagctcaagcagcttaaggcggaggatattcttccccgtgccatggagcttatcccctcggtgcgtctggctgcaggtctgccgcctttggttaccccgacctcgcagatcgtgggtgctcaggccgtgaactgcgcccttgacgagaaggccggacgtccgatgtacacgaacaagagttcgcagttcgtaggtctggtaaagggtgagtacggacacacgccggtgcccgtagatcccgagttccgcttcaagatatgcggtgtgcgtgaggagaccccctacgatacctcgaagtacaagatgcagcccaaccccgaacttcccgaggccggaggcgtgaagctggcggcaaacgagaaggaggttctgctgttggagctcttcccgttggtggcaaagaacttcctcaccaaggagaagaaggccgcatacgaggccgcacaggccgctgccgcagcgaaggctgccgctgatgcgaagaaggctgccgacaaacccaaggccgaggagaaggccgaggctgcaccttatgtaatgcctacggatgtcaagggcaatgccgtcgtagcgccgctgccgggccgcgtgatcgaggttaaggtcaaggtcggcgacaaggtgtcgatcggacagtctgttgtcatcctcgatgccatgaagatggagaactcgatcacttcggactatgccggtgtcgtgacgcgcatcttcgtcgagaaggatcaggccgtacctaccgaagccccgatggtggagatcggttagtgtgccgctgctataaatgaaaagcccgcaatccagccggattgtgggctttttttgcgtctttgtgtgctcgatgggagttctgtgctgttgacgtggaaaatgcgtaatatcgtgcgaaagcgggctgaaacagcacggccgacggcttggttgtcctgcgaatgtcaggccgctgccctatttcatgatgtgcagcgttacggatgattgccgttcggcgtcgtggtatatcttaacgtcgcatggaacgaaatcctcctttgtgcaggtgtatgtgtcgatcatctgctgcgggttgcggtcgaagagcgggaaccacgtactctgtatctgtaccttgatgcggtgcccggccatgaacgtatgcgcaacatcgggcagcgttagtgttatgtgttcgaccttgtcgggagtgaaggcttcgggagaggagaagccgttgcggtagcgtccgcgcatgatgtcgccgcgaaccatcatctcatactctccgtccgggcccacgtctatgatctttaccacgaagtcggcgtcggttgtcgatattgcggcatggagcgttacgtctatgggtcctattacggccatatcgttctcaaggcgcggcgaaaggaaggtcagcacatcatggcggccgtcgagaaactcctgccctgcggtcatatactctttgcggcgcggccacggcatgtcgggataatacgggacggggtcgttcggatcggaggtgtagaaactgtatgcctccgatatgtcggacggcgtggtggtcagagagccgccctcggccagatagagcgtgtgcgggcggctttggttctcgggattccacccctccatctcgcgccagcagttctcgcccgagaagaatatgagcgctccggttgtcgtggcgccgctatgctcggcatctctgaggtagtggtcaaagaatgggaactcgacttggtggcggtaaaactgcgagagtgactcttccgagaaacggatatgcccgaccgcattggcatcgccgttcgagcgccatgcgccgtgcgtccacgggcccatcacgatacggcagtcggtctgcgggttgttttgtcggatggcgcgatagatgttccatgtgccgtatagatcctctgcatcgaacagacctccgaccatgaggatggcgggacgtatgtcgtgcgtggcattcagggcgctgcgctgctgccaccagctgtcgtaatcggggtgcgcggccatctcgtcccagaatggaatgctgccgccgagagcacgtgttatatcggcgacggtgttgtcgtgcaggtattctacgggattgcccttgacgggagtgtcgaacggttcgggcctgtctgtgggctttgtccgcgccgccgtgccgaagttgggcagaaaccctacggcgtcgctcagggctaaggctccgttgtggtggaagtcgtctccgagaaaccagtcgcatatcggggcttggggcgagacggcacgtatggccggatgtccgcttgcggcggccatcaatgcatagaatcccgagtaggagttgccgaagacgcccacacggccgttatggcgcttcagcttgcgcagaagccactcgacggtgtcatacgtgtcactgctctcgtcaatggcgccggaactcttgtcggcgacataggggcggatattgacaaactctccctcgctgcgccagcgtccgcgcacatcctgaaagacgatgatgtagtcggcgcgcaggtaatcctcgaatatggcctgctgccagaacgaggcgttgcggcgtccgtatggcccgcagccgtagggcgtgcgcgtgagcagtatcggatggtgcgagcggcggtttttcggcgtatatacggccgtatagagacgtatgccgtcccgcatgggtatcatgtattcgttcttgacgtagtgtgccttgaaccatgcggcgtctattgccggctgctgttccgtctcgctggcatggagcgtagcggcgtagatgagagatattattacggttatgatgcgtttcatcgggcaggggtttctttcctgcaaaattaatacaatttggggttattgcaagctattccgtgtcgtcgtgccgtttacggtatatgtcggtgacgtataacgtgaatatggggaaaaacatcatgcccagacacggcagcatcacagccagcgtcttgcctatggccgttacggggaatatcgcggcgccgacagtcgtgacattcatccatgcccaccacatggcgttgccgaagccgtgcagggcatggtttaccgtcacctcgtagtcgtagaaaatgagggctgcaagatatgtgaaacaaactacggtgaatacatacgccgccaacagacgtctgactccccgtccgatgagccagcgtatgaccacccccattgcgacgaacgatcttatgagcggcagtgcggctacggcaacctcggcgctgcgatatatgtcggcgccgcaccaccgcaggatgttcagatacggtatcgacagcagcaggaagaggatcttcggggcgaagcgccggtgtgccccgtaatcggcgacgatctcgccggcaaagtcggccatgaagaccacacaggctacaagttgcaggcgcatgtaccaatcggagtagacgcggtggtcgcccgtgagtacctcgatcgagatgcccgtcagcagggcgatgcctgctatgaggctggctatgcgtaatatggagttcagtcgagacatgcagcggcggatttgccttgatggatggcaaatgtcgtgccgggtaaattttcggcaagacgtatattttttcgaaaaaagttttgcaggaataaaaatttggcttatctttgcaccgcaattgaaagatggcgagatagctcagctggttagagcgcatgattcataatcatgaggtcgagagttcaagtctctctctcgctacacgcggagatcaccccgcacgaaggtctcagcgtcaagttcgggatgtagctcagcccggttagagtacacgtctggggggcgtgttgtcgctggttcgaatccagtcatcccgactaaccgaaaagccttgatattcaactgaatatcaaggctttttcttttcatccctaccccatctccgccgtcggtggaacacaagtggaacatggattgccggaatcttgtggatagtcattttttggcggtaaatgtcttgctgttaatttatttcagcccatataatagcctcgaaccgacggatagtaaattttatcgggttggctgttacggttcggtatagggcgatttttccggctgctgttaatatgacatgatatttttaacgcgatggatatcttatcgaaatattcaactatgaagagttgctatgccatctttattttgtctaaaatctgtttgacgaatccatttgcgtcattaatcaggttgtcaatatctcttagagtaaattcatatagcccaccatcttttttacggccgtttctatgtgctattacatggcgaatgcgaaaatgtttgttcatatccccatttgtgtcgcatattgatataccaaacagctttgtgtatgtggtttttattcttgatatactgctgtacgattccttcaaaacattgtcaaaaacattctgctcactgttgcccatctcgttgtcatcccacatgcgctccaaggcatatagcttttgcttgctttctttgtcattgcatctggctaatataaattcctgaaaatatgtgaagaaactctccttactgcctgcaatctttgtcaatatggtgccgcatacgaatgtatcgacagatgcaattattcctaagtagacttgccgtaacagaatctgcatggtatgttggcagcattggatcttcgagagttcggttatgtctgtaattcgctgtctgtattccgcgtagcagtcatcataagagttccgcagaaatggggcccactcattccttgtgctaaagaatgtctttgcataatattcattgaaaatagatggagccgatgtttctgtaattataatacagggctgtccatttatctcactgttacattcgatctgttcacagccttcggggggtgtgatgcacaggcatttggcatcgttatacctgaagaacggcgtatctataacgatcccaccattgacatatattcattactgtcccgtaaaagtggataaatagttctttgaaattattgaaatatagtcaattacacggttttttgaaatgaaacggacttgattttgcaactttgcagtctaatacaaatggctgctatgttccaagacaaatacgtattctctcaattaaccgcttttctgaacaggactcagttcaacaactatgttcgcaagtatgatggcaacagatatgtgaaacatttcacttgctggaatcagatgctcgcgatgatgtttggacaactgagtaaccgtgagagtctgcgagacttaatcgttgctttcgaggcgcatagggccaagcaatatcatcttggtttaggtcgtgaaccgatagccaagacaactcttgcgacagccaaccagaaccgtgattacagaatcttcgaagactttgcattctatataatgaaggaagcctgcgagaagcggacgaccaacatccttgacatttccggaaagaaatatgcgtttgattcaacaacgattccgttgtgtcttgcaacattcccatgggcaaagttccgaagcaagaaaggaggggtgaaagctcatatcttatacgacattgaagcacaagttcctgccttctatactgtaactactgcatcaaagcatgattccacagcaatgtcttcaatccattatgaaccaaatgcttattatatattcgacagggcttatgactcctttaaagaactctataggatacatcttacagactctttctttgttgtcagagccaagacgaacttaaagtataagacagtcagatggaagcgaagaatgccaaagaacataatgacagatgcggaagtgaaactgaccggatatctctccgagaaaaaatatcctgagtcattcagactcgtccgatattacgacgaagaggatgaccgtgagttcacttttttgacgaatgcaaaacaactttctgcactggatgtcgccgatctttataagaaaagatggttaatcgagctgttcttcaaatggctcaagcagcatctcaagataaagaaattctggggcacaacagagaacgctgttcgcatacaaatcagtgtggctattatcacgtactgtcttgtggctattgtccaacatgatatgaagttgaaacgttcaacctatgaagttttgcaaattctcagcatatcattgaccgacaaaacccacttgcgtgacctgttcgacaagactaatttcaatgatgtcaaagatctaaatgatcccctgattccggggctttttgattaattgtttaactcgtcccattttaacgggacgctaatgacatatattttcttgttattctttatcatagtcaattatataagagtcgtgtagtccgagatattatattccagtagatattgttttatacgtattgtttgcctttgttgtttgttttatgatgtatcccaatttatgaaatatgaaaagaaagtctccacggagtacgcggagacagtaggtttgaaaccttcggcatatagccttattgtggtaagatgtagaattcttacgtcacaaatatatatatattatctgaacttcgcaattttttatttaattttacagaaaacacttgattattattaattatggagaaaattctgggcgttgatcttggcaccaattcaattggatgggctatagttgaagataccgataaaggatatattttgaaggatagaggtgttgacatctttcaggagggcgtagcccgcgacaaaaataatgaaaaaccttcggtgcaagacagaaccgaagcaagggcgttgcgtcgccattatttccgccgtcgcttgcgtaagatagaactgcttcggcttctcgtgaaatatggtttatgtccgtatttgacagacgagcagttggacttgtggcgcatgaagaaacagtaccctcttgatgatgggttccttcaatggcagcgtacggatgataacaaggacaagaatccataccacgatcgttatgtcgcattgacacaaacgctcaatctcgaaaagatggagcacaggtatatgcttggccgtgcgatttatcatctggctcagcggcggggcttcatcagtaaccgtaaagaggttggcaaggacaaggaagacggtgtcgtaaaagatggcatcaaaagtctgtcgacggaaatggagaaggcgggatgtcactatataggtgaatatttttacaagctatatcagcataaaggtaagattcgcggtagatatacatcgcgaaacgagcattacagggctgagttcgacgctatatgcgaacggcaacaattgcctgaggagtggcgaaaaaacatgtaccgcgccatattctatcaacggccgttgaaatcacagaaagggcttgtcggtaaatgtacttttgaacctaaaaagagtcgctgcccggtatcacatcctcgctttgaggagttccgtatgttgtctttgatgaacaatgtaagagttacatctcccggcgagatagaaccgcggccattgtctcaatgcgagatcacgaccatcacgcctctgtttttgcgaaaaagcaaaccgtattttgattttgaagagattgcgcgcaagattgcaggcaaaggaaaatatgcttgtaggaacgatcgtaatgaggccccatatcgctttaattatgcccgtacagctaccgtgtcagggtgtccggtaacagcggcaatagtagcagtatttggatcagattggatttccgagatatgcagcctgtaccggcttggagaggggaaaacggaagagcaggtgattaatgacgtatggcatgccctattctcttttgatgatgaggcgcgtcttaaaacgtgggcgcaagagaatctgcaactgacggaggagcaagccgaggattttgcttccatacgtttgccgcaggattatgcagcgcttagtctgaatgccataaataagatcttaccatacttgcggcgaggctatcgttatgatgaggctgtatttctggctaatctcaagtcggctcttccgtttgatatttatgaagacgagcaacgccggggtgaaattgaaaatgatattgccaacctgttgagcagctacaagcgtaatccgtatgataaatatgacaccaaggagcgtcgcataacggactatttcagtgatcatggtcttgatacttctcgtattgacagactttaccacccatcgatgattgatacctatcggcgggttatgcccgattcagaaggttgcatgcaactcggttctccacgtacgtcttcgatccgtaatccgatggcaatgcggtccctgtttcgtttgagggctttaatcaatcgtcttctgcgggatggtaagatagaccgtgacacaaaggtcaatatcgagttcgcaagaggtctcaatgatgctaaccgccgtaaggccattgaacagtaccagcgtgaacgcgaagcggaaaacagaagatatgccgacgaaatccgcaagcagtatatgacggaaagcggtcgtgagattgtgccgtctgaggatgatatattgaaatatcgcctgtgggaggagcagcagcatatttgcccatatactgggcggcaaatcgggatttcggattttataggttcgtcgcccgtatttgatattgagcataccgttccccgagccagaggcggcgatgattcgcagatgaacaagacgctttgtgatagcaggtttaaccgcgaacggaagcgggccaagttgccgtcggaattatcgagccatgttgatattttggagcgtatcgagtcgtttggatggcttaagcgagtggaggatctgcagaaacagatcgaagcacaggtacggaagagtaagggtgccgcaacaaaaacggaaaaagacggggccatacagcggcgccattaccttcagatgcagctcgactattggcgaggaaaatgtgagcgttttacaatgacggaagtccccgatggattcagtaaccgacaaggtgtggatatcggtataataggccgttatgcgcggctctatctgaagacagttttcgatcgtatttatacggttaagggtgccactacagctgctttccgcaagatgtggggcctgcaagatgaatactccaaaaaggaacgaaccaaccatgttcaccactgtatcgatgccattactattgcctgcatcggtcgcaaagagtatgaccggtgggcgcagtatgcctccgatgaggaacgatacagttatggggagagttgcaaaccccgttttgaaaaaccatggcctacatttaccgaggatgtcaaggctgtggcagatgaactgcttgtttcgcacaatacgcccgacaacatggaaaaacagacgcgaaagaagatgcgcgtcagaggcaaggtgaaatttaactccgaaggtaacccgatatatatacaaggcgacacggctcgccgtaaactgcatcaggataccttctatggagccatcaaacgtgaagatgaggtgaaatatgtcgtgcggaagtctctcggtcagcttcagcagtcggacgtggataagattgtggacgatgtggttaagtcgcgggtaaaggaggcaatacgggaagtcggttttgccaaggcgatggatcccgaggagtacactatatggatgaatgaagcgaaacggatacccatacgcaaggtccgtatctttactccaagtataactcaacctatagcgttgaggaaacaacgggatctgtccgataaggagtataaacaggattatcatgtagccaatgacgggaactattgcatggccgtatacgaggggcaggacaaacgaggcaagactaaacgtacattcgagataatcagtaatctggaagctgccaaatatttcaagcgcagtgccgatcgtgctgatcgtcccgatctggtgccgatgtccgattcgaacggctatccgctgaagtgtatcttgaagatagggacaatggtcctgttttacgagaagtcgccggctgaactgtatgaatgctctcgcaaggatttggtgaaacgattgtacaaggtaacaggatttagtacgctaacggtatccagtaactcatatggtcggcttaccttgaaattccatcaggaggctcgtccggctggagaattgaaggcaaagagtggtgagtggaatagtgccgaagaatacagacccgtaatatcattgttacatactcaattaaatgcttatgttgagggttgcgattttgaattgacggttaccggagagataaaattcaaacacgctatgccatgctgaaacgagctttgttcttttctacaccctactgtctgagtttgcgtagcgggcagatgattgtccatactcgggaagctcccgggatgaagagaagtgtgccgattgaagatataggttttgtcgtgttggaagatgcgcagatctcggtgacgctccctttgctcaatgctctgtcggataataatgtagcggtgattatatgcggtgagaaccgtatgcctaacgccatgttgatgaatcttgattccaacaggacgcagggtgaagtgtatcggactcagatcgaggcgagcgaaccgttgaagaaaggtctgtggaaacagattgtggaggccaagattaggaatcaggcgtctctgttgcgaaagttggggcgtgacggtgataggttgaagccttattacatgaatgtcaagagtgccgatgctgataatcgtgaaggtgtcgccgccaagatctattgggcggaactttttgggtcgcgatttattagatcgcgcgatggcgtctgtcccaacaaccttctcaattatggttataccattttgcgggctgcggttgcccgggcaattatgggttcgggattgttccctgcattcgggatattccaccgtaaccgatacaacgcttttccattggcggatgatgtgatggaaccttacaggccttatgttgatgagattgtttataatctgttccaacaaggtcataagcaattgaccaaagatgttaagggggctctttttcggctcctgtttgtagatacaagatttgacaaggttgtacgtccgcttgatgtcgggttgacttttacctcctcgtcattggcaaaatgttttgcaggaatacagaaaaagattgcatatccattattggaatagaaatatgtcagagttgcgtttgaatgcataccgtattatgtggttatttgtatttttcgatttgccgactaataccaaggctgagaggcgtcatgccgcacaattccgcaaggcattggagaaggatggtttttcgatgatgcaatattcggtttatgtccggcattgtccatcgaaagagaatatgcgggtacatataaatcgggtgcgtagatcaatgccgccgtcgggatatacgagtattcttgccgtgacggacaaacagtacggtgatattatgaatttctgggggaaggtcgaacgggccaaaccggatatacctcagcagctggagtttttttagatattttgcgtatatttgtcttgttctttgacatgctgaaatacatcaaattgacttcgtcaaagtgtgaattcgaacttttcaatgatgataatcttgatatataatgcaatatatcagccgattcaaggcctgacgttgtggtttgatgtagaatttcaataagatacaactttcgaccaatggaacgccatcgcggagagttgtggtttgatgtagaatttcaataagatacaaccggttgcaaagcataattatcgaagctcggttgtggtttgatgtagaatttcaataagatacaacagaatttgaaaagaattattaagatgagagttgtggtttgatgtagaatttcaataagatacaacgcggggcaacaacataaaacatgaaggacagttgtggtttgatgtagaatttcaataagatacaacgccatcgcacgcgaaatcttctccatcttgttgtggtttgatgtagaatttcaataagatacaaccgtacaagcggagaggcttttaagaatgctgttgtggtttgatgtagaatttcaataagatacaacgagcggcttgcaggatgcgctcgacggcaagttgtggtttgatgtagaatttcaataagatacaacggtcgaagagcacgtccagctcgatgcgcagttgtggtttgatgtagaatttcaataagatacaacacggagatcgtggatttctcgacgcacgtggttgtggtttgatgtagaatttcaataagatacaacaggatatcgaagatgtaatcgccgttgtcgttgtggtttgatgtagaatttcaataagatacaacgcccgcgcccttttttcaaaaccccacaacgttgtggtttgatgtagaatttcaataagatacaaccgacctgccgcagggaatgcgagcaattaagttgtggtttgatgtagaatttcaataagatacaacgacgcacgtcccattcaccatgcgcaacagttgtggtttgatgtagaatttcaataagatacaacgacgttcaacatcaagttcgtctcggccacgttgtggtttgatgtaaaatatcaataataacggttttaataggattatttgtgccgtattgataatagaggcaaaagtttattctcttttaatgtaatatctgtattcattagtgtccaataaaaatggacgagttaaaaatttaatcaaatagtccttcaaaaaggggacaattgagttctttgacatcattgaaattagtcttatcgaacagatcacgtaagtgggttttgtccgttagagagatacttagaatctgcaaaacttcgtaagttgagcgtttcaattgcatatcgtgttgaactatagctacgagacagtaagtaatgatcgccacactgatttgaatgcgggcagcgttttctgttgtaccccagaacctctttattttaaggtgttgctttagccatttgagaaagagctcgaccaaccaccttttcttatagagattggcaatatccaatgcagagacatgtgttgcattcgttaggaaagtaaactcacggtcatcctcttcatcgtagtaacgaatgagtcggaatgattcgggatatttcttctctgagagatatcccgtcagtttcacttcagcatcggtcagtacatacttaggcatcctgcgcttccatttagccgttgtgcatttcaagttcgtcttagctctgacaacgaaaaaggaacctgtcaggtgaatccgatatagttccttaaaagagtcataagccctgttgaatatataataagcatttggttcataatgaattgagcacatcgccgtagagtcatgtttcgatgctgcggttactgtatagaaggctggaacttgtgcttcaatgtcatataagacatgagctttgacgcctcctttctttcttcggaacttcgcccatgggaatgtggataaacacaacggaatggtagttgaatcaaaagcatacttatttcctggaatttccaatatattggttgctcgcctttcgcaagcttccttcattatatagaacgcgaagtcttcaaagattctgtagtcacgattctgattagcatacgcgagagtggctttggctattggattgcgtcccagaccaagatgatattgcttggcccgatgcgcttcaaaagcaacaattaggtcgcgaagactttcacgattgctcagttgtccgaacatcatagcaagtaactgattccagcaggtgaattgcttcacgtagcgattaccatcatacttgcgaacaaagttattgaactgtgttctgttcagaaaagcggtaagttgagcgaatacgtatttatcttggttcataagcggtcttcaatttgaccgctaagctacaaattcaaatccgtttcattcagaaataacacttaaaagactgtatttcaataatttcaaagaactatttatccacttttacgggacagtaatgaaatatgaaaataaaataccttatacggattttcgccgcggtgttattgtttgtttctgcggcgggatgcgagcggccggtcgatattacgtgggatgcctcatcgctgcatcgcgtcacgggcggtgtctatgcgcgcgttaaggttttgtccgacgggcggctggctttggtttacagtgccggtcctgcggtatgtatgcgtacgagcgtagacggcggcgatagttggagcgaggcgtccgaaatagcccgcgaccaacgttacaactacaccaattcggagcttttggagctgcacggcggccgactgctgtatctgtggaatgcgcgtccgcgtacgtccggagagtgcgaatacaaaatcatgggcgccgtgtcggacgacggtggtgcaacgtggcgagtgcaggatatattccacgcaggatgccgtccgagcgaaggttgctgggaacctgtggcattgcagtttgatgatggtcacatagagctttactttgccgacgaatccccttatgatacaacttccgaacagcagattacgatgatgcgctcggatgatgacgctgagacttggggtgagccgcagtgcgtctcgttccgtcaaggggcgcgtgacggcatgcccgtgccggtatatctgccgcatcgggacgaggtggtcgtagccatcgaggacaacggccttgcggggcgtttcaagcccgtaacggtacgcacttcggaggattggcgtgacggttgtgtgacgggatcttcgccgcggcgccgttccgcattgaaggccgacgaacagctgcacgacacgatatatgccggtgcaccctatcttatacggctgcgtgacggacgtacgctgctctccgtacagtcgaccgaggggcgtcacggcacgaacgaacgctatgccaacatgcaggtatatgccggagaccgcaacgccgagaatttctcacaccgaaccacaccctatcccgatcttcagtgggaaggcaacgccctgtggaattcgctgtgccagacggacgacaataccgtcatggctgtaatgtcagtcggcggtgtggagaatggcggtatctggaccgtcaagggccgtttgaagtaggattttctggtttgcgttcgcttcgtaacggtgagcattaatgtgtattaacgggtgtgtcggcagtagcgtcgcatgtgtccgaaaggtgagtggaacggtatccagcgacgtgtgcggtgcaggtcgtatataagccacactgaaagaagcgaacatgtaattaccaccgtaagcgacgcttcgggcccgaaggctccacctgtcagcaactcagatcccgaggtctcggcatgaaacagtgtcgttatcttcggggaacccgatacgggaagtccccatatcctgccttcggtgaaattccatgcccaatgtattcctatcggcagccagaggttgccgctgtgtgcatatatggcgccgaatagtattcccgcctcgatggctatggcggcgcttgtccaaagcgaggcgttggggttcagtatgtgcgctccgccgaacagaagggccgatatgattattgccgcggccgagcctgccgaccgttcggttatgcggtatatgactccgcggaagaggcactcttcggttgcggccgtcagcagacagtagaggaataaccacaccagatcccatgtcggggtgaatgccgttatgcggtatccgccgccgaggtacatcacggctgttgcgacggtaataagcagaaatcccgtaaacagacctttggctgtctctggagcggccgtatgtcgtgacagttccgttatgcggcgacgttccaaaaggcggcacagcgttgcgtagagcgttatgacaagtcctccggccaagaagaaacatatacccgtaaggggcagcgaatcccgtgcgacaactcttgtcgcatggacgagagccgaacgaaataccaagataaggatagccatgaccgccatgcgcaacggcgcccaatgaaatatgcggcgcagacgtggcgctgtcttctcgacccaccgtccgcgtatgagccgcaatttcatcagtatgagtatccacaacatggctgttgcgtattatgcaccgtagacgctcatcccggccgcggcagtgtgcggccggatgccgtcgttactcttgtgccggtttgactatacccttcttcgactgtccgtcgacgtatatgtatagcgggcggtcgaactcgacacatcgcagatattctccgtcgtagagcgccggcatggcgtcgagcacggctatgtcgagcgtaccgtccccgcgcgaggggtttagcgagaggtatcccacgccgagcgacgttacgttctggaagaagtgggtaccctgacttgcctcgatattgaagtcgggcagcgccgactcgactatgacgcgcgcctcggatatgtgtccccacttgaccggtacacccagattggggtccgacgatccccagcggccagtgccgataaggacatattcgctgccgctgtcgcgcaggcgcctgttgaactcatagagttcgtcggcgatctcctgcgtcttgagcgacgagaacttgtcgaacttcatgtatatgatatgccgtatgtcgcgcataaggcctatgccgagggcacactccgagtagacgatggcgcccgtgcggtcgacctttgtccagtcgagcttggcgctctcctcgttgcggatgatggggcgtatctgaagcaggttgaatatctgtaccgacccgtgcgggacatccatgttgaccgcaaactccaactccacgggacaacgcatctcctcctcgcctatcttcagcaggtcgcggattatctcggccagcgggaaggatccgtacttgagtatgcggttgaaggtgatgacgcggaagtaacgcgacagcgtgggactctcgcttatgcggttgttctggtagtcgtaataggaacacgtatatttcgagttgcggaagtcgcccatgcgcgatacgggcagccgctcgatgtttacctcgtcgtttgtcgaaggacggaacttgtcgggattgaggctcagggccatcacttcggtctgggcgtcgcttacggccagctcgggggttgatgtctgcaacgccttgtcggggtatgcgggcgagaaacgcaggctcttgccgccgtcgacgaccgcctttccgagtcccataactatgttgcatacgccgtcctcggccttctcgtatcccaacggatagaggttctgcgagcgggctacgcccgagagtgtcgggaaataatatccgttctgttcggtaccgcacacctcctgtacgagtacggccatcttctcctccgagaggaggttctgagatgactggatataagcgcgcgacgaggcgtagtataccgacgcatagacgctctttatggcgcgtacgagcatgcgcagcatctggtcgtcgttctcgcatcgcgggatcatgtacgtggagtatattccggcgaatggctggtagtgcgagtcctcgagtttcgacgaggagcgtatggccagcggtcggcggcaggtgcgcacgaatacgcgcagcttggtgtacagctcggccggaagcaccgaattgaggaattccgagaggatgccttcgtcgtcaacctcctgcgagatgacgtatttgagcccgtttatgcgtatgaagtcgtcgaagtagtcggtggcgatgaccagactgcgcgggatcattatacgcacgttgggatacttgtagtagtggttatatttggccagcatgctgttcatgaaggccagaccgcgcgccttgcctccgatcgaaccctcgccgaggcgggcgaagcctatggcgtcgctgtatgtcgcctcgtcgaactgtgccaccacgccctgtccgagcatggtgcggtagtccttgaagagtgataccagtgcggcgcggtgctcgtcgatggagctgaaatggctgctgttgatgctgcgcagcaccttcgccagcgggaagagtccgcgcgagtagagccacttcgagaggtgcatgtgttgcaggtggtactccagaacatcgtccgggacggtggctatgagttcctgcatctgcttgaggtcgcgcgcacggcctatcacctcgcccgtattcaggtcgcagaattcgaactcgccgaagccgaactcgcgcagtatgacgtcctgcaactctggcagcagcgtcttcgaggtcttggcgatgaagcccgcgccgagagactccgccacggcgcggtagttgacctgcgacgactgcatgatgacgggcatccacggagcatccgccttgatcatcttgcagaggtcaatgccggcatcgctcttttcgtcctccgacttgtcgcccgcgtgcagtatgagaccaacgtccgaaattacgcccagaaggttcttcttgtagcgttcgtaggtcttgaccgcatcttcgaagttggtcgccagcagcactttcgggcgggcgcgcttgcgcgatacctgctgctgttcgttataggcatccttcaggaactcgctgttctgcaacagcagtatcttgtatagttctggcaggtacgtcgaatagaatcgtatcgagtcctcgaccagaagtatagcctgcacacccccctcgagtatgtccgactcggcattgaggtggtcctccattagcttgattatggctattatgaggtccgtattgccgtgccagcagaatatgttgtccagctccttgcacttctgttcggcgatctggcggtatatctccttcgagaagctcgtcagcagtaccacgggcagcgacggatacaactccttgacgcggcgggcaaaatcgaaaacattgggctcgccgacattgtacatcgtcagtacgaagtcgaagtcgtggcgcgtctgcaacagagccagagcgtcggccgtcgactcgacacgtgtgagcgagggcgggttgctcatgttgagctccatatattcgcggttgatctgcgactctatgtggccgtcctcttcgagtatatagccgtcgtaggtgcagcacacgagaagtatcttgtggatacggtgctgcatgaattggtagggagtctggtcttcgagactcaggtatgcgtgatcttccattggcctaaagggagtggcgtatatcttaattatatttctcttaattatatttcgatttcggtttagagtttccagacgggctgccatgtgagggtgaatcgtccatcctcgatctgcagcggcagccagatgtaacgtccgtcgatagcgttttcgggcttccagcggtcacccatatatattattgtgccgtcgctgccttcgacgggtagcatgtatgtactttgcgagtggaaggtcttgtcggcatcgtcacccacgcacggatttcccaactcggtccactcccccattaccgaatcggctacggccgagcgggcggcgttgggagcccaacccgtacacccagacatcatgaggtaatatttgccgtcatgcttgaagatggcgggcgcctccatcgaacggccgacaaaggcacgtacgtaacgacccgagtgtgccgtgtagtcatccgtaagctcggcgatctggagcgtctggttctcctccgaggcgtatatgtggtatgctttgccgtcgtcgtccacgaagagcgtcatgtcgcgtgccatctgtccgccctcgaagtcacgcaccagaaaacggtcgctttctgggatctcggcctccttgccttcggatgcggcttcggccgcctgccgggtctgctcgctcacgttgagcggccacttgcccgcattgacacgtcccgcattgaggaacttgtacgggccggttatgttgtcgctgacagccactccgctcatggcggcggcatagccgcgatccttgagctcgaggtggaaccacatgacgaacttgccggtctgctcgttatatataaccttcgggcgctccagaatacatcccttctcgatggggcttcccgacccttcgggatcgacggcaagggctatgccctcgtcgcgccagtcgtagaggttcttcgacgaatagcaatgcactccgacatttgcgcggttgccgccctcgccttcggtcttgtgctcgccgaaccagtagtaacggccgtcgtggtatagtatgccgccgccgtgggcgttgatagccacaccgttgttgtcaagccacacctcgcccggacggaactccttgttgccgttgcacgagaggctgaggaccgctgcggctgcaatgatggtcaggg

SEQ ID NO: 501 - DNA, 23675 bp, synthetic construct
  misc_feature 1..23675: note = Synthetic
  source 1..23675: mol_type = other DNA
gagtatttgcgagcctccgcagggcggggcttcggctcgcccggctaaagccggttttagcaattcatttctttgcaaaccgaacacaaaacagctaatccccaaccgcgttgccgccagttacatatcccagtctgctgcggagtttgcaaacaatctgtaatgggcatttcaaggtctttgatcttgcgccggggccggtctgcatcgaaaaatcccccgcaaccggcccggacgaacgatttgctgtcgccgtcgtacggctcttcgagccgtgcgggccgcagcctcgcgcagcggaggcccgcaagcgtgccccgcaggctgcgactgaaatttcgaacgaggtggacgcatcgacattcggagcaaaaaccattgttccgcaccctccgccgcattccctttagcgattgcttttttagcgcctgctgcgggcttccgcagcaatatgacgggagccttgtcgggcgtcagcgacgagggttcggtctggtcctcctcctcattcgctggcggcagtatccacgcaagtcgcctgctattcaagggcagcctcgtgcgcccgttgcaccacttcagctatcgctcgtatggtttctccgtgcgctgcgtccaagcatctgccgcgaagccgctttccgatcccctgccttacaaccggcactgtcccggcatcaaaaacctacatatagaacgaccggcccccaaaaagcggggcacctgagaatgcatggccgtccccgacacgccccctgcacaaaaaaaccgcgcggaggaatcctccgcgcgaacaaaagagaaagagttgagccccctactgatgctggggccgcaacagatcctgtacgaccttgacgggcgagaacgtggaaaccggcacatcgacgaagacggtgttccaccgcgccatggcaccgttccagagcccgggcaactcctgggcgcgcaattcgcgtccgccggaagatttcgacgaaatgaaccccgtggctggatcggtatactcgcgcaaatcgaactttccgccctgcgcattgcgcacgccgcacacgagatcgaccggattgaagtgggtggccgacttcatgagcggcatgtcgccgggtgcaatctgactcgactcggcgatctggagcgactcggtgccgtcgggattggccgcccagaaaggtccgccgccgggctcgccctcgttgcggaccatgccgcacacgcggatgggacggtcgaggacggcacgcagcaaagcagcatcatagcgttcgggcaaggcaacgcacaactcccggcgaatgaattcggcgatcgctccgaggtcggccgcaccctcgtccaaggctttcagataagcgaaagcccgtgcctgcagatcgagcagcacgccggccagcacttttttgaaacgaacggtatcgccccgttgggcgtcggtcgtaacgttgtcgatgttcttgatgaagatcaggtcggcgtcgatctcgttgaggttttcgatcagggccccgtgaccggccggccggaacagcagcgaaccgtcgtcgcagcggaaaggcgtattgtcgggattgacggcgatggtgtcggtcgacgacttctgcaccgagaacgagatgtcgtaacggatgccgaaacgcttctcgtaaacgggaatcttctcggccagaagcgcctcgaaaccggcgcggtgctcgggcgagaccgtgaagtggatccgcgccacgccgcccgacgcggcataggccgcaccctcgaccagatgttcctcgaccgccttgcgggccccgtcgggataggcatggaaagtcaccagccccttgggcttgctgccataggcgagcccctcgcccacgatggccgcgacaacggcccgttcgtcggccccggcaggcaacacagccttgagttcgggccagaaagcgaaacgttcgatgttctgcagcagggtgtcgatgcccttgccgcgcttgccctcgttgacgaactcgaacaactccttgaacatgcgcgtggcggcccccgaagcgggcacgaacttcacgacggagcgctctccgacggcctgttcgtagcgggccacggccgcatcggcctgcgcctcgtcgagcacggccacgccgtcgccgggcgaagcggcgcgcaccaccttcagaaaggggaatccgcgccggaaatcggcgatctgccgttcgacggcttcaggcgtgaggccgtggcgggcgatctgctgcaaatcttcggaagtgaacatattgtcgaatttttcaggttgttcgggaccatgcgggcggaacactccgccttgggcgctgcgggcatgagaaagtttcatcggctgcccgcagttatcgaagatacgaataagccgagcgcaatgccgaatttattcgagcattgccgaggcgaaagtatcttcggcctaagccaaagatacgaaataatttctaactttgcacatcatgacccaagtatttgaacacgtcgatctgaccggccgcaacagcttccatgtaaagcagcacgcggcgcgtctggtcgaattcgagaccgcggaggagctgcgggcgctcttcgccggcggcgcacccgagcgctggacggtgctggccggaggcaacaacatacttttcacccgcgactacgacggactgctggtgactcccgtgtcgcagcgcatcgccctgctcgacgagtgcggcggcgaagtgcgcgtgcgggtcgaggcgggcgtcgaatgggacgacctggtcgaatgggccgtccggcacgaactgtggggcatcgagaacctctcgctcatccccggcaaggcgggcgccgctccggtgcagaacatcggcgcctacggccgcgaagccaaggacgtaatccggcgcgtggagatgtactgcgtggagagcggctcgatgctgacgctcgacgcggcgcactgcgaattcggctaccgcgaaagcatcttcaagcatgcgctgaaagggcgtgtcgtcatcacggcgatcgagatcgggctctcgcgtacgccgcagccccacttaggctacggcgacgtcgaacgcgaggtggaagcccgcggcggcgccacgctgcgcaacatccgcgacgccatcatcgccatccgccaagcgaagctgcccgacacggccgtgctgggcaacgcgggcagtttcttcaagaatccgtcggtggagctctccgtagccgaacggctgcaggccgagtggcccgaaatgccgctctacccctcccaggaagccggcaaggcgaagctcgcggccggctggctgatcgaccgggccggcatgaaaggctaccgcgaagggagcgtcggcgtccacgaacggcaggcgctggtgctggtcaaccacggcggcgccacgggcagcgaagtcatcgcgctggcccgcaaggtgcaggcggccgtacgcgacaagttcggcgtggagatcgacacggaagtaaatattctataacaaattcacaattttgattgcatgaaagaacgaaaaataattctgaattgtgaattgtgaattctaaattatgaatcggctatggcccttcccgaggcattcgaacattacatagaagaaaacaggctgctgacacgcgacgaccgggtactgctgacggtctcgggcggcgtggactcgatggtcatgctgtcgctcttcgcccggtgcggctactgcgtgggcgtggcgcactgcaacttccagctgcggggcgccgagagcgacgaagacgaagtgctggtcgccgacgaagcggcccgtctgggtgcggtgtgctacaaccgccgcttcgacacgcaggccgagatggaacgcacgggcgaatcgatggagatggcggcgcggcgcctgcgctacgcctggttcgaggaactgcggcgcgaacacggctacacggccatcgccgtggcccatcacgccgacgactcggtcgagaccttcttcatcaacctgctgcgcggcacgggcctgcgcggactgacgggcatctcgcagcagatcggccgcatcgtgcgcccgctgatgttcgcctcgcgcaaggagattctggaatatgccgtcgccaacaagatccgcttccgcgaggactcgtccaaccggtcgaccaaatacctgcgcaacaaagtgcgcctggggctgatcccccgcatccgcgagatcaatcccaaattcacctcgctcatgcagcgcaacatcgcccgactgaccgaggcgcagcgcttcatcgaccgtgccatcgaacgcatccgcaccgaagcggtgacttccgacggcgggatcgacaccatccgcaccgaccggatcgacgcctccttcccgcgcgaattcgtcatctacgaacttctcagctcggcctacggcttcaagggcgacgtcatcgactcgctctgccacgccctggagaacggtgctaccgggcgccgcttctattcgcgcgagcggatggcctgcatcgaccgcggcgacatcgtggtggcccccatcgccgacgacgacccgtgcgactgccgggtcgaacgcggcaccggacgcagctactgcggcaatgcggtcctctactacgaatatacggacatcgacaccgtcgaaacgttcggcgtgcccgaaaacacggcgcaggtcgacgccgacaaactgcagttcccgctcacgctgcgccgctggcacgagggcgactggttcatacccttcggcatgacggggcgcaagaaggtgagcgactttctggtcgacgccaaggtctcggcggccgagaagcagcgccagttcgtgctggtctcgggcggcgagatcgtgtggctcgtcgggcgccgcatcgacgaccgctaccgcctgaccgggaccaccgaaaacgttttacgcatcaccaaagagatcgtctgacatggccaagaccgcaatccggttccgcgacaccgtcgcccaatacgaacgcatcaacaacgagctgaaagcccggcgctatgcaccggtctacctcttgatgggcgacgaaagctacttcatcgacgccctctgcgagcgcctggccaccgaagtgctgggcgaggccgaacgggctttcaaccagatcaccgtctacggcaaggactccgaggcggggcagatcatcaacctctgccggcagatgccgatgatgggttcctaccaggtggtcatcgtcaaggaggcgcagcagctgcggggcatcgagaaactctcgctctacacgcagaagccctcgcccgccaccattctgatcatctgccacaaggagaagacggtcgacaagcgttcggccttctacaagggctgcgcagccaacggcaccgtgctcgaatcggcccggccgcgcgactacgagatcgtgacgtggctccagcagttcacccgcgaccgggggctgacgatcgaccccaaggcgctctcgatgctgagcgaccacctcggcaccaacatcgccaaaatcgccaacgaactgcaaaagctgatggtctcgctgcccgaaggcacgaagaagatcaccgacgccgacatcgaggccaacatcggcatctcgaaggacttcaacaacttcgaactctgcaaggccgtcgtcacgcgcgacatgaaccgcgccctgctcatcgccgaccacttcgcccgcaaccccaaggacaatccgctgctggtgacgatcatgtcgcttttcgggcagttcaaggagattttcgtggtcaactacctgcggtggctctcgcgccacaagggccagccttttccgcccgacaccgagctgatgcgcatcctgcgcaaaagcaacacgttcttcatcaacgagatcaagcagcacgccgccctctgggataaccgcaaggtcttcgccatcctgggcctcatgcgcgagtacgatgccaaaagcaagggcatgaacacgggcggcgcttccgacggcgaactgctgcgcgaactgctgctgaaaatcttcttgttgtgacagaactccatctctatcagaccgttcacgtcgccgacgagcgtccccgcctggtcaaggcccacgccgccctgctggccgaggcggcccgcacgtttttcggttgcgactacgcgcccgacgtgcggctgctggagagccgcatcgcggccctcgtgcgttcggaacgctatccccggtcggtttcgagtttcgtgcgcatcgaggtctccgacaacggctccgaacggctccggccggccggctactccctctacaacggctacgctctgcgcagcgtaatgcccgacgcccgggtcgtccgctgcgaagttcccggcatcgaactgcccacctcgggccgcgaagcgctccaccggctcgccgaccgccgggcccgcgccctcggagccgacctcgccgtccgcgccgacctgcacggagtctgctactcggccgacagcgccccgcttttcgccgtgcgcaacaacacggtcttcacctcgccggcctccgtttccgccaacggcggtccggccccaacctcgttcgaagcaacggccgcccgtgcggtcagtactgccgtgccgccggagcctcgcgaaccgaatgccggccctgctcaccccgaacttttcgtccaaagtcccgccgctcccgctttccgcagcgtcgaacgcgaaacagccgtccacgccatccgggccgccgggctgacgctgcacgaagaacccatcctgcagtcggcgctcgcaagctacgacgaactcttctacgtcgaccaccgcggcgtcaccgccctggcccactgcgacggcgcgccctacatgttcctcgtcgccgaacgcatcgccgaggccatggaggggatgttctgaatccgccatatacgattccataagcaggcaaaggccgcccgccattcatcttgggcggctgcggggggggcacctttggtgcgagccgcccaagatggcgacgccaagcgtcgcagcgtggctggaactgcgattttcagaaaaaagatcggccgcgcaacacaagcggatttctccatccgcccgtttccgcaccgcccaacaacgacaattatggattccggattgtgaattctgtttttttcgctacctttgttttccatgaagcgaaccgccatcttccccgggtcgttcgaccccttcacccgcggccatgcggcgctggtcgacgatgcgctgaaaatcttcgaccgcatcgtcatcggcgtgggcaacaacaccgccaaacagggactgctcgccgtcgaacagcgcaaacggctcatcgacgacatctatgccggcaatccgcgcgtcgaagcctgcatctacacagggctgacgggcgaattcgccgaagcggcaggcgcctgcgccatcatccgcggcgtgcgcaacaccaccgacttcgagtatgaacgcacgatggaagctaccaaccaccgcatctacccggggctcacgaccgtcatgctcttcaccccggcggccgtggccgacatctcgtcgtcgaccgtgcgcgaggtgctctcgttcggccgttcggtggaggagttcctgcccgcaggcatcgacattacaaactatctataatactatggcaatggaatttacagccgaaatgatcgccggattcctcggcggcgaggtcgtcggcgacaagctggcggccgtacacaccgtgtcgtccatcgagcagggcaaggccggatcgctggcctacctcaccaatcccaaatacgaaccctatctctataccacgggcgccagcatcgtgctggtcgacaagtcgttcaccccctcgcagccggtcacggccacgttggtcaaggtcgacgatgcgggggcctgcgtcgtgaagctcctcgaaatgtacaacgcggccaaaccccgccgcacgggcatcagcgcccatgcctccatctcggagaaggcgacggtaggcgaaaactgctacgtcggcgatttcgcggtggtagaagagggtgctaaaatcggcgccggctgccagctctatccccaggtctacgtaggtgccggtgtcgagatcggtgaaggaacgacgctctatcccggggtcaaggtctacgagggctgcaagatcggcagccgctgcatcctccacgccggtgcggtgatcggtgccgacggcttcggattcatgcccaacgcggcgggcggattcgacaaaatcccccagctgggcaacgtggtcatcgaagacgacgtcgaaatcggcgccaacacctgcatcgaccgcgccaagaccgactccacggtcatccgccacggagtgaaactcgacaacctgatccagatcggccacaacgtggaaatcggcgccaacaccgtgtcgtcggcccagacgggcatcgccggcacatcgaaggtgggcagcaattgcttcctggcgggccaggtgggcatcgccgaccatgtcacgatcggcaaccgcgtgcaggtgggttcgaagagcggtatcgacaagagcgtacccgacggcgaaatccgcttcggttacccggcgcttccgggcatgcagtaccaccgttcggccgccgtcttcaagcggctgcccgagctggacaagcgcctgcgcgacctcgaaaaagagctcgaagaactgaagaaatagcgaacgatcgttggcaccccgaccgtcataccgcatcatgggcattgaccccggcaccaacttcatgggctacggcgtgctggagatcgaagggcgcacggtgcggccggtcgtgctgggcgacatcgacctgcacaagctgaccgatccctacgccaagctggcccgcatcttcgagcgcgtgggggctctcatcgacgaataccggccgcgcgaagtggccctcgaatcgccctttttcggcgaaaacgtgcagtcgatgctcaagctcgggcgtgcccagggcgtagcgatggccgccgcactgagccgcggactttcggtctcggaatacgctcccatgcgtatcaagcaagccatcaccggccgcggatcggccgataaggagcaggtcgccgccatcgtctgccgcaccctcgccatcgaccggccgccccggcggctcgacgccaccgacggcatggccgtagcgctgtgccactattacaccaccgcctcgccgctccaggctgctctcggcacagagcgcgtcaaggggctgggtggcggcaaaaaggctgcgtccaaaggcggatcgcaaagctgggaacagttcctgcgcacccaccccgaccgcgaagtaaagtaggcgaagcgactgacaacgctattttagtaagttctgaaatgactgaaggccaaacaggttgcatgcagaccctcgcggagaggttgcggccgcagacttttcgaatcgccgctgcaacacgcacccataccgcccccttgtaaaatgccttgacatgcctgcaatcttgcattccgcatgttccgcaccgcatcgccgcacaccggccacaataaaataaaaatcctatcaatcagcaacatataacctctccagagaagcaactatcgttttttattaaaattcttgcccgttttcttgttcttttcggatttttgccctacatttgcattcgcaattcggcaccgtagcttaattgaatagagcatctgactacggatcagaaggttacaggtttgagtcctgtcggtgtcacaaagaaagagagattacttgcaagtaatctctctttctttgtgttttgcacagaatcttcggcggtaacgatcggcaataccggtctgccttaatcgaaatcggactttgcccgattggatactccaacggaacaatcggaaacaaaaagccatccatgaacgatcccgcaccgcatgaacccggtaccgagcacattatccaataaaaaagtctccacggagtacgcggagacaataggttaaaaaccttcggcatgtagccttattgtggtaagatgtagaattgttacaagacaaatataagccaaaatttggaatcttgcaactttttacataatttcacaaaaaaagttattgcatgtcgaaaatactgggactggatctcggcaccaactcgttgggctgggcgatcgtagaagaaaccggatgcggatactcgctgctcgataagggcgtcgatatttttcaggaaggagttgccagagaaaagaacaacgagaaaccggccgtacaagacagaaccgatgcgcgggcgctacgccggcactatttccgccgcagattgcgcaagatcgaagttctcaaagtacttatcgacaacgatctgtgtccccgactgtcggaagaactgctgacagaatggcggaaaaacaagaaatacccgctcgacgaagcgttcatccgctggcaacggacggacgacaatctcgacaaaaatccctaccacgaccgctatcgggcattgaccgaaaccctcgatctgaacaaggaaagcgatcgtcatgcgctcgggcgcgcactttatcatctggctcagcggcgcggattcatcagcaaccgtaaggatgcagggaaagagagcgaagacggacaagtcaagcaaggcatcaagaatctgacggccgacatggaaaatgccggatgccggtatttgggcgaatatttccacacgctttatctgcagaaagagaaaatccgtaagaaatatacttcgcgcaacgagcactatctaacagaattccgggccatctgcgcacaacaacacctgccagaaccgctggaacaggccttatatcgggccatcttcttccaacggcctttgaaatcgcagaaaggagcggtcggcaaatgcacgttcgaaaaacggaaatcgcgctgcccggtctcccacccgcatttcgaggagttccgcatgcactctttcatcaacaacatccgcattgccgctccggaagataacgatttccgacctttgacgcaagcggaagcggaaactatcgtcccgctgttcctgcgcaaaagcaagccgcatttcgacttcgaggagatcgcacgcaaaatagccggcaagggacgttatgcctgcaagggcgaccggaacgaagccccgtaccggttcaactacgcacgcatcgcgaccgtaagcggatgcccggtcacagcctcgctggttgcggtgttcggcgacgactggctgacggagatatgccgccgctatacgcttgcttccggcaagagcgaacaacagatattgaacgacgtatggcatgcgctgatctcgttcgacgacgaggaacgacttcgcacatgggcgcgcgaaaagctccgtcttacggaagaacaggccgcggctttcgctgcgatccgcatgccgcaggaatatgccgcactaagtcttaatgccatagagaagatgctgccgtatttacgggccggctatcgttacgatgaggcggttttcattgccaatcttaaggctgccttgccgcaaacaatctatgaagatgaaacgcaccgccatgaaatcgagcaagacatcgtgcgtctgctgctcgattacaagcgcaacccttacgacaaatacgattcgaaagaacgacgcatcgaggcatatttcagcgacaacgggctcgacgtttcacggctccaccgcctctaccacccgtcgatgatcgaatcctaccatgtccagcggcccgattccaacggtctgctccaattgggatcgccgcgaaccccatccgtgcgcaatccgatggcgatgcgggccctgttccgattgcggatattgatcaaccgattgctgcgcgacggaaaaatcgaccccgcgaccaaaatcaacatcgaattctcccggggactcaacgatgcgaacaaacgtaaggccatcgaacaataccagcgtgaacgggaggccgaacatcggaaattcgccgacgaaatccgaaaacaatacgcggcagaaaccggaacggagatcgagccgaccgaaacggacattctgaaataccggctctgggaggaacagaaacatgtatgcccctacacgggcaatcagatccgcatttcggatttcatcggctcggcaacggacttcgacatcgaacataccctgccccggtcgcgcggaggcgacgattcgcagatgaacaaaacgctttgcgaaaaccggttcaatcgggatataaagcgggccaaactcccgtccgaactatcggcacatgccgaaatcatggcgcgcatcgagggattcggatggcacgaaaaagtcgagaagctgcaaaaaatgatcgaagcgcaggtacgcaagagcaaaggtgccgccacgaaaacggaaaaggacaacgccattcaacggcgccactatctgcaaatacagctggcatattggcgcggcaaaatcgaacggttcaccatgaccgaggtgccggacggattctccaacaggcagggagtggacatcggcatcatcggccgctacgcccggctctatctgaaaacggtgttcgagcggatatacacggtaaaaggcgcgacgaccgacgcattccgcaaaatgtggggtctgcaggcggaatatgcgaaaaaggaacgcgtaaaccatgtccatcactgcatcgacgccattacgatcgcctgcatcggccgcagcgaatacgaccattgggcccgctatgtcggggacgaagaacgctacctgcgcaacgaaggcacccgtccgcaatttgaaaagccctggcccacattcaccgaagatgtcaaggcgattgccgacgaactgctcgtctcgcatcatacgccggacaacctgcccaagcagagccgcaaacggctgcgcatccgcggcaaggtacaggtcgacggccaaggcaagcccgtctacatgcagggcgatacggcccgcggagcgctgcaccaacaaactttctatggagcgatcatgcgcaacgacgaaatcaaacatgtcgtccgcaaatcgctcgaccaactccaacccgccgacgtagaaaagatcgtcgacgatgcggtgaaacaaaaggtgaaggatgcgatcgaatgcgtaggattcaaaacggcgatgaacccggcggaacacacgatctggatgaaccgggaaaaagccgtaccgatccgcaaggtgcgcatcttcacaccaagcgtcacccaacccatacacctcaagaaacaacgcgacgcttcggcgaaagcatacaaacaggattaccttgtcgtgaacgacagcaactactgcatggccgtttatgaaggaaccgacaaacgcggaaagacccggcgctcgttcgaaatcgtcaacagccttgaggccgcaaaatatttcaaggcaagcgccgaccggacggcccggcccgatttggtgccgataaccgacgtaaacggcgacccgctgaaatgcctgctgaaaacaggcacgatggtgcttttctacgaaaatttgccggaagaactgcatgaatgcacccaaaaggagctggcgaaacgactgtacaaggtaacgggattcagtacattgaccgtatcgaacaattcgtatggacggctaacgatgaaacaccaccaggaagcccggccggccggagatctaaaagcccaagacggtacatggagaatcaaagaagaatatcgtccggtcatccgaatcctgcacacgcaactgaacgcctatgtcgaaggctacgatttcgacatgaccgtcacgggagaaatcgaattcaagcacgaaccgtcatgttaaaacgcgccctctttttctcgacgcccttttcgctgagcctgcgcaacggccagatgatcgtccatacgaaagaggctccggaaatgcagaaaagcataccggtagaagacattggcgtgatcgttctggaggatcagcagactacggtcactctgccgttgctcaatgcgctttccgacaacaacgcggctgtcatcctttgcgggaacgaccgtatgccgaatgccatgctgatgaatctggactccaacaagacgcaaggcgaaagttatcgagcacagatcgaagcgagcgaacctctcaaaaagagcatctggaaacagatcgtcgaagcgaaaatccgcaatcaagctgccctgctgcgaaaactgggaaaagacggagacaagctgaaaccctactacatgaatgtaaaaagcggggacacggacaaccgggaaggaatcgccgccaaaatatattggaccgagctgttcggccgtgaattcattcgttcgcgcgagggctcggaaccgaacaatctgttgaactatggctatacgattcttcgtgctgccgttgcccgctcgctgatgggatcgggtctgttgccggctttcgggatttttcaccgcaaccgctacaacgcattcccgctggcggacgacctgatggaaccctatcgcccgtatgtcgacgaactggtatacaagctccagtccgaaggcaagttgcaactgaccaaggaggtcaagggcgaattgttgcgcttgcttttcgtcgacactcgtttcgaaaaagtattacgcccgcttgatgtgggattgacgttcacctcggcgtctttggcgaaatgttttgccggaacccacaaaaagatactttacccactgctcgaataatgtccgaatcacgtctgaatgcctaccgaatcatgtggttgttcgtcttcttcgaccttccgactcaaaccaaaaccgagcggcgccacgccgcccagtttcgcaaggcattggagaaagacggcttctccatgatgcagtactcggtttacgtccggcattgcgcatcaaaagaaaatttgcacgtgcatgtcaatcgggtcagaaagtccatgcctccggccggatataccagcatcttaagtgtcacggacaaacaatatggagaaatcatgaatttttggggcaaaatcgaacgggcccggcccgaaacgccccaacaacttgaattcttctgaaaaatgaattactttcgttctttgaaatacaaaaacagcatcgaatcgacttcggcgaggtttccggccttgttttatccgccaaaattccgcacaaacaggctgaaatcagccggttatatgcccggcgttgtggtttgatgtagtttttcgatataatacaacatagacaatgcgatccgcactttgcgccgcgttgtggtttgatgtagtttttcgatataatacaaccgggaagagttgatcggctcgcgctctgccgttgtggtttgatgtagtttttcgatataatacaactcctttcatgataatttgttttgaggtttggttgtggtttgatgtagtttttcgatataatacaaccgatctgcgaaagatacgtttgtgtgatgtgttgtggtttgatgtagtttttcgatataatacaacctcttcgtctctcttctataagattgaacggttgtggtttgatgtagtttttcgatataatacaacttccagtctgacgtgatgctgaaaattgcggttgtggtttgatgtagtttttcgatataatacaacctcgcgattacaaaggagagtcgataaacgttgtggtttgatgtagtttttcgatataatacaacgacgaggcgatccacgaaaaggagccgccggttgtggtttgatgtagtttttcgatataatacaactcatggccgaaacggccaaggtgctctgccgttgtggtttgatgtagtttttcgatataatacaacgcgcagcgcaatatccgacatcgacttgaagttgtggtttgatgtagtttttcgatataatacaactagcgttcagcagatcaatgctgtgccgctgttgtggtttgatgtagtttttcgatataatacaacgtcgcagacgatggccacggcggcgatgagttgtggtttgatgtagtttttcgatataatacaacgcgatctcctccccttcatcgttggtattggttgtggtttgatgtagtttttcgatataatacaacacggaatagaatacgtgaagaatagacgtgttgtggtttgatgtagtttttcgatataatacaaccaagggaacgataaagaaacatggtacggcgttgtggtttgatgtagtttttcgatataatacaaccaagggaacgataaagaaacatggtacggcgttgtggtttgatgtagtttttcgatataatacaacagataatatctcatccaacccaggcacgatgttgtggtttgatgtagtttttcgatataatacaacacttcctccagatggaaggagacatcccaagttgtggtttgatgtagtttttcgatataatacaacccattacgctgatggacatcctgacggcctgttgtggtttgatgtagtttttcgatataatacaacgccgcgttggtcgtgatgcggcgatatgaagttgtggtttgatgtagtttttcgatataatacaactggccgttcgggtacgccgactgcggacaggttgtggtttgatgtagtttttcgatataatacaacaaagcgtccggcaacaaccggacgcttgcgttgtggtttgatgtagtttttcgatataatacaactactgccccatggaggcgtcgatcttcttcgttgtggtttgatatagtttttcgatataatacaaccggagagttgcgtaagcgggtcgagaccctgttgtggtttgatgtagtttttcaaaatagtacaataccgttcccgaacgtgttgttgtagcagtgttgtgttttgatgtagtattacaacgtatcatttacggtcgcacacgggtactgccggcatcaagttgttctgcgacgcaacccaacgttttcgacaagccgagtgcagaaccggacttgttcgggctatgccgaggcgagaaaacctgcctgaaaggaaacatcattcgccgaccacgtcgcagccgccgaatcgatgtagcacagaatttgcgtaacggggaagcatgaacaaaaaagcgatcctggcagcgctgctgactgcagcggcatggagtgaaccgaaagcggaaatgtgcacgagagtagtatacacgggcccggaaaaaacgatcctgacgggccggacaatggactggaaagaagacccgcaaagcaagctgtgggtattcccgcgaggcatgcggcgcaacggcgcggcaggctccaattcgctggaatggacatcgaaatatggcagcgtagtcacctcggcctacgacatctgcaccaccgacggcatgaacgaaaagggcttggccgccaatctgctgtggctggcggaatcggaataccccgcccgcacgaccgacaggccggcactctcggttgcggcatggacgcaatacgtgctggacaatttcgccaccgtcgacgaggctgtcgaggcgttctccggcgaccggttcgacgtggtttcggacctgatgcccgacggaacgaggatggcggcactccacttgtcgatctcggacgccacgggcgacagcgccattctcgaatacatcgacggcaaactcgccattcaccacagccccgcctatacggtgatgaccaattcgcccgttttcgaacagcagttagcgctcgacgactattggaacagcatcggaggactggtttttctaccgggcaccaaccgtgcggccgatcgtttcgtgcgcgcttcgttctacataggttcgatacccaagaccgacgacacgcggctggccgtcgcttcggtattcagcgtcatccgcaacgtgtcggtgccgctgggtatcagcacgcccgacgagccgaacatctcgtcgacccgctggcgtacggtcgccgaccagaaaaaccgcgtctattattacgaatcggtgctctatccctacctcatctgggtggatttcgacggattggatttctcggagggcgccccggtcggcatgatcgatcccgcatcgggcaaacgatacgccgggaacacgtccgccgaattcattccgacggctccgttcgtcttccagacagccgattgacctttcgagggaaacggcacaagcagaaaaatacaaagtccggaaaaagcatgcttttttccggactttgcgtatctatagggctgaatactattcgagaaaatgattctcctggttgttggtgcgggagaattcacggatggatttgaggtgccgctgcaacatggcgacgcacccttcctcgtcgcgctcgcgcacgcaccgcaacaactcgcgatgctcgtaacacacctcctccaagggcacggaacaaacccggtaacgctggtaatacctcagcacgtcgggcgtaatgaccagcagtagcgacgcgatcaccgaattgtgggcgccgcgcgccaaagcctggtggtaggcgaaatctttcgatacgcggtcgtccgtcacgaatgaatcctcccacgccgagagcgcctcctcgatgatggccaggtcctcctccgtgcggttgcgggcacacagccgcaacgcctccgtctcaagcagctcgcgcacataaaccagcgatgcgaaatcgtagggctgtatctgcagcgcatcggcaatcatgcgctcgagcacctgcatcgtctcccgcgccacgaccgtaccgctctgcggaaaggtctgcacgatgccgtagaactccagcttctggaacgccgtgcggacatgggcgcggcccactcccagcttctcggccagccgccgttcggccggcagccgttcgcccggctgcagacgacccgaatagagttgttctttgatatatttgagtacttcttcgacctgagaatgtccgggcgcgtagttcataaagtccctgcttcggtttggggacacaaagttcgcaaaaaaaccaatcaaaccaaaattattgcgcctcctttttcacttcgaaatcggcgaatcccaatatttcgtcgcgcaactcgggtttcagcgcccccgccttgccgaaactgcggtagataccccacttcgggcgcatgcccgccgcaccgtcgcgccacatcgccagcggcgtaaggggcacggagagcagttcgaggccgtcgcgcaggcgccggatcgacaagcggtaactgccttcttcggcacattcgatgcactcctcggcttcgacccatccgcccaaaaactcctctagatcggcacgcgcaagataacggttgccgccgccctcggccgtcggcggcacatagatgacctgcaactgccgcttgccgttggagagcgtgcgggccgtgaaagtaatgacgggcatcgagacatcggccgttccggcggcgttgtcgatccccttgatctggtgcacatggcagaactgctgcgtggtcttcatcccctcgggcaggcggaatttccagcggaagagcatcttttcgccacgctgtcccaccatcgaggcgggcgaatggccgtcggtcttgatttcgttgcgctggcggtcggtgatgttgggtttgccacggtcgtcgtcgttgtcgatatgaatgtaaaaatcgaaaacatggcgctgcaactcctcgctccacgactgacggatgtgctggaacggctcggcggcatgggcgccggagcgatcgggcgtttcgtagttgtagccgcagccgacgatcaggtcgtaggtgcgttccgtatcgccgccggcgcgcagttcgccctcccgcaatccgggttcgggttgcgacggaggctgcggtccctcgggagccgggggcgtctcgaacgaacggcccgagcaggccagaacgaagaacacggagcaggcgaaaataaatcgtttcatgtttggtattccgatcggtttgggttatctttgctgacgtccgattttggttaaccaatttcgggcgctgaacaaaagtaataaaaaaatccgaacctaaactaccctaccgatgaaaaaactgcttttggccgcgcttctgacagcggcccttcaggctccggcgcagcaacccgcccagccgaccaaccgctacgcgatgaaactcacgcagaacgccgacggttcctatgaactgaccagccgcgaccgctatgcccgcatcgtcgacctggagcggatcgacgacctgctggtgccctacacctaccagcgcgaccgcttgcagagccgcgactataagggagtcgaggtgcgcgaagcagtctacacgacccacgaaggctacgaactcagcatcgccatcgacatggcgcagagcgatgaacccgcgcccgtagtcttctatgtccacggcggcggctggtcgcgcggcaacaacggcacgttccgcacgctgtcgcaatacatggccaagcagaaaggcgtgaccggcgtgcgcatcgcctacacgctggctccgcagccgggcgccgacgtgcgcgtctcgatcgccgacatccgggccgccgtgcagtatatccgcgaccatgctgccgagctcaacatcgatccctcgcgcatgggcttcgtgggcaactccgccggcgcccatctggccgccgtgggcgccatgaccacaccggaagcgaaggctttcgtcggcacgtcgggcatctacgacctgcggacggccgccatctgccagaaaaccaagatcgaggagcgcatcgcctacttctgcgaccgcgacccgaaaatcctgcaggaggcctcgcccgtcgccctcgtccccaagaagaaggcacccgccgcgctgcttttctgcggcacggccgacatcaccgtcgagcatgcccagagccaggccttcgccgacgctctccgccggcgcggagccaaggtcgacctccaggtctacgagaactacgaccacaacctgagcgccaaggcttcggacaagatggaggaggtcttcttccggacggtcgatttcctggccgaaaacctctgacgccatgaaacgcctcctgctactgcttttcgccgctgccggactctccgcgcaggccaaggtggccgcaccggccatcttcggcgacaacatggtgctgcagcaacaacgcaaggtgcggttgtggggcacctccgacgcccgcgaggtgaccctgcgcgtatcgtggagcgacgaggagttccgcaccgccgtgaaagagggccgctgggaactggcggtgccgaccccggccggctcatacgagccgcagacgctctcggtgagcgatgccgattcggaactaacgtggcgcaacgtgctgatcggcgaagtgtggatctgttccggacaatcgaacatgtacatgcccctgcgcggctacacgggccagcccgtcgacgaagcgctgcccgccctgctcgaaaccggcgattatcgcgaccgcatccgcatgatcaccctgcccaagcgcgacgccgcaacgccgcagcaagatttcgagggacgctgggaggtgccctcgcccgaaaccgccctgcgcatgagcgcggcggcctacttcttcgcccgctcgcttacgcaggccttagacgtgccggtgggtatcgtctcgaccagctggggcggctcgaagatcgaagcgtggatggaccccgcgtcgctcgccgaactgggctacgacgtggcgaagatcaacgccgaccccaagatcgagccccgtgccaagtgcggcctgctctacaacggactcgtggctccggtggccggattcgcggcccgcggcttcgtatggtaccagggcgaatccaaccgcaaggaggcaccgcgctatgccctgctgatggagcggatggccgcctactggcgtgcgcaatggggcgacacccgggcgcgcatgcctttcctctatgtgcagatcgccccgcacgcctacaaaggtgccggcgacaccgatgcggcgctcctcgtcgaggcgcagagcgatgccctcgaccggattcccaatgcggcgatggtctcgaccaccgatctgggcagcgaaacgtgcatccaccctccgcacaaacgccccgtaggcgaacggctcgcagcggcagcgctcgtccgggcctactccagcaagctgcccgacgccctcgcggtgcggttcgccggagcggaattcgccgacggcaaggccctcgtgcggttcgacaatgcacggctcgggctctcggcaccgggcggaacggtcacgggcttcgaactcgccggccaggacggccggttccaccccgccacggcccggatcgtggcctcgaaacccgaggtcgagctctcctcccccgaagttccggccccggtcgccgtacgctactcgttccgcaacttcgctcccggcaacctgcgcaattcgctcggcatgcccgtcatcccgttccgaacggacagacaataaccggccggacaaccacaaaaaatcggcggaccctcgcaggtccgccgattctgtttgcaggcgcttttccgctacgagaaaagcgtaccgccgttgatgtcgatgttggtaccggtgaggtagctcgactcgtcgctggccaggtagcagaccaggtcggcaacctccgaagcctcgccctcgcggcgcagcggcgccgtgttgtgcaggttctcgcgagcctcgggcttggtgaagcggtcgtggaacgaggtgttgatcatgcccggagccagcgcgttgacacggatgccctgcgggcccagctccttggccatggcgcgcgtgtggcacatgacggccgccttggccgtagcgtaaaccgaagcacccggaccgcccccgtcgcgtgcggcctgcgacgagaagttgacgatcgaaccgccggccggcatcatcggcaccgcctcgcgcgtgcagaggaagaccgaacgcatgttgacgtccatcaggaagtcgtaccatgcctcgtcctgctcgacgatcttcttgcggcccacgatgccgcccacgacgttgaccagaatgtcgaccttgccgccgaacgccttgccggcctccgagaagagcttcttcacatcggcagccttggtcatgtcgccctgcacggcgatcgcttcgccgccgtcggccttgatcatggcaagcgtcttctccgcatcgtcggggttgtcgaagtagttgaggcataccttggctccttccgaagccagcttcaccgaaatggcgcgacccaggtcgcgcgcgccgcccgtcacgacggctacttttcctgtaagtttcatgttgttattgatttaaagggttattcgaatatttttttgtcatcctgagcgaagcgaaggatctgacaaaggtaaaaacagattcttcactgcgttcagaatgacaggtctgcaaatctatttttccacttgttcgatgcggccgccgaaaaggaagacgcacagcagactcgccggcacgagcgcggccccgagcacgaagaacggagtccacacgccgctctgcgtgagatagggcaccagcaggatcgagatgatcgtacccagcacggccgacgcaccgcccagtccggccagcgaacccacggccttgccggtctggaaatcgctggcgagggtctggatgttggtcatgacgaactggtagccgcccagaatgaaggccatcatcaccaccgccatcacggccgacgaagccacggcggccagcgccatgcccggcacgatgatgcagccgccgacgatcatggccgtcttgcgggcgaaatcgacgcttttaccgcggtcgatcagcatgcccgagaaccagcctccggccaccgaaccgatggcagcgcccacgtaaggcacccacgccgacatggcgatctgcttgatgtccagtccgaaaacctcgatcaggtagat

SEQ ID NO: 502 - DNA, 23666 bp, synthetic construct
  source 1..23666: mol_type = other DNA
  misc_feature 1..23666: note = Synthetic
gcccgagacgtttacataccgcggcaaggagtatactcccaagtcgtttgccgagtcactgccgatcgatctcgacgactacgtcgatctgacctcatatacgcatcatcccttctacgagtcgttcatattggagatccccgacaactggcgctggcacagccagtacaacctgcctctcgacgagatgatgcaggtcgtagaccacgccctcgacaacggctacacgatcgagtgggcggccgacgtcagcgagctgggcttcgaccgcatcaaggccataggtatcatccccgaggacgacgtggagagcatggagggaaccgaggcggagcgctggggcaagctctcggcagccgagcgtcagaaggcgctttacagcttcgagaagcctatccgcgagaagagcatcactcagcagatgcgccagacggcattcgacaactaccagactaccgacgaccacggaatgcagatcgtaggctacgcaaccgaccagaccggcaagcgcttctacaaggtcaagaactcgtgggacgtacgtcctccctacgacggctactattacttctcacgtccgttcgtcgagtacaaaaccatgtcgatcctggtcaacaaaaattcgattcccaaacccataagaaagaaactgggattgtagtcgcatatgattcacagaacgatccaccctgccggactcggttccggcagggtggatttcgtttacaatatgcggagtgaaggcgggcggtgcagcgccggcacacgcgcacagccactatacgatccctatctccgcactctcgaaaaactccgtccgaaggtaggtgcccattctgtacaccgaagtatggttgaacatatagctgcgcttcaacgccttttcgatatcgaacatgtcgctcatgcaggcgcgctcgatagccagatagaattggatagtatcgttgttgagatcgtcgtcgaggaaatagagtccgcgtatcatctcctggtagctcgtaccctgggagctgcactggcgcgccttggcgaacgagtgtatcacattctcgaccagatagttcaaattcgacagtgcacggtgcctgtgcaggaaatcgctgtcgaacaacgcatgcagcgagcgtcggcgcgcggcatcggccgagtcgtcgcccaaatcgaagcgctcgtactcggcatcgtacctgacggggtcgtaaccgcagatgtcacagagggcatcgagcagcgactgcgccactgccagatcgtaataggctctgcctctgaacgaatggttgaacagcagcgtattctgcatcggcgcgagcgtctggatgatatacgacgtattcttcacggctccggctacgatcgctttgagcaattcgaagcggtactcccgctcggagagctcctgcaacggcacctcgggctccatgctgctgcgtatgaagtcgggcacaacggcatgatcatcctccaaaaaactctttaccgaccgcttcgccgagcggaaataatcggccggggcgcccgggccggcacacagaagcgtgtcgatgaaatagcggtacgtcttggccgcggactgatatctggtaactatgttggtcaacgtactgttgtagatatcctcatgcaacagattcttgcggacgaaacccgtaatggccgcatccccgccgctgtcgggcaatccggcagccctgcggaaccggtggcacagcagcacgaagcgcacatatatattctgcatctcctcgatgctcggatagagggagagatgatctgcgaaatctctcggatcggactgcctgagaatgcgtcctatattggtaatctccgaaaagttgacatgttcgtactgcctgaattgagtcattataaaacgtcgggtaaggaaatcggcgatctcttgcagatgatttaccaaatcgatattctgcacaaaaccctctcttcgcctgtctgcgtcttcttctttcgatagcacctctattgcaccgttgatataataattgacgacgtgcataatctctttatagcaccgtccggcaagatcgcgctcgcacgacgaaccgtataacttggatgccgcccaatagcagatcatcgccctatgaaccgaaaacttcggccacttcgacctcttgaaatcatctattatatattgtttcagctcggacagctcgccaatattctcattgcggaaactcaatctcgtcaatacctgaaaatgggtatgccctatgctttccaacaatatcgcaagattatacataagtatatccggattaacgttagagaggaaatttatcttatcgtcctcgactttcagacacagctcgacgaccttatccagcattatcgaggactccgttccacgctcgcctctttcattgagtcccaatggtttcagcagctccttcattccgttcatatatgaagactgcgcactatacttgcccaatgagacatttttataataaagtatatcgcccagcttgcggaagaagtcggccatgactatgatgttcgcatcatcatcgacggacaacttgtcgtaggagtaggtgccgcagcagccgtttcgcgacatcaatcggccgaacgaggttatcgcctcctcgatatgcacctccctgatgcccgtcgtatcgagtttctcgataacgttgagccgggcgagcacgcccaggtgcattgtgcggttgtcgcggaaaagggtgtgtatcatcggattctcgcgcttgatcgctaaaagatgatccgtcagatcgttgtagacggcgtaggcagagttgtcggtatgccgcttctcgtgtgccagaccgagtttgagcatcgttcggttgtagaacagcacgtagttctggaattgctcgtgcctcggatcgtggtttttcagaaacaccgacaccagctcgacacacttttcatagtgacgtatagccaccgagaagttctcctcctgcatgtagacatcgcccagcgagtggtttatggccgccgtgacataacggtcggggtcgggcatctgtttttcgagcgtcgaataatacagcttcttgatcggctgcaactcgtcgagcgagaagttgaacagcgccgagaactcttccgacagcttcgagaagaaagatatctcctcggcgaaccgcgacggaaacttgtactggtagaggccgcacgaaatagtggtcagaagcgtatggttgagatactttatcagcatcgcgatattgtcgcgtatctcgggcgagtggttgatctccaagatctcgggcgtgtgttcgaggttacgccacgaaaaaccgccctggtgcattttgaatatatgccccagaagaaacgaatccgacacctgcaacttgtcgccgaagatcgtcgagcggctcattatattctgcaacaccggataggcgatataatggacgaagttgatcttcatctggctgttgtagccgaacgacagccagaactctccgccagcggacgtatcggccgctttcagtcgttcggtctgtacgaggtagcgcgcctcgcagacataacgttcgaagaaggttgtgatcttcttgggcgagccgttgctgatgaaggcgaggtagctgacgaagtggtagagaaagaccacctcgcgatcgaggcgtttccggtcgcacgccgcctcggcagccagtctgtaatcgcgatagtcgcgcagcgacaatccgggggcaggcttgcctgccgacggcggccggctgtaccgttcgggcaggatctgccggcagacgaactcctcggtataggcgatagagtcgtgaacatacggatgcgagtaaaagctgtcgacgttgagtatgccgttgaagatattgctgatcgagaagtcgcgatcggaaagatcggccatagaggcttcgaacagctcgcggccggcgatgaagatgaaataggcatcggccgtcgagaggaaatatttcatgttcgcaatcacgttcagcacctgcatgcggcgcaagcgggaggtagtgtgctgctcgggccgggtggataccttctcgaactcgggcactccgccgctatcgtccggcttgggcgacagaggttcggtcttatccagctcgtcgagcactatgatgaccttgcgtcgcttatactgcgccagaatctgcgtgagctcgtattcgatctcctgaatatcggccaccagcagctccatgtcctgcgatatcgtaccggcgggaaactggtcgacgcccgcccttaccgaccgcctgtaagtggtcttgcggttgaatcgggcgcagagcctctccaaccggtctatcgccctgaacgagttgaagaacagacgcaggaatttctgaaaggcatacgcaagaaccgagaccgacgacaaaccgatcatcgtccactccacgatccacactatcctgcgctccgtcgtttcctgccccatgtccgatgcgacgaagagcagcgccaccgtaagtatgcacatccacagaatatggtaggcatgcgactcgcatatatccatgatctgataccagcgaaaaccgaagcgcttgaacgacacggtgtctattatggcgttgtgcaggttcttggctatgatctgcaagatgttcagctcgttgatattctcctgacctatattgacgcatacgtcgatatatttgcgcttgtgctcttttttcagccgtccgaccaccgcgcccacaaggctcgatttgcctacaccgcgatagcccgacaccagataagtgccgtgacgattggggctgagcagccagttgcgcagcgtgttctcgggcttgtcgcgatgaatgtacttcgaatcctcgcgaccgggattcgtagcacgatgaaagaaattgaaattttcgagcctgatgttgatatacgtgttcagatccttcttcatcactatcactttcagatcaatgcaacatagagacgaaagccggcaaacaggcgatcatcaataccatatacatccaacgcgcatagcggtattgaggcacggacttatcggattcgtccagcaaggagatcatattcgcgaacgatttccaaacatacgcacaacccgggatgaacaagacgacgagacccgatacgattgctatcgcggcaatgctgcggcagcagtcgctatcgatcctacaccaatagtccgacagcaagagagccgccgggacacaaatgaaaaaatagactgcaacggctatgcggatgtcggccatagctctgtcgatagtacggcatatgagcctggacttctccgccctgctgtaatcgctgctcaaccggtcgagcccggatctgagagtaatatcttttttaacattcagctcgtcgatgattcttacctgaatgggacagtccgatttatgcactaccggatcggccagatcgaccttgcactcgcttttcttaacctcggcagtcgtcgctgccgacgacgaagcggcgggcgagccgaaagccgcagcattcgtttgcacgcccgtagcgccggactgcgccgaattattcgtggtcatgtcgtaaatggtttaggttaacagttatacaaagttaataaacgaccgtacaataaacaatttaatagttgcattatacgggctgcaacgccctttgcggcaaacctatccgccgatcggcagcggcatcgggcaataatccgcagagataaacgttatatatcaaatagcgactgaattatgaccaaagcagcgaccattgcactgaccatgttatgttcgggcttcattacccggcaagcgcccgggcaggtgctcgggcaggtgcagagtccccggagcatatcgtcggagatcatgcttgccgaggccgatacggcggcaatggccgtcttggagcgttatgccgcgcaggcggccgacgcctcgatgccgcatacgacgccgctcgcctcaggcctgcgtgccgtcacgcccgacatcgagtcgtggcatccgtcaggacatctgctgccgctggggctgcggcgcagcatagcctccgatatgccggccgcgatacgagtcgcaccgccgcgcctgccggatatgaagaagttacactggaagccctcggagaacttttcgataacgatcagcaacggcagcgccggcaactacatgccgtggcccaactgcccgataggttatctcgacgcacggacgctgtcgtttccgctgccgcgataacgccccccgacggcggcatattcatatttttcccgctcgcgccgcaacgtaacggttttttgagtatctttgcacgttgcagttacgttttgcgacgaacgaacccgaacgatataaaaacgatatacgaaatggcagttgaattgaaagatctgacccgcagcgaggagaattattcgcagtggtacaacgatttggtcgtcaaggccggtctggccgagaactcggccgtgcgcggctgcatggtcatcaagccctacggctacgctatatgggagaagatgcacgatgcgctggacaagatgttcaaacagacgggacaccagaacgcatactttcctcttttcattcccaagtcgtacttctcgaaggaggcgcaccacgtagagggcttcgccaaggagtgcgccgtagtaacgcactaccgcttgaagaacgaccccgacggcaacggcgtcatcgtcgatccggccgccaagctcgaagaggagctgatcgtgcgccccacatccgagaccatcatctggaacacctacaagaattggatcacgtcgtaccgagacctgcctatcctgtgcaaccagtgggccaacgtcgtgcgctgggagatgcgtacgcgtctgttcctcagaacggccgagttcctctggcaggagggacacacggcgcacgccacgcgcgaggaggctatcgaggaggcgacgaagatgatcggcgtatacaagcagttcgcagaggagtatatgggcgtgcccgtgatcgtgggtcacaagtcgcccaacgagcgcttcgccggtgcggaggatacgctcactatcgaggcgctgatgcaggacggcaaggcgttgcagagcggtacgtcgcacttcctcggccagaacttcgccaaggcattcgacgtgcagtataccaacaaggagggcaagttggagtatgtatgggcaacctcgtggggcgtgtcgacacgtcttatgggcgctcttatcatggcgcactcggacaacaacggtctggtgctgccgcccaagctcgcacccatacaggtagtcatgatacctatctaccgcggcgaggagcagcgtcagcaggtcgtagagcgcttcgagcagatagcacgcgagctggaatcgcgaggcgtaagcgtgaagatcgacgccagagacaacgtccgctcgggcttcaagttcgccgactacgagcttaaaggcgtgcccgtacgtctcgcgctgggtccgcgcgatctggaaaacggcacggtcgagctgatgcgtcgcgacacgctcgaaaagagcaccgtcgagcagcagggcctcgaagagcgtatcgtagccatactcgacgacatgcagaagaacatattccgcaaggcgctcgactaccgcgactcgatggtcacgcgcgtcgacacctgggacgagttcgtcgagacgctcaacaacaagggcggcttcatctcggcgcactgggacggcacggttgagacggaggtcgcgatcaaggaggccaccaaggccaccatacgctgtattccgctcgacgcggtacccgaggagggcgcatgcgtctattcgggcaaaccgtcgcactgccgcgtgctgttcgcccgcagctattgatcgggacacatgtcgacaagagataacagagaatcggtcatttaccgcgtaacctgggtcgggttggcggtaaatgtcgttttatccgcagccaagatcctcgccggcatcctcggccgcagcggcgccatggtggccgacggcgtgcactcgctctcggatatgtttaccgatatcgtcgtgctggccttcacacggctctcgtcgaaacccgaagacgacgaccacaactacggacacggcaagtacgagacgctggcgacgatcataatatcgctcgccctgctggccgtcggagggatgatcctctacgacagcatacgcaacatagtgctgatagcccaaggcggcaccctgccgcgcccgcatgccgtggcactcgcggcagccgtgctgtcgatcgcggtcaaggagatactctaccgctacacgatacgcgccgcacgccgcaccgactcggccgccttgcaggccaacgcgtggcaccaccgcagcgacgcgctctcgtcggccggcacgaccctcggcatagcgctggcattctttctgggcgagggttggcgcatagccgacccgatagccgcagcggcggtatcgctgttcatattcaagatagccgtcgatctggcgcgcagctcgctgggcgacctgctcgaacggtcgctgccgcgcgaggagaacgaccgcatactgcgcatcgtatgcaacgacccgcgcgtgagatcgcctcacaggctgcgtacgcgccgcataggcgccaatatatcgatcgaggtgcacatacgtctcgacggcaggatgagcgtcgacgagtcgcacgccataaccaagtccatcgagcacgatctgagagagcgttacggcgccggcacgataagctcgatacacgtcgagccgatcaagcgcgattagccgcgcccgacggcggccgagcatcggatcggcggatcggactatacatatatcctcagccgctctgcggcacgcgatttgaagaagtcgtggcgagttatggagtgaaatgaataacgatacggcaatctgaaaattttgtcgtttccgaaattatttctatcttgcactcagaaacgacaaaatattgacacttaaaaacgtattgcctatcgaagaaattctgctcttgtaactgattttatagaggaaagagtatgaacgtgaatgtattaagcgacaagatgctgcttaatagctatctttcgggcgatagaagtgcaatgtcccaactcatagagcgtcactcgcgccgcgtccgcgactacatccgtatgatggtcaaggacaacgacgtagccgacgatatccaccaggaaacctttatcaaagccgtccgcgttatcgacgaaggtcgatatacggactcgggcaagttcctctcatgggtgctccgcatagcgcacaatcgcgtgctcgattattttcgcgctcagaagcagtccaagcaggtcaacgagtccgaagcgggatacaatatattgggtacgatgcggttcgcagagcctacggtcgaagacgagatggtaagccgtcagatcgaagacgacgtaaggcggctgatcgagcttctgcccgacgaacagcggcaggtcgtaatgatgcgatactactccaagatgagttttcaggagatagcggatcagaccgacgtcagcatcaacaccgcgctgggtcgtatgcgctacgctttgataaatctccgtcgaatgataaaggagaaaaatctggttttgagctgatgcgtgcacaatataaatcgccgacactccgttttatagttgtaacaaccttataaacgagtgcctatgggagatatcgacgagaaagcatcacgatccgtctccgaggaggagatgctctacgacggtgttattcagggcgatgccgagttattctacatcgactgctacctgtcggagcttttccggggagaactaagggttaatttttgaagtggaggagatcgcctgaggcggtctcctttttcgttgcgcccggcagaatgccggccgatatacataaaaaaagctcccaccgaagcgggagacataggtaaaaaccttcggcatatagccttattgtggtaagatgtagaatttcttacaatacaaagatagtgaaatattgtggaaaacaaataattttcactaaatttacctatctaacccgaaaattatggaaaaggtattgggactcgatctgggtacgaactcgatcggctgggctataatccaacgcgaaggcgactgctgcacgcttatagataagggagtcagcatatttcaggagggtgtagcgcgtgaacagggagctgagaagcccgccgtccagacgcgcaccgacgcccgcgcactgcgcagagcataccgcaggcgccgcaagcgcaagatcgacctgctcagagtgctcgtcgaccacgagctgtgtccgccgcttactcacgagcagctcgacctctggctgcaaaagaaaagatatccgctcgacgaggcgtttctggcgtggcagcgcaccgacgaggagaccggccgcaacccataccgcgaccgttatcgcgccctgagcgagcagctcgaccttaccggcgaaaaggggcgctacacgctcggccgcgctctataccatatcgcacagcggcggggctttctgagcaaccggcgcgacaataccgccgagagcgacggcaaggtcaagcagggcatagactcgctcacggaggcgatgaaggctgccggctgccggtatttgggcgaatacttctatatgctatacggcaagggcgagaagatacgcaaccattacacctcgcgcaacgaccactaccgcgccgagttcgacgccatatgcagccgtcagcagttggacccgacgctgaccgacaagctgcgccgtgcgatattctaccagcggccgctcaaatcgcaaaagggaacggtcggcaaatgcaccttcgagaagggcaagagccgctgccccctgtcgcacccgcgcttcgaggagttccgcatgttatctttcatcaataacatccgcataacgacaccctacgacttcggcgcgagccgccctctcaacgaagaggagcgcgcggctgccatacgcatgttcatgcgcaagagcaagccgacgttcgatttcgaggatatagccaaggctctggccggacgcaagaggtcatacgcctacgaggaagatgccggcgaggctccataccgcttcaactaccgcatgtcgacctccgtgtcgggatgtccgacaacggctgcactcgcagatatattcggcgaggactgggtatcgggcatttgcagcctctacacgcgcgccgagggcaagaccaaggagcgaatcgtggacgacgtatggcacgtgctcttctcgttcgacgacgatgacaagctgcgtcagtgggctgccgagcggctgcaactgtccgaggcagatgccgagaagttcgccgccataactcccaagcagggatatgccgcactgagcctcaacgccatagacaagatactgccctacctgcgcgccggccgccgttacgacgaggcggtattctgcgccaatatcaaggccgccgtaccggccgaggtgcggagcgacgagcagctgctcggcaggataacggacgaagtgtcccggatcgtggccgacttcaagcccgacccgaccataaaggccgacacgaagcagagccgcatagagggctgcatgagggagcacggcatcgaggccgatatgaaaaaactatatcatccgtcgatgatcgagacttaccgcaaagccgaggccggagacgacggcctcgtgcagttgggctcgccgcgtacatcgtcggtgcgcaaccccatggcgatgcgtgcgctgttccgcatgcgcgcgctgctcaaccggctgctgcgcgaggggcgcatagaccccatgaccaagatcaatatcgagttcgcccgcgggctcaacgatgccaacaagcgcaaggccatagagcagtggcaacgcgagcgggagaaagagaacaagcgatatgcccaagagatacgcaagctctacgaggaacagacgggcagtccgacagagccctccgaggaggatattctcaaatacagactatacgaggagcaaaaccacatatgtctctacacgggacggcagataagtataaccgactttatcggctcctcggcgtcgtgcgacatcgagcacaccctgccccgctcgcgcggcggcgacgactcgcagatgaacaagacgctgtgcgacaaccgcttcaaccgcgagacgaaatgctcgaagctgccctcggagctctccgagcacagcgacgtcatggcacgcatagagcaactcgggtggaaacagcggatcgacgatctgcacaagcagatcgaaacggcatcgcgccgcagcaaaaatgcgacgaccaaggaggataaggacaaggcgatacagcatcgccacaagctgcgcatgcagctcgactactggcagggcaagtacgagcgcttcactatgacagaggtgcccgaggggttcgccaaccgtcagggtgtcgacatcggaatcataggacgttatgcacggctctatcttaaaagcgtattcgagcgcatatatacggtcaagggtgcgaccactgcggcattcagaaagatgtggggcttgcaggaggaggattcggagaaggagcgcacgaaccacgcccaccactgcatcgacgccataacgatagcctgcatcggccgtaacgagtacgaccgctgggcgcagtatgcagcccaagaggagtactaccgccgctgcgagggtgtcaagccctcgttcgataagccgtggccgacctttaccgaggatgtcagggccgtagccgacgagctgctcgtagcgcactcgacgccggacaacatgtcgaaacccacgaaaaagaggctgcgcaaacgcggccgcatagtatccggcgacgaccgccggccgatcatcgtcacgggcgacagcgcacgcgcctcgctgcacaaggatacgttctacggtgcgatcaagcgcgacgacgagataaaatatgtagttcgcaaagcactgaccgacctcgacgaaaaggatatcgacaagatcgtcgacgaggcggtaagggcgcgcgtcagagatgccgtcgagcgtatggacttcacgcaggccttagcgggcacgatatggatgaatgagcagaagaggatcccgatcaagcgtgtcagaattttcgcgcctaccgttaccgctcccataaagctcaaagagcaccgcgacctgtcgaagaaagagcacaaacaccattatcatgtcgtcaacgacggcaactactgtatggccatatacgaggggcaggacaaaaagggcaggaccaaacgttcgttcgagatcgtcgacaacctcgaagcggccgaatacttcaaggcgagtgccgaccgcagcgaacgcctcgatctggtaccgcggtccgacgcctgcggcaacccgctgagatgtatattgaagacgggcacaatggtgctcttctatgaaaactcgcccgaggagctctacgactgctctaagcgggagctggccaagaggctgtacaaacttacccaattcagcactctgaggattggaaataacagttatggaattatagttttcaggcatcatcaagaggccagaccggcgagcgagttgaagccgaaaaacggagtgtggaagatcggcgaagagtacagaccattgatacgcatactccacacccagttcaacgctttggtcgaaggcagcgatttcgagttgaccgtaacgggagagataatattcaaacaccgcagccatgattaaacgtgcactgttcttttcgacgccttattgtctgagtcttaaaaactcccagatgataataaatacgcgggagatgcccgagatgaagcgcagtgtgccgatcgaggatatcggctgcgtcgtgctcgaacaccagcagacgacgataacgctgccgctgctgaatgcactgtccgacaacaacgtagccgtaatactctgcggcgacaaccgcatgcccaacgccatgcttatgaacctcgattcgaactcgacgcagggcgagagctaccgcgcccagatcgaggcgagcgagccgctgaaaaaggggctgtggcgtcaggtcgtcgaggccaagatccgcaatcaggcggcgctgttggagtcgctcggccgcgagggcgacatcctcaaaccatactggatgaatgtcaaaagcggcgatgcggacaatcgcgagggcatcgcagccaagctctactggccggcgctcttcgggcgcagcttcgtgcggcatcgcgagggcgatgctcccaactcgatgctcaattacggatattcgattttgcgggcggccgttgcgcgcgccctcatgggttcggggctgtttccggcgctcggaatattccaccgcaaccggtacaacgcatttccgctggccgacgatataatggagccttatcgtccgttcgtcgaccgaatcgtataccggctctacgacgagggacgtcgcgaaccagacaaagatgtcaaggccgagctgctcagagtgctctacaccgacacccgtttcgagaagaccatgcggccgctcgacatcgctctgacgtttacctcatcgtcgctggccgcctgcttcgccggcacgcgcaagaaaatcgcctaccccatactggaatagtatgtccgagctgcgactcaacgcctaccgaatcatgtggttgttcgtctttttcgatctgccgaccaataccaaggccgagcgtcgccatgcggcacagttccgcaaggcgctggaaaaagacggcttcacgatgatgcagtactcggtctacgtgcgtcactgcgcatcgaaggagaacatggccgtacacctcaaccgcgtgcgcaagtcgatgccgccgtcgggctacacgagcatactgagcgtcacggacaagcagtacggcgagatacgcaatttctggggacatgtcgagcaaaaacgcgccggcatgccgcagcagctggaatttttctgactattcctcagattcccgcggcgccgcatgacgattgccgatagggattatcgctttcggtcagagcttttcctatattcgattcggcgaagccgaatatactcccgccaggcaaaatgcaaacaagtttgcttttgccaacgcttatgcctatatttgacatcgtcgaatatacttccactcggcaaaatgcaagtaaacttgcttttgcgctcgcttattagtatatttgtacgtagaatacgaaattcgcatcataacctcttcgccggagtgcggacatacggttttcggcaaatgcaattaccgcgtaaacgccgcataaccaacgcataatccgcccgacgttgtggtttgatgtagattaaagatataatacaaccgaatgcgtcaagagcagcgaaaaatatatgttgtggtttgatgtagattaaagatataatacaacgaatactgtaacatgcattcgataaactatgttgtggtttgatgtagattaaagatataatacaacgtcaataagagcgatgaacgaatcgataacgttgtggtttgatgtagattaaagatataatacaacgtcaataaaaattaaatgtcaagagccgtcgttgtggtttgatgtagattaaagatataatacaactgcggaaaatgtatagaatgcagaaaacaggttgtggtttgatgtagattaaagatataatacaacaatactgtaacatacactcgatcaactatgttgtggtttgatgtagattaaagatataatacaacaccatatgcgaggatgatgcgatccatcgagttgtggtttgatgtagattaaagatataatacaactttgtccgttcttgccattttgcgaaacagttgtggtttgatgtagattaaagatataatacaacgagccgtatttcagacggctcaaccacaaagttgtggtttgatgtagattaaagatataatacaaccttggctccaagaaaatgcctattgctatagttgtggtttgatgtagattaaagatataatacaacgtttctcaaacgcgacacgttggatatatcgttgtggtttgatgtagattaaagatataatacaacataaaccccattctctgcgagcgtttccctgttgtggtttgatgtagattaaagatataatacaacctggcgcgcttcggcgcgccttttgttttggttgtggtttgatgtagattaaagatataatacaaccaaatataaaccaaagtcggagccaaagtcgttgtggtttgatgtagattaaagatataatacaacatgaggttggagcttctatagaggggaacggttgtggtttgatgtagattaaagatataatacaacccagccatatacaagcggcaacgctgaaccgttgtggtttgatgtagattaaagatataatacaacgattgaggggtatccgctcgcaaccttgcgttgtggtttgatgtagattaaagatataatacaaccgactatattataatgcggtaatgtatcagttgtggtttgatgtagattaaagatataatacaacacaaaatcggctttactgtattgcttcatagttgtggtttgatgtagattaaagatataatacaacgccgacgctgcacagccgcttctgctgtgcggttgtggtttgatgtagattaaagatataatacaacaggaactacgggcaccctgcccgtgctgttgttgtggtttgatgtagattaaagatataatacaacgggaaacaatcgcttgatttctttcttcctgttgtggtttgatgtagattaaagatataatacaacttccacaagggcatcgaggagcacgagttagttgtggtttgatgtagattaaagatataatacaacatgcgccagaacatctatatggtgctgtcggttgtggtttgatgtagattaaagatataatacaacgcatttgcgcgttatctcgacatcccgggggttgtggtttgatgtagattaaagatataatacaacgcgagggcacaacgccctcaacgcctgcgagttgtggtttgatgtagattaaagatataatacaacgaagcggcatgcaacgcgcttaaatctgccgttgtggtttgatgtagattaaagatataatacaacacaactcgccgaagttgcacccctcgccgagttgtggtttgatgtagattaaagatataatacaacagatattagaacgtctgcgcgagtacaaggttgtggtttgatgtagattaaagatataatacaacctgcgaccgaatcgaccgctgggggcaaagttgtggtttgatgtagattaaagatataatacaacttgtcggctggctgaagacgctcgcaacgtgttgtggtttgatgtagattaaagatataatacaaccgcaagaccctcgtaagagccatgcgcaagttgtggtttgatgtagattaaagatataatacaacaatcactgttaaaagtcctcggcaacgcctgttgtggtttgatgtagattaaagatataatacaacaattttctgacgtcttaaaatcttgtcccagttgtggtttgatgtagattaaagatataatacaacatattctcgaccagtatacagcgatcaagagttgtggtttgatgtagattaaagatataatacaacgtaggctgctcgaaagatcagattctcgccgttgtggtttgatgtagattaaagatataatacaacctgttgcgatgttggcacagtaccctgcctgttgtggtttgatgtagattaaagatataatacaacggtactcaatttctccgccgcacgcgttaagttgtggtttgatgtagattaaagatataatacaaccttgtgccagtcgtccattgtttttatctgttgtggtttgatgtagattaaagatataatacaacattgcaaggcgaagaatgtccgcgaagcagttgtggtttgatgtagattaaagatataatacaactttttctccctcccttcgctttcttcgactgttgtggtttgatgtagattaaagatataatacaacggaagttttcatacgtcactttccaaacttgttgtggtttgatgtagattaaagatataatacaacggctaggtgtgggaggtaagatggaagtgggttgtggtttgatgtagattaaagatataatacaacgccgaacgccaaaaatcacggttgtccgccgttgtggtttgatgtagattaaagatataatacaacagttctctgacgtccattcccgagggattgttgtggtttgatgtagattaaagatataatacaaccgccgggtgtcgtgcttgtggcgaagcgcaagttgtggtttgatgtagattaaagatataatacaaccgacgacttcgatatattcatatatactccgttgtggtttgatgtagattaaagatataatacaactacactatggacgatatcgccgagatcgagttgtggtgtgatgtagatcgaagacatataacaaccgtgcgacattggcaatgtcttttcagttgtggctcgatgtagaataatatactcggtaaagtgataaaatttgtcacgatatcgcttgcggcgaatgtcgtcggcagggacatcgaaataatgcttaatcgctacaagatcgagcgatagctatccggcaggagccaacatcttcggctatgaccaacacacattgcagacatgagcacaagttcagtatcgggcagttgcggcatgctttttagagttaatcgcaatcgtcaacactccggtttgcggccggtgcggtaagacaagacgtcatctgcggcagagtctcggcagcgccgagccgagcacaagatatcgcgcgcagatcgttaccgagcacacgagccgtcaaaacaatagcacactgcatatcaacacaaaactgcataagtacatcacgatatgcggcaaggctggaaggagccgcaagacgtaaaatttggttgcgtggcgaaaaagcgtttactttgcagtatgggtctcgcattcgacatagcacgacgcctcgcccgtcccgggcgcagcgataccaataggcagggcaagcgcacccgccgctcggtcatggagcgcgtagccgtatgggctacggccgtgagcgtagccgtggtaatgattacgctgtcggttgtcgcgggcttcaagcacgacctgcgcgcagtgctgaccggtgccgcagcgagcgtgtcggttacctcgccccagagccgcggcgtgatatcgcgcataggcatcgacatcgacgagcgtctcgaacgtctgctgctgtcgcagcacgacgtgtgcatctcgcgctttacatcaaaggagggtgtcataaagaacgatgacaacatggccggcacgctgttgaagggtgtcgacacgctctacgactggtcctttttcgccgaccgcctcacggcaggacgcctgccgcgcataggcggccagacgcgcacgaaagatctgctgctctcggaggatatggcgcgcagaatggatatcggcgtcgactcgcgcgtagagatgatcttcgtcgacgacaacggcgaggtgcgccgcgaccgcttcgcggtgtcggggctctactccaccggcgtggagatgatcgatgcggcggtgctgctgaccgacatgcgcaacgtgcagcggctctgcgactggccgcaggagcatatcacgggctacgaaatatggtgcgacgacccctatcgcgccgtctctgtcgccgactcgctcaacgaggctcttacggagctatacctcgacgagggcatcgatgccgaggccttttcgatcgaggcgatatatcccgagatattcggctggctggccacgcacgacgtcaacgccgccgtcatgatagccataatgatcgtggtggcgcttctcaacatgaccaccgcaatgctgatactcgtgctcgaacgctcgcgcatgataggcgagctgcgagccatgggcatgaccaacttcgctgtggggcgcgtcttcttctggcgagcggcattcatcgcactgagcggcaccgcgcgcggcgccgtcgccggcatcgtcatctgtgcgctgcaatactacacgggactggttacgctgccctcggacggatacttcctcacgcaggtgccggtggcattctgctggggggcgtggggagcatcgctcgccggcgcaatgctcgtcatcatggcggccatggcgctgcccgcggcattcgtctcgcgcatatcgcccgccgagaccatacgttacatataactgaccgaacgaacaaaaccacgaaacatgaaaccatacgacaacgaacagaccaagaaacagcaggtcgagcggatgttcgacaacatagctccgacatacgacggtctgaaccacatactctctctgaacatcgaccggctgtggcgccgccgcgttgtgaggatcgtgcgccgcaccggcgccaagcgcatcatggatatggccacgggcacgggcgatctggccgtggcgctggccaaacatatcgacggctcgcatatcctcggcgtcgacctctcggaaaagatgctcgacgtggcgcgcgagaagatacgccgtcagggactcgacgagcgcatcgtgctgcaacagggcgatgccgagcagctcgacgacatggccgccgggtcgctcgatgcggtaaccgtcgcattcggcgtgcgcaatttcgagaatttggccgcaggtttgcagcagctgtgccggacgatacgcccgcggggcacgctggtggtattggagttctcgacgccgcgcaacagagtcgtgcgctggctctactcgcagtactcgcaccggctgctgccgcgcatcggcggactggtatcgaaagacagaaaggcatacgactatctgcccgagtcggtcgacgagttccccgcgccgcgcgatttcgcccgcatgcttctcgacgccggattcgcacatgtcgaccgccgttcgctgagcctcggtatcgcccacatatacattgcgcgcaaagcgcccgaaacgaaacactgatgtcattcgcaaaactctctatatcgcgcatggccctgctgctgtcgctggcagcggcgatattggccatacctgtaccggcggccgacggcggcaaggacgaatctaagatccgcttcgaagatttcactcgcacctcgcactgcacctcggcgggcatgaatctgtatgtccgcatcggcaacacctcctcgtacaacgtcatactgaaaagctgcacggccgtcattaggtgcggcggcgaggagctgatgcagatcgagctgcgcgaacgcgccgtcatacccaagcgctcgacctcggaggtgctgctgccgcttcgcttccgcgccgacaactcgatgtcgatagccgtcctgctgcggcgcatactgcaagggcgcatagacgatatgaccgtcacgatgactgcaaagtgccgtgcatcgatcatttcgaaaacattttcgatgcaaaacgttgccatgtcggaaattcttgataactttggcgtaacgatcgataacgtaaaacgattgtcggaactgctgtaatgcgcaaaatattactgatactaagcctgttgatcgtctgcgccgcgagcgccgacgcacaatacgtagcacgtttcaaatcgcgtctggccgagcgttcggcctcgggcgcgagagtcgacgtagccgaagacgactcggcggccgatgccgtgcgacagagcgacatgcgttacaggccgttgtcggtaaagggctatcgcgtggtcatattcttcgacaacggacagtacgccagcgacaaggcgcgcgccataaagagctcgttcgagcacaagtatccccacgtcaacgcctatctggtctacgagagcccctatttcaaggtatcggtcggcgactgcctctctatggaggaggccgtaatcctgatgaacgagatcgggggcgacttccccacagcctttcccaagaacgaagagatatcgctgaccgagcttactgacgtaagaagccgccgcaatacgactgccgagcaggccgaggagcaggctgccgcaaggtaatgcagccggccgcgccgcacgcatctgatcgcatagtcgcaaggcggcataacgaattaggaatatccattcgccgaaataccgacatatccctccggacgccctctattcggaatatttataccgcttttatgctgaatttgtttttggtttcttgcttattcgccgcctaatttatacatttgcggcgttaaggttacaattactcactaaactttactgttatgaagaagatttttatgctggccgttgtattcgcagccgtttctatggtggcttgcggcggtaacaaggagaagaaggctaacgctgccgagggcgaggctgctcagaccgaggtagtagatgagcaggcttgctgcggcgagtgcgagggcgcttgcgaggctgagtgctgcgaggccgagaaggagtgctgcggcgagtgctgcgaggctgaggcagaggctgtcgaggctgaggctgtcgaggctgaggttgtcgaggctgaggttgtcgaggagtaatcccggctggctgcaaaggttgaaactctttcggccttgatgcgtctcggcatagcccgaacaaatcgggcaatgctatcggctaaacgaaaatgccggcttcgatcgtaagatcggagctttttttgtacccttaactctgtgagcgcgtatgtttcgacgacctgactgcggccgtcatgggagagaaccgcggagtatcggctatgtatatacgccgcccgaatgctttgcacgccccgtcgaccgttgcatttgcccgccagcctttcattgcgaaagtttttcgtttcgattcgttgccgaaacgaaatttttacatacctttgcaacataagttcacgaaactgcaaaacctcgaaacattatgtcacaattcaaccgattccgctcgatatacacggccgacgagctgcgcgagcgtctgcgccgcatacgccacgtcgcactcgacatggacggcacgatctatatgggcatgtcgctcttctcatgcacaaagccctttctgtcgggattgaaggagctgggcatcagctattcgttccttacgaacaacccctcgaaatcgatcgacgactacctgcacaagctctcgaagctgggcatcgaagccacgcgcgaggagatgtacaccacggcgctggccacgatcgactacatcaagaccaacctgccgcaagcacgccgtctgttcctcttgggcacgccgtcgatgatctctgagttcgaaaaggcgggcttcgtctcgaccggcgacgaccccgacgatgtccccgacgcaatcgtcgcggctttcgatatgacactctcctacgaccgcctctgccgcgctgcatggtggatatcgcagggtgtgccctacatagccaccaaccccgaccgcgtatgtcccaccgaccagcgcgtcgtactggtcgactgcggctcgatatgcaaatgtctcgaacacgccacgggacgccgccccgatataacgctcggcaagcccgaccccaacatgctctcgggcatactcaaccgttacggactgcaacccgaccagatagccatggtcggcgaccgcatctacaccgacatcgaaatggcgcacaacgctgcggccatgggtgttctcgtgctctcgggcgagacgacgctcgacgtagccgataaggc

SEQ ID NO: 503 - DNA, 23663 bp, synthetic construct
  source 1..23663: mol_type = other DNA
  misc_feature 1..23663: note = Synthetic
acgcccgacggacgcctcaagggcgtggccttcgccccgggagccaacccgatgcacggccgcgacaagagcggcgccatcgcttcgctcgcctcggtggccaagatgcgttaccgcgactcgcaggacggtatttcgaacaccttctcgatcgtgcccaaatcgctcggcccgacggccggagagcgtatcgagaacctcgtgacgatgctcgacggctatttcaccaagggcgcacaccacctgaacgtcaacgtactgaaccgcgagatgctcgaagacgccatggagcaccccgagaaatatccgcagctgacgatccgcgtctcgggctacgccgtgaacttcaccaagttgagccgcgaacaccagctcgaagtcatcagccgcagcttccacgaaaggatgtaacggcttgaaaagccgcttttaggggcgggcgcaggatttgcataccggaacccggtttgcgcccgaacccccttattcaaaaacaaggaacaatcatgcttcgtgtacattcttacgaatccatgggaacattcgacgggccgggactccggctcgtcgttttcctccaaggctgcaatttccgctgtctctactgcgccaaccccgacacgatcgaggccggagcgggcacattgaccgaccctgcggagatcctgcgcatggccgtcgaccagaagcccttcttcgggcggcgcggcggcgtgaccttctcgggcggggaacccaccttccaggccgcggaactcgttccgctcgtaaagtcgttgaaggaggccggcatccacgtctgcatcgactcgaacggcggggtgtggaacccggccgtcgaggagctgctggggctggtcgacctggtgctgctggatgtgaagcaggccgattccgaacgccaccgcgccctcaccggacgcgaaaacgcgcagacgctccgcacggccgcctggctcgaagcccacggaaaacccttctggctacgctacgtgctggttccgggcatcagcgacgccgaagccgacatccgtgcgctgggcgaacgcctcggcggctacaagtcggtcgagcgggtcgaactgctcccctaccacaccctcggagtgcataagtacgaggcgatggggctggagtacaaactccgcgacgtgcgggagaacacccccgaacagctcgaccgcgccgcggccctgctgcgcgaatacttcccgacggtggtggtcaactgacccgaaggggacgtccgccggagggagtgcggacaaccaaaaatccgggacgccgcggcgaaaacgcacggcggtcccggatttttttcgtaccttcgccggaaatccatttctgcgacaatgaagaaccgacttcccgacctgaacgtcccggcccgcgaacgcatcggctgggtggacctcctgcgcgtgatcgcctgctttctggtggtcttctcccacagctgcgacgccttcgtcgccgtgttcgacaacgaccgcgccaccttcctgcaaggagcgttggcaggcagtttcgtccgggcctgcgtgccgctgttcgtgatgatgtcgggcgtgctgctgctgcccgtgcggaccggaacgggggctttctaccgcaagcggatcggccgcgtcctcctggcgctggtcttctggtcgctgacgctgcccgtgctctactacctgtatatgcgctacgtcgggacctccagcccgtcgatcgaccccgcgctgttcaccggcgaagcgacgctgcacaagatgtggaccttcgtcttcaacttctgctacgacaccacgccgctctggtatctctatatgctgataggactttatctgatcatgccgctgatcagcccgtggctcgagcgggcctcgcggcgcgagttgcagagcgtcctcgcgatctggggcctgacgctgctgctgccctacgtgaagatgctcgccccggcgctcggctacacgggcaattacggcaacacggggctttacggcgtctgcgactggaacgggttcggcacgttccactacgtctcgggcttcgccggttacctcgtgctggccttctacctcgtgaaattcccgcccgcgtggagctggcgcaggacgctggccatctgcatcccgtccttcatcatcggctacctcatcacgggactgggcttcatcaccatgcagaagcatttcccgggcaactacgcctacctcgaaatcgtctggtatttcgccggcatcaacgtctttatgatgaccgccccggtcttcatcctcgtgcagaaggccgccgcacggccccgcgcatggctctcgcggctggcgggcgcgacgttcggcatctacctctgccacttcatcttcgttcaggccggctacgacctcgtgcagcggattccgggacttcccgcgctggcgcgcatcgcgctgatcgcctgcggggccttcgccgtgagctgggcggtggtgcggctgatgcagcggtggagcgtgacgcgccggctggtagagtaatgcgctaccagcactcggccttgtctttcaattcgggaatccggtctttcgtgaagaccggatttttgatgccctgccgcttctgggccgtgtagtcggccagcagcaggaaggcctgacggcccagcagcacgatcgccgccagattgcacagcgtcatcagcgccatcgtcacatcggccaggctccatgccagatcgagcgtcgccacggatccgaagagcaccatcgcgccgaccagcagccggtagagcgtcagcgcccacggccgcggagtgatgaagcggatgttggcttcgccgtagtaataattgccgatgatcgacgaaaaggcgaacaggaagatcgccacggcgacgaacaccccgcccgcgggaccgatctcgctctccagagccgcctgcgtcagctgaatgccgttgagcgaagcgtcgggaacgcccccgaacaggatgatgaaggccgtgcaggtgcagatgacgagcgtatcggtgaagaccccgagggtctggataagtccctgcttcacggggtgcgaaacgtgggccgtggcggcgacgttcggggccgaacccataccggcctcgttgctgaaaagtccccgcttgatgccctgcatcaacgccgcgccgaccgcgccgcccagcgtctgctcccagccgaaagcgtcggcgacgatcagttccagcacttcgggcagccgcccgaggttgaacagcacgacgcccagcgccagcacgatgtaccccagcgccataatcgggacgatcacgccgctgacacgcgcaatgcgccgtatgcctccgaagatgatgagcagcgtcagcgccgtgagcacgacgcccacccacacacgatcggcgccgaaagttccctcccacgcggcgcagatcgtgttgctctgcaccgagttgaaggcgaatccgaaggtcacggagatcagcacggcgaacagcacgcccatccacctccgcccgagaccgcgttccatgtagtaggccgggccgccgatgaaagagtccctgccgcggcgtttgtaaagctgtgcgagggtcgactcgacgaaagcgctcgcggcgcccacaagggcgatgacccacatccagaagaccgcgccgggtcccccgacgacgatggccgtggcgacgcccgcgagattccccgtgccgacgcggctggccagcgacacggcgaaagcctggaacgacgagacgtgccgctcgcccttcgggccgcttccggccgactcgcccagcacgcgcatcatctcgcccagcaggcggaactgcacgccccgcgtgcgcagggtgaaccacacggcacaccccaagagcgccgcgaccagcacataggtccacagcacgtcgttcacgccgccgatccaacgggaaagagtctccatcagcatactttacacgatccgacagcaaagttaatgctaaaacgcattttccgccggacattcgccggaaagatgcggcgcggcacgaaaaaaacgccccgcctgcgcaggggcgtccgccgtcaccgcgcccgcagggtatacaccccggcccgctccgtaacggccttctgcaactccccgaggccgacttccggcccggagaactccacggcggccaccggagggtccagcgtcacgaccgccttcacgccgtcgagggtgttcagcgcatgttccacatgcatccggcaatgattgcacgtcatgccatccacgataaattcctttttcatcttttcttcggtttcaaccggttcatcatgttcacactcatcgccgatccgccggcgtttcagccgcaagctgttggccacgacgctcacgctgctcaaggccatggccgccccgccgatcatcgggtcgagcagaaacccccagaggggatagagcgccccggccgctacgggaatggcgacgaggttgtaaatgaaggcccagaagaggttctggcgaatcgtccgcacggtgagttgcgacagccggatcatctccgggattttccggaggtccgacgagaggatcgtcaccatcgcggtatccatcgcaatgtcgctcccctgccccatggcgacgctcaaatcggcctgcgcgagagccgcgctgtcgttgatcccgtcgccggccatggccaccgtccggccttcggactgcaactgccggacgaatccggccttttcgtgcggcaggacgcccgcccggaaacgggtgatcccggctttccgggccgtttcgcgcgccgaaccggcgttgtcgcccgtcagcatccagaccgtgattcccagcgcgtgcagccgggcgacggccccggccgacgagggtttcagcgcatcggcaagggcgagcacggcgagcgtccgctcctcgtcggcgaaccaaaccacggtcttcgcctcctgcatccacccttcggccagccgttgcaggcgggcgtcgggcacgatgccgtggcgggacagcagcgcgtcgttcccggcataccaggtccgcccctccgcgacgccccggacaccctgcccgggaatgctttcgaacccggtcacgggaacgtcccgctccccgccgagcgattcgacgacggcctgcgaaagcggatgccccgagcgtttttcgaggctgaacagaatccgccgcgccgtctccgacccttcggcccacgcagcgtccacgaccgacggacggccttcggtgagcgttccggtcttgtccagcaccacggcgtcgaccttccgggccacctccaggctcgcagcgtccttgacgaggatgccctgtccggcgcccctgccgatcccgaccatgagggccgtgggcgtagccagccccagcgcacaggggcacgcgatgatcagcacggtcaccagcgccagcagcccgcgggtgaagccctcctccggcgcgaagagcatccacgccgcgaaggtcagcacggcgaggacgatgatggcgggaacgaaaacgccggcgatccggtcgacggtccgctgcacgggggccttgctgccctgcgcatcccgcaccatgcggatgatccgggccagcaccgtgtcctgccccaccctgtcggtccggaaacggaacgcaccgttgccattcatcgttccggcgaacaccgccgcaccctcctgtttgcagacggggagcggttccccgctgagcatgctctcgtcgacatacgacgcgccttcggccaccgtgccgtccacggcgatgcgttcgccgggatgcacggcgaccagatccccggcgcgaagctccgcaacgggcacggagcgttcgcccgaaggggtgatcaccgtgacggttttcggttgcaggcccatcagtttcgcgatggccgtcgtcgtgccgcgcttcgcccgctcctcaagcagccgccccagcaggatgaaggcgacgatgacggccgccgactcgaaatagacgtgcggctcgatgcccctcgacagccagaattccgggaaaaacaggttgaaaaggctgaacagataggcgattccggcactgacggcaaccagcgtatccatgttggccgccccgtggcggagctgtttccaggcgttgacgaagaactcccgtcccagtccgaaaacgaccggggtggagagcgcccacacggcgtatttcacggccggagcgtccatgaacagcatgcctccggccacgatcggaagacaaagccccgccgcccaaagagtccgccgtttgagcgcccggtaatgcgccgcacgaacgtgcgccgcctcgtcctccgccgggccttccgcgtcggtcagcaggtcgtaaccggccgcctgcacggcccgcttcagcgtcccgggagagcactcccccggacggtaggccacccgcgccgtagcggaagcgtagttcacatgcgcagactcgacgcccggcaggccgttgagcgccttatcgacccggacggcgcacgaggcgcagctcatgcctgcgaccgggaacgtattcgtgatgatcttactcttttccatgggaacaaaggtaaggtcccgacacgctccgggtgttacagaattatggatatgatttatacctacacttcatccagcggtttcaggccgcgtcctttcagccggcggaattcagtgggcgacatcccggtctgggcgcggaactgggcgctgaggtgcgccacgctcgaataacggagtttgtcggcgatctcgctgacggtcaggtcgccgtaggccagcagttccttgacccgctcgatccgctgggcgaggaagtatttctcgatgctgatgccgttgacctccgaaaagagcttgctcaacgcactgtaatcacggtggcagcgttcgcgcaggtaatccgacaggttgactttcgaggcatcttcgctgtaatgcaccaattcgatcacggccgtccggatctgctcgatgaggcgcatccggctgtcgtcgatcagttcgaacccgtaggcttcgagcagtttgcggaacgcctcccgctgctcccggccgggcttctcctgcacgacgaccgttcccagtccgacatcgaggggcgtgaaccccgctttttcgagcagccgggtgacgaccagaatgcagcggttgcaaaccatgtttttgatataaaagacgttctcccgttccataaccgcattcgttttatccgtaaatataacacaaaaacgattccgtcccgccgaccgtcttccagcctttcaggttccggccgttgaaaagcgtcggccacgggacctgcgctccgacgaaggtgcagggtccccaacagtgcaagagtctctttttcctatcagtcgggcagttttgatcgtacgaatatagtctatttttttcgggtcttcagcctgttcccctgcaaaattaacctctgacccgctccgtattccgaaaaagtttcgtaacttcggcacagcaaacccatagacgaagccatgaaacatgcgcacatcctgctgctgctcccttgcggcatgctgccgccgctcgccggggcgcagcgcacggagccgcccggccggttcgacatcgcaccggaataaccaccccgaaaacaagcaaaccaaccaaaaacaaccatgaagaaaaccgcaatcaccctctttttcctgcttcaggccgcgtgtctgttttcgcagatcccccgcccggaatatccccgcccgcagttcgagcggacggactggatcaacctgaacggcgaatggacctacacgttcgatttcggcgcaagcggcctggaacgcggctacgccggctcgaagggattcgacggcaaaatcatcgtgccgttcgccccggagagcaagctctcgggcgtcggccacacggacttcataggccgcatctggtaccagcgtacgatcgacattccggcagactggtcgggacgcaacgtgatgctcaacttcggagccgtgtactacacctccgaggtgtatgtcgacggccgcttcgtcggacgccacttcggaggcagcacgtcgttctcctacgacatcaccgcattcgtgaagccgggcggcagccacagtctggtcgtcttcgccacgagcgacctgcgcagcggcaaacagactgccggcaaacagtcgctgcaatacgcctcgcacagttgcgactacacccgcacgacaggcatctggcagacggtgtggatggaggccgtggctcccgaggccctcgcacgcgtccaaatgacgaccgacatcgaccagcagcagctgatcgtcgccccgcagttcttccgggaaagcccgaacacgctccgggtgacccttcgggacggcggcaaggtcgtcggcacgcggcaggtccgggcgtcgaacagcagcgtcgtcgtcatcccggtcaaaaaggcccggctctggagtcccgaagacccgttcctctacgacctgacctacgaggtggtcgcccccgacggccaggtgctcgacgccgtgaaatcctatgtcgggatgcgcaaggtccacatcgaaggcaacaaaatctacctcaacaacgaaccctattaccagcggctggtgctcgaccagggtttctaccccgacggtatctggaccgccccgtcggacgacgccctgcgccgcgacatcgagctgggactggccgccgggttcaacggcgcacgcctgcatcagaaggttttcgaggaacgctactattactgggccgacagactcggctacatcacctggggcgaaagccccagctggggaatggatgccaacgacgtggaaacggcccgcaacttcctctccgagtgggccgaatgcgtggtccgcgaccggaaccacccctcgctgctgacgtggacgccgatgaacgaggagtggtggcccgacaacacgcagttcccgcgcttcgcctccgacgtctacgacctgacggggcgcctcgacccgacgcgccccgtcaacaccgtcagcggcggcgccgtcgtcaggaccgacatctgggccgtccacaattacgagcagaacccggccaaactgaaagagaaaatcttcagcgacggcacgttcttccatccccgcctgcggacgacccgcgaccagacgcgcaacatcggattcaacgaggtgaaggcgaccgcaaactacgcctggccgcagtacgatggctcgtgcccctacctggtcgatgaattcggcggcatcaaatgggtgaaggaccaggagaagcaggccacggattcccagaccgaatcgtggggttacggacaggcgccccgtacgctcgaagagttctacacgcggctcgaaggccaggtagacgcgctgctctcgctctccggacaggtgtggggctattgctacacccagctcacggacgtggaacaggaacagaacggcatctattgctacgaccgctcggccaagttcgccatggaccggatcaaggccattttcagcaaacgcccggaacatcccgcccgataacgcgccggacagccgcccgcccgaatgaagcgcaccccgaaaatccggaaagggatttcggggtgcgctttttatccggttcgtcatcgtccgcctgcggcaaagcctcgtgcgcgaatgcgcccgggaacagaaggcgtcgctgaatttccattcgcgtgttttcccggtttcagagtctcgatataaagtattcctgcatattccaacgatatacccttaatgaacgctgcaattggggatgcttcatgtcggtgcgtcgcacggcgagtggcggacggtccgacatgcgaccttctgttttcggcaccatgaactcccgaaggcaaaaagccacagcgccggcacactccgcaatagcaaccgacggtttttaaattattcacgaaatataaaaaaagtctccacggagtacgcggagacaataggttgaaaaccttcggcatatagccttattgtgataagatgtagaattcttacaccacaaatatagtaaaaaaagatgaatttctgcaattttttatttaattttacagaaaacactttcttcatatggcaaaagtattgggtttggaccttggcaccaactcactgggatgggcccttgtcgatgaatcggagaacgaatatacgctgattgacaaaggtgtagacattttccaggagggagttgcccgcgacaaaaacaatgaaaaacctgccgttcaggatcggacgagcgcccgggcactgcgccgccactatttccggcggcgtctgcgaaaaatcgaactgctcaaaatactcatccgttacgacctttgcccgccgttgcccgaggagctgttgaccgcctggcaaaaagagaaacgttacccgcaggacaatgaattcctccgttggcagcgaaccgacgacaatggggatcgaaatccttaccacgatcgttatgtagccctgtccgagcggctcgatctcgggaatcgcacacagcgctggctgcttggccgggcgctttatcatttggcacagcgacgcggattcctcagcaatcgcaaagaagcaggaaatgagaaagaagacggcacggtcaaggagtgtatcaaaaatctgtcggctgaaatagcagcggcagggtgtcggtacctcggagaatatttctacggactgtaccaacacaaggaacgaatccgcgacaaatacacctcgcgcaacgaacactacctggccgagttcaatgccatctgcgaccggcagcaattgcccgacgaatggcgtaaggcgctgcatcgggcaatctttttccagcgcgacctcaaatcgcagaaggggtcagtcggccgatgcaccttcgagccgacgaagagtcggtgccccgtttcgcatccccgttttgaggagttccggatgctgtcgttcgtcaacaacatccggattacaggaccgggcgacaatgctccacgacctttgacacaggaagagttcgagacgattcgttcgctcttcttccggaaaagcaagccttatttcgatttcgaagagatcgcccgcagaatcgccggcaaagggaaatatgcctgcaaagaggagcgtacagaagctccatatcgtttcaatttcgcccgcacggccaccgtatcgggatgccccgtcacggcatcgctgcaagcgatcttcggagacgactggattacggagattcgcagcctttacctgcttggagcaggaaaaaacgaggaccagatgttgaatgacgtatggcacgccctcttttcgttcaacgacgaaggtcggctgcgtagctgggcctgcgaaaaattgcaactcacggatgaacaagccaaagcgtttgcaaccatcaaactcccgcaggattacgcggcgttgagcctaaatgccatcggcaagattctggtctatctgcgctgtggctatcggtacgacgaggcggtattcctggccaacctgcgggcggcacttccgaaggaggtctatgccgacgaaagccgtcggcatgaaatcgaacaggacatcgcctcgctgctgcttgactacaagcgaaatccgtataacaagttcgattcaaaggagcaccgcattgccgactatttcagcgatcatggattggatgcctctcgtctgatgcgtctttatcatccctcgaaaatcgagacctatccggatgcgcaacccaaggcaaatggcattctgcaactcggctctccacgtactgcgaccattcgcaacccgatggccatgcgggccctgttccgattgcgcaacctgataaacacgctgttacgcgaaggcaggatcgaccgagacacgaagatccggattgaattcgcccgcggactcaatgatgcgaacaggcggaaggccatcgagcagtatcagcgggaacgggaggttgagaatcggaaatatgccgaagagatccacagccagtatgccgccgaaaccggccgcgagataaaaccctcggacgacgaagtgctgaaataccggctgtgggaagaacagcagcacgtctgtccctataccgggcggcaaatccgcatttcggacttcgtcgggtcggctccggatttcgacatcgagcacacgctcccgcaggctcgcggcggcgatgactcacagatgaacaagacgctctgcgaaaaccggttcaaccgggagacaaaacgggcgaaactgccggccgagttgtccaatcatgtcgagatcatggagcggatcgaatcgtttggttggcgggaaaaaatggagagtctgcaaaagcagattgaagcccaggttcgcaggagcaaaagcgcagcgattaaatccgaaaaggacgacgccattcagcgccgccactatttgcagatgcagctcgactactggcgcgggaaatacgaacgcttcaccatggccgagattcccgaaggattcagcaatcggcagggagtcgacatcggcatcatcggcaaatatgcacggctctatctgaagacggtttttgaccgaatctatacggtcaagggttccacgaccgccgcgttccgcaagatgtggggactgcaggaggagtatgcccgcaaggagcgcacgaaccacgtccaccactgcatcgacgccatcacgatcgcctgtatcggccgccgggagtacgaccgctgggcgcaatacgtcgccgacgaggagcgatacggctacggcgaaagcggcaaaccccgcttcgagaaaccctggccgacctttaccgaagatgtcaaggccgtggccgaagaactgctcgttgcccaccacacgcccgacaacatggccaaacagacgcgcaggaagttacgggttcgcggccggataaagctgaatgccgatggggaaccaatctaccagcaaggagacacggctcgctgccggttgcatcaggataccttctacggcgctattaagcaggatggagagatccactatgtcatccgcaaatcgctcgcgcagttacagccgacggacatcgacaagattatcgacgatgcagtccgggatcgcgtacgggaggcaatcgacgaggtcggattcaagacggcgatgaatcccgatgaatacacgatctggatgaaccgggaaaagggcattcccatccgcaaggtgcggatcttcacaccgagtgtcaaacatccgatcgcgctaaaaaaacagcgcgacctatctgcaaaagagtacaagcgggattatcatgtcgtaaatgaggggaactattgcacggtcatctatgagggccaggacaaaaagggcaaaacgaaacgcacctttgaactcgtcagcaacctcgaagctgcccaatatttcaaagccagcgctgaccgggaagcccgccccgatctggtaccgcagaccgacacgaacggtttccccttgaaatgcatcttaaaaacggggaccatggtcctgttttatgaaaataccccggcagaactttatgaatgtacccgcaaggagttggtaaaacgactgtacaaggtaacagcaatggctgcagaaggacgggtacagttcctctttcatcaggaggcccgagatcagaaaacacttacctccttatatggagctgggacctctcaattctgccaatccaatccatcaccgaaattgcgcctcagcgtttccaattttaacatgctggtggaaggttatgatttcgaactgaccgcaacgggcgagataaaattcaaagatgaccggccatgctgaaacgaaccttgtttttttcaacgccatactgtttgagcctgcgcaacgaccagatgatcatccacacgcgcgaggcccccgaccaacggaaaagcatcccgatcgaggatatcggcttcgtggtgctggaggaccaacaaacctcaatcaccctgccgttgctcaatgcactgtcggacaacaacgtggcagttatcctgtgcggagagaaccgaatgccgaacgccatgttgatgaatttggattcaaacagaacgcaaggtgaacattatcggatgcagatcgctgcatccgaaccgctgaagaagggcctttggaaacagatcgtcgaaaccaaaatccgcaaccaggctgccttgctgcggaagctggggtatgacggagacaaactgaaaccctgctacatgaatgtcaagagcgccgacgccgacaaccgggagggcatagcagcgagaatctactggtcagaactgttcggtgccgaattttaccgttcccgcgaaggttcgccgcccaacaacctgctcaattacggctatacgatcctgcgagccgccgtggcccgtgcgatcatgggctccggactgttcccagcattcgggatcttccatcggaatcgttacaactcctttccgctggccgatgacgtaatggaaccctatcgaccgtatgtcgacgaattggtctaccaactttacaggaacgggaatacacaactgaccaaaaaggtgaaaggcgaactgttgcggctcctgtttgtcgatactcgtttcgacaaggttgtgcgacctctcgaagtaggacttatgttttcagcctcttccctggctaaatgctttgctggaacccaaaaaaagattgcatatcctttattggagtagtcgaatgtcagaagtacgcttgaatgcttatcgaatcatgtggttgtttgtcttttttgatttgccaaccaatacaaaaacggaacgacgtcatgcggtgcaatttcgcaaggcgttggaaaaagatggtttcacaatgatgcagtattcagtctatgtgcgccattgtgcatcgaaggagaatatgcaggttcacattaagcgggttcgacgatcgatgcctccgacaggatttacaagtattcttgctgtaacggacaaacagtatggagacatattaaatttttggggtaaaagcgaacgagcaaaaccggaaattccgcaacaattggaatttttctgataaatcgttattttcgttctttgaaatacggaaaatgcatcaaactggcttcgtcggaacacccgatcgtatttttatagtggcagacagcccgtaagtaacactttatcaatcaatatgaggcccgacgttgtggtttgatgtagaatttcgataagatacaactccggcagaagaatatctccgtaacgaacagttgtggtttgatgtagaatttcgataagatacaaccaaactgccggtaatgacgctacgcgcgaagttgtggtttgatgtagaatttcgataagatacaacgtatagcagaataggaacgaatccacgctagttgtggtttgatgtagaatttcgataagatacaacgttcgcggaaataataggactgtcgtcgacgttgtggtttgatgtagaatttcgataagatacaactttcgtgttgtacgaattttgcgtatttttgttgtggtttgatgtagaatttcgataagatacaacgacacagattgtagaatacaccccaccaagttgtggtttgatgtagaatttcgataagatacaactctaccgagagcagggcgacgagaaggtttgttgtggtttgatgtagaatttcgataagatacaactcatgtctgtcatctcagcgatgaagatggttgtggtttgatgtagaatttcgataagatacaactttagcagattttgcggtgcacgcaatcttgttgtggtttgatgtagaatttcgataagatacaactttaaattccatggttctgctggatagccagttgtggtttgatgtagaatttcgataagatacaacagtttgcacgagaacctcgatttcagcgtcgttgtggtttgatgtagaatttcgataagatacaacgtcaagccagaagaaatattatcaccaaggttgtggtttgatgtagaatttcgataagatacaacttcaaaacagatcaggcgatcggaacgctgttgtggtttgatgtagaatttcgataagatacaacgtagtacagcggtagtacgctactggcagagttgtggtttgatgtagaatttcgataagatacaacgatgaagaagtggatacccggagcgcattgttgtggtttgatgtagaatttcgataagatacaacgaaaagcaaagtggccgagaagccggggaagttgtggtttgatgtagaatttcgataagatacaacgtatagcagaataggaagcaatccacggtagttgtggtttgatgtagaatttcgataagatacaacatgatgcggtgaaatccttgcccgtgacctgttgtggtttgatgtagaatttcgataagatacaacaagaggttgcttggtcgtggttgcgtactggttgtggtttgatgtagaatttcgataagatacaacaggaaatcgggcttattgacataaggggtagttgtggtttgatgtagaatttcgataagatacaacgaaacgtatttgtcaataaacccaaacaagttgtggtttgatgtagaatttcgataagatacaacttttacgcgtgcgtccggcgcttccggtacgttgtggtttgatgtagaatttcgataagatacaaccaaggattgatcaaaaccataaacgtatatgttgtggtttgatgtagaatttcgataagatacaacgtattgtcagggcttgcatcctgatctttagttgtggtttgatgtagaatttcgataagatacaacaatgccatgataatgggggcgaccgtggaggttgtggtttgatgtagaatttcgataagatacaacgcagaaggccatggggtggtcgaggttgctgttgtggtttgatgtagaatttcgataagatacaactcgatttgtttctcgagtatctcattctcggttgtggtttgatgtagaatttcgataagatacaactggagtcaatcgccgattgtcctccgtgaagttgtggtttgatgtagaatttcgataagatacaaccatcaccggcagtttgacgctttgcattttgttgtggtttgatgtagaatttcgataagatacaacgccttttcagtattaaccatttcctgcgccgttgtggtttgatgtagaatttcgataagatacaactgaaatatctgcgattcctccctcgccgtgttgtggtttgatgtagaatttcgataagatacaactgcggccatttcgtcggtgattagctcttggttgtggtttgatgtagaatttcgataagatacaaccggaagtcgcaccagtgggaataagacgacgttgtggtttgatgtagaatttcgataagatacaactttagctgcatttacaagacgcgcttcgtcgttgtggtttgatgtagaatttcgataagatacaacttcaagatttccgtaacactgtgagaagaagttgtggtttgatgtagaatttcgataagatacaacataaagtaaattgtatacatttgcagtgtgttgtggtttgatgtagaatttcaataagatacaaccggcagtattggaatgctgcataattgcaactgttgtttacattacccttttgactcaagaagatttcaaactcccttaaatacgtcaaatccaattcatcaaaacgcatattgaccgagcggaattgcgacacaaggaccaacgttaccttatgtttgctggcggaactgtacttttcgactttttccaagcgttcgataatctgtttgaagtactccccgaccgtgcagttgattcgtttgccgttctgttcaaacagcgtatcgaatgtaacgggaatttccagcacctccaactttttgattttcttctcgtattcacgtatcttggaggttatttgaaactgtatttctgctctatcggggcagtcggcggtaggttgttgcttgtcgaaatcccaatgcaccaaagcttccgaaatgcccagaccgacgaacttacggcggcggtcatgggtaaagacaagagcaagaggggctaaacggtttctgttgatagcgtctctgcgacatacgacgttgattgtcataatctttacggattacgcaagcaacaaaatgcgattcgtgtgttacacgattttcattagtgtcccgttaaaattgggacgaagttaatattaatcaaatagtccctccaagaggggataatcgagttctttgacatcgttgaaattagtcttttcgaagagatctctcagtggagtcttatccgttagtgagatgctcaaaatctgcaggacctcataagttgaccgctttagtcgcatgtcgtgttggacgatggcgacaaggcaataagttatgattgcagagcaaatttgtattctgacagcgttctctgtagtgccccagaatttcttaatcttgaggtgctgcttgagccacttgaagaacaactcaatctgccatcggttcttgtagagattagcaatttcgagagcggtaagatggaatgcattcgtcaaaaatgcgaagtctctgtcttgctcgtcatcgtgaaatctcacaagtcgcagcctctcaggaaacttcttctgtgtgttcacatccgtgagttcaataacggaatcagaaagcacattcttaggcaatctacgtttccatttcgtacacttgtactgtaagttcttcttcgcccgaaccacgaagtatgattcattaagacaaatcttgtagagttccttgaatgcattgtaaccacggtcaaatacgtagtaagaacctgattcatagggaatctccttcattgcctttgaatcgtgtaccgatgcagtcgtaatatggaagaaagcagaaacctgggactccagatcataaaggacatgcgccttaacgcctcctttcttcttgcggaactttgcccaccagaatactgacaagcagtgcggaatcgttgttgaatcaaatgcataaacattccccttcagcttgaagatgtcggttgctcgtttcttgcgagcctgttccatcatgaagaaggcaaagtcttcaaagatcctgtagtcacgattctgattcgctgtggcaaatgtcgttttcgctattggattacgccccattccaaggtgataacatttggattggtgagtctccaatgcaacgacaacatcacgcaggctctcacggttacagagttgtccgaacatgagtgccatgagctgattccagcaggtgaagttcttgacatacctgttcccatcatacttgtcaaccaggtgacggaacttgttgttgtcgagaaatgcaaccaattgagcgaatacatatttgtctttgttcatagagcagtccctttatgggctgcaaaattacaaattcaaatcgtcgcacatgaaaaattacttctaatagactatgtttcaactatttcaaagaccgacttgcccgcttttacgggacagtagtgcacgattttatgtatcacactctgtatcacaaacggcgatttcaaggcattttgtgttacacaacggacatctgtaacacacggtagaaaaagaaaaacgagcgataattcattgattatcactcgtttgtcgtgagcggaaaacgggactcggacccgcgacctcaaccttggcaaggttgcgctctcaagcccccaaaacgctgcgcgtttaggggtaaccaactgagctatttccttttacgacgattttctcgaatgtgttttaccatgtttttcgcattggttaaacggatggttaaacatttgcgtctgtctactggtttgtaaatgattgtattaaagaattgtttaatgggctaaaataagttctgtaacacgttctttcttgttattcattggcatagtgaatttatggttttcaaataaaaattcccgaccgttaagccgagaatttgtgtctgtctactgaaagcaaaggaaaacgccgcattttttcggccctctttccctattctttaagatacgacgcaattcaactccaaactaattgcgattatttcaaatctttggctttaatgcgcacgacttttccgtcacgcacgacaaccaattcgccgtcctctttcttggttttctcaatcagacgctttcgggcaagtagaatcccagcattgattttctcctgcatttgttttatttcaacctcgctcataatccgaaatcattttataggataacgcatcttcgacatggattgttatatctttttcacccgatgcaatgattttaatttctgcgtctgccgaactattatcgtatatcgtccagaaattacaaatcggcgtgtagagtgttataaggttcttaatgccgtttgcataacgacggcgaatgacatccgacgggatattgtgtccgccctcgcttacccgtgtcgcaacacgctcgatagcttgttcgggtgtaggtagccaaaaatagagtaaagttacaaagtagccttttgcctgcgcccgctccacaaattttacataggaacggcttgccaacgtcgtttcaaaggcaaaatccgcaccctcggcaagcaaatcatccattcgttgcaacattaaccgccctgcttcgattgctacactttcgggattgaacggcgaaagtccttttgcaatctcgtcggcattaacgaactctttacatcccagcatttcgggtaacacggtataggatgcagtcgttttccctgcaccgttacaacctgctatgatatagagtttcggcatatccttttggcaaagatagctattttcgtgctatctcccatttttcaacgaaataaaaaatcggaccaactttttcaaagggtctattataagcccccttgtcaaagtcggtcctcttggctcccacagtcctaaatattctggttgaccgtgtgacgcaattttgaaatgtgctgtttatatagcccttaaaaacaagtcactttatccatgaccaatcaaatctgtcagagcagggggaggtttgacatccatgatagtaaaacagcaatctctgaaagagcatatccagaacatcttgggttatcgtccattcgtttaacccacccatcattataaaattattatcaaaagcatcaatccattgcgcatgaaaggatggtaatggagaaaaaccagattcatctttcgtattctcccaacacagaatataatatttatcaatcaatttatatagtctggtaatataatgccagagttcacaagaagccaaatatcttccctttggccctaaatcttcaaaagcagatttataatagccatgattcaataataatgtatcttgggtaaatgctgaaatagatcccgctgcttttaaaatcaaatccttataaggactataaatttgttctattgaatctacaagcgcacagaattcgacatctttataactaatgattcttggactatgttctctaaaataattttgcgctttttctttacatctgacgaaaacacgaatcgaatctaaattttctgtttcgccattggaattccgtgtaacatcatccgatattacatcattactcggttgcatccgatttccacccccaacaatcagtagtgcaagtattagtatgcagatcttcatctattattcctttttatgtgaatattattaggaggtaaaacaagtttccatgaatattctttgattgcccctgttctactttcggctgtatcagcatcgcttttaacatggactgtcaatgtttcagggtcgaatgaatagtcgatattcatgttgcaagcatttgtacaacaaaccattatatcatacgcttgtttcctgcattcatctactatttccccgttttcattatatataagatatgttgcattatgaggttcaaatgttccattgggataaaactctgtatggtaaattatttcgccgtaatctatggtcacaatctccatataatagcaccaagagcaggtttgtcctttgtaaaaactctttatcacgtaataatcctgccctgcatggttaaattgccaaatattttcaatcaatgcgccctctcgtatattctcctgccactccttgatatgaatcttgcctattgcatcccgatattggtagtaagtcctgtatgcgccagctgtaccatcgcctgcaatctcataactgtaaaatttatatttcccatctgcggtagaattgatccttatcaccgaatccaatattggcatatcctccataaatgtcaacggattattaaggtgatggcgcagtcggttatcaaccaattcttccagccaataatcatcccaatatttaggatgattgtaccatgttttaaaaaggaaagtcagttctttatcaatccttgcactcgaattatattgtgtcgtgtcgaagctgaatgcacgcagagaatcgacaacattattgtcatggataatagaatcaatcttccttgcatggctatttccacacccaacaatcagtaaggcaaatatgggaagtaagtagggtttcataataaggtatttcattcaatatccaacttgacagttttttgctcaacctttttatatttaggaattgtttgtccatgttcttcaacctgtcccatgtaagaataaaaagtataattgatagttaaggtttgtgaatcaaattcgaggttaacatacgaatctggcccaccataaaactctacgcagccatcctttatattgtcttgaaactgtttaggataaaactcggaatggggtataaagtctccattttggattgcaacaatttcaaaatatgcttgattgtaccagtaacttataagcacataatatgtttgttcattgtgtgagaatgtatatattttgtcaatttctgcatgggaatatatcccttggctccaatcagctatttgattccatttgactcccccatttttaacgtattgcaagtaaacgctaaagaatcggccagaggagccaaaacgatcttcaaagcagtaaattttgtattttttatctggtgtatggaagattctaattccgtccgtagcttttttgagcaaactatctacttcgctattctttggattgtgttcaagtaaaggtagtgtttgattgaatgttataggtaatgatatatatttttccaactctcgctcaaaaggcgacgataattgcccaaacgtacaatagtaacacaatgacaagagcgtatcaatgtaatgaatatcgtttaatcgaggtgtttgtgttatatcgaaccgttgattctttccccacgttaaaatcaactgttttgaattaggatgttttgtcgagagataatgattgaccacttgcgaccaatccaaacgggccgaatctatgtatgggaaatattcattatcatcatgtgacagttcccgccataaggcacgatcagcaatctccctactaaatgatttaacgggtacaagtattgcagaatcgcaccgtgattgcgattgatttccgcaccctataatcagcagagcgaatatggagagtatgtaggttttcatcttaataattccactttatctcggtgacaaacttttctgaaagtatatatttatagacccttttataaaccttgtcacggttggttacaagtttcgtcgaatccgtttttgtaattctttgtctttatatccgttcttcttggctcgtttcagccagtatttcgctcgcttccaatcttgaatatcggcataatagtatgctaaatcccgttgggccatccattcatcctgttccgccgcccttaaccaccaaataacagcagaa

SEQ ID NO: 504 - DNA, 23660 bp, synthetic construct
  misc_feature 1..23660: note = Synthetic
  source 1..23660: mol_type = other DNA
ataccgagcgcttcagcaccaagccgcgccagggcaccccggtcgagggcgtaacgttcgagattaccgctccgcagatctcctccttcggcgcatccatcaactacaaggtcgccggtcccgaagtgacctggctctccttcctccaaaccaagaccaacttcgacgccgactacgagggcgatgcgtcgaaattcctcacggccgaacgcgaccgtttcgagcggacgctgatctcgcagggccgcacctggtcgaactacctgcgcaccgccaccgacttcgacgagcagtgggacattctcgactcggagaccgaatacgtgatcgtcgccgccggcatcagcgaggacggagcgatcatcaccgagccttcggccccgttcgtcttcgctaccaagaaatcgggtaccggggtggacatcgtccaggaaaccgagcacttccgtttcagcatcaccaacctgaccggcgagaagtgccgctgggcggtcgagccgctcgaaaccccgggcgaatacgattatatgtatgccgaagccatgccgctcgaggcatatcccgacgttaccggaacagacgacctcacgcagttcggcgccatcgtttccgacattttcaaccgcaatatctgccgcgagttctggtacaagcccaatcccgacaacgccatgtatctggaggcgtttgaactctattattggaagtcgttcctgaccgatcccgacggtttccccatggaatactctttccgcgaatggtcggccgaggggtacgacatgacccagcccaacatcctgatcgctttcccggtgcatccgcagaccgacttcgactggagcacattcgactgggagaacgaagtgcttccccaatccactttcggcgcaacggagtacatcgagttcacggcaccggctgccgagcccgaacccgctccgctctcgcttcccgcaagcgtgaatcccgccgaccgcttcgtttactaccgcatcatgggcaggtaggcaatacccgataaccgcaatcgataccggcagcaaaagctgccggtatttttttgtatgacggtatgaggagacggacaggcgatccgcgggcacgtcgccggatttcctaccgcaataaggcgaggatcgtgaaaaatgccagcatcaggctcgcaagaccgttgagcgtgccgaaggccagcggaatgcgagcctgtcgcccgggcgtgaccagcagatgttccgccacaagtatcgctgcgaatagcccgactccgatccacagccagacgctttgcgggcagcaggccgcgaaccacagcagcgccccgacgctcacggcatgcagcagcaggctgatgcggagcgaagcagcgacggaaaagcgggccgggatcgagcggagcccgctcgcacggtcgaaatcacgatcctgcaaggcatagatgacgtcgaatcccccgcaccaggtcatcaccagcagtgcgaggatgcagggctccggagccaggtgtcccgtcacggcgacgtaggctccgacgggtgcgatgccgagcgacaggccgagcaccagatgggccaggcaggtgaaccgtttgcaatagctgtaaaacagcaggacggcgagcgcagccggtgcgagcgccgccgtcagggggttgatggtcgcggcaaccgcgagaaacaacgcggcattgattccgacgaaccacagcgcgcgagcgggagagatgaccccggccggtatttcgcggccggccgtgcggggattccgcgcgtccagatgccggtccgcccatcggttgaagcccatggccgcattgcgggcgaagatcatgcagagcacgacctgcaccagcagccatccccaggggcgggccgtatgaaagtcggtcgtgcgcagggcatagacgaagccgatcagggcgaacggcatggcgaaaaccgtatgggcaaagcgaacgagcgaagcgtagataaggacggtattgttcatggacagcggatcgttagcggcacaaaagtaacaattatccgccaggtagcgtctttttcccgatcccaacaacagaaaatcatcgccggtcttattgcgtttccggtgaattttcgtaactttgatcgggattggaagcgtgcggaacgccgcgcccggcgacaggtgtcgggccgcgcccgaccggcgggattgtttggcgatgcgcccggtttgtattatctttgccgtcgctttgaacagactatgaaaaacattcgcaacttttgcatcatcgcgcatatcgaccacggcaagagcacccttgccgaccggctgcttgaaaagaccaacacgctcgggcagcgggagatgcaggcgcaggtgctcgacgacatggaactcgagcgcgaaaagggaatcaccatcaagagccacgccatccagatggagtacgcctcccgcgacggacagcaatacgtgctcaacctgatcgacacccccggacacgtcgatttctcctatgaagtgtcgcgcgccatcgcctcgtgcgaaggggcgttattggtcgtggacgccacgcagggcattcaggcccagaccatttccaacctctaccttgccgtcgaacacgacctgacgatcgtgcccgtgctcaataagatcgacatggattcggccatgatcgacgaagtgaaggatcaggtcgtggacctgctgggatgcaagccagaggagattctctgcgcctcgggcaaaacgggccagggagtagaggagatactcgaagccatcgtacagcgcatcccggcacccgaaggggacgaaaacgcccccttgcaggcgctcatcttcgactcggtgttcaacccgttccggggcatcatcgcctattaccgcgtcttcaacggcacgatccgcaagggcgagcacgtcaagttcttcaacacaggcagcgagtacgatgccgacgaggtgggggtgctcaagctcaagatgcaaccgcgcgacgaaatccgtgcgggcgacgtgggttacatctgctcgggcatcaagacggcgtcggaagtcaaggtcggcgacacgatcacctcggtcgaaaatccctgccgcgaagccatcgccggattcgaggaggtgaagccgatggtctttgccggcgtctatccggtcgaggccgaccagtacgaggacctcagggcttcgctcgacaagctgcggctcaacgatgcgtcgctcactttcgagcccgaaagctcgctggccctcgggttcggtttccgctgcggctttctggggctgctgcacatggagatcatccaggagcggctctaccgcgaattcgacatggacgtaatcaccaccgtgcccaacgtctcctaccgcatcaccaccacgcaggacgaggtgctcgaagtgcacaatccctcgggcctgcccgaaatcacgaaggtcgcgtcgatcgaggagccctatattctggcgcagatcatcaccaaagccgatttcctgggcaacgtgctcaagttgtgcatcgacaagcgggggttgctcaagaaccagaccttcatcacgcaggatcgcgtggaggtcaatttcgagatgcccctgtcggaaatcgtcttcgacttttacgacaaactcaagagcatatccaaggggtatgcctcgttcgactaccaccgcatcggttaccggcccagcaagctggccaagctggacatcctgctgaacggcgagccggtggacgccctttcgtcgctcatctatgccgaccatgcctacgacttcggccggcgtatgtgcgaaaaactcaaggagctcattccgcgccagcagttcgacatcgccatccaggccgccatcggcgccaagatcatcgcccgcgagacggtcaaggccgtgcgcaaggacgtgacggccaagtgctacggcggcgacatctcgcgcaagcgcaaactgctcgaaaaacagaagaaaggtaaaaaacgcatgcgtcagatcggcaacgtcgaagtgccccagtcggcgttcctggccgtgctgaaaatggattgaccgctatgaaaaagaccatcatcgacctgtttgaggaggcggtggcaaaacatgccgaccgcacgttcctgctcgaaaaaaggcacgggcatttccaatccacctcttatgccgaaacccgtcagcaagctctcgaggcgggtgccggcctcgccgggctgggcatcagggcgggcgaccgggtcgccatcctgggcgaggggagcaaccgctggatcattgccgagctgggtctgctttatgccggggccgtgagcgttccgctctcgatcaagctcgaagaggataacgacctgctgttccgcatgcaccatgccgacgtgcggacgatcttcgtatccaaataccagctacccaaaatccgacgcctgcgcgaacagctgcccgaactgcggcatatcatcgtgatgggccacactccgctggaagggggcgagctggcgtttgaaacgctcaagcgggtagggcgcgaatacctgtcggagcaccgcgaagcgttcctgtccgtcggccgcaacctgcgcaacgaggatttcgccaccatcacctacacctccggcaccacggccgatccgaagggtgtcgtgctgacccaccgcaactacacggccaacgtcgaacaggccctctcgcgaatctccatcccgccgacgttccgaacgctcatcatcctgccgctcgaccactgtttcgcgcatgtggtcggcttctacatcatgatcgcctgcggagccagcgtcgccaccgtggagacgggccgcacgccgatggagacgctcaagaacattccgctcaacatccgcgaaacgcagccccatttcctgatgaccgtacccgcactggccaagaatttccgccggaacatcgagacgtccatccgtgcgaaaggcgccgttgcggagcggatgttccgtgccggcctccgcacggcctatgcctataacggcgacggctaccgtccgggacgcggttggcgcatgttgctgcggcccgtggtcgggctcttcgacctgatggttttccggcaggtgcgcaaggctttcggcggtcggatgcagttcttcatcggcggcggagcgctgctcgacgccgagctgcagcgtttcttctacgccatcggcatcccgatgtaccagggttacggcctttcggaagcgacgcccatcatctcgaccaactccccccgacgccggatgcaccgcatcggctcgtccggcacgcccgttacccccatggacctgcgcatcctggacgaaaacggcagggagcttcccaacggcaccaaaggggaaatcgtaatccggggcgaaaacgtcatggcctgctactggaaaaatccggaggcgacccgggaaaccgtgcgcgacggatggcttcatacgggcgacctgggctacctgacggacgacggattcctgtacgtgctcggacgcttcaaaagcctgctcatcgcaagcgacggagaaaaatacagccccgaggggatggaggaggcgatagtcggcaactccgacctgatcgaccaggtcgtcgtccacaataaccagaatccctacaccgtcgccatcatcgtgcccaacgccgcagcgctccggcaacggatcgctcgcgaggggctttcgccgcaggaacagctttgcgccgcggcacggctcctgggcgcggaaatcgacaaataccgcaggggcgggccttatgccggagcgtttcccgaacggtggcttcccgtgggtatggcaatcgtcgaggagccgttcaccgaacacaacggcatgatgaacagcacgctcaaggtggtacgcggcaaagtggaagagcatttccgcgagcggatcgactatgtttatacgcccgaaggcagggagctttgtaacccccgcaacctcgagtcgcttcgcaggttgattttctcgtgaaaaacgatgcgttttcagaaatttttcctatttttgcaaacgcaatcgcggaagtagctcagtcggtagagcatcagcttcccaagctgagggtcgcgggttcgaatcccgtcttccgctccagaggccgctattcaaggcgcggcaatacagtgaaatcctcgcatcccggatgcggggatttttgtttcttccgagccgtcatacaacgatcgcctttcacccgtcctgtttcgattttcctgtcgaagcaataccgttttcccgtgcatttgttttacattcatctctcgcccgcgtaaagttgcggtcggattcggaaattaactgaccagatttattaaaatggaggggtggatgcgctaaccgcaacaagaaagggaggcatccggcccctgccacaggctcgggagggtctgttctcgcagacggcccgtttataaccagaagtcccgcccgacagcaataacgccttcgagtctgctgtaaaggacagtatggcgaagggagcataaaaaaccttccgtatgacaccggaaggttttcacacaaacattaacaatacaaacaatagcgtcgtttccttcaaatcgcgtaacgctcgttttcggttacaaagatcgtgcacgatgcgctggtatgcaatcaccgatcgccgggattgagccgcacggagctcacccaatagggtgaatccgcataaaaaatgtccggcatcatggaagccggacacctggaacgaaatcaacacgtcaccgatagatttcgttcagcagccgcgccagccgccgaccgccgcgcagaaactgctgctcgatgacgggcgtatatttggccacgtaatcataggaaatattcgtcccgggaggggtctcggcataaatttgctcgcagatcgcatgggcctccaaataccattcgagcgggccgccggcctccaccagcaccgcctcgtcgtccgtgagccggtcgatctggttctgccattcggtgtagctccatttgtgagccgcttcgggcagcgagctgtcccaggccgaatggaggttcgtatcgcggccgaacatgcgcacgggcagggtattgccgcccacatccgtcagccggcccgagtgcatcggacaatgcaggtcacccatcaggtggacgagcattttcaggtagagcgcctccttttcgggatcgaggcggccgcccctgagctcttcgacgagcatctccacagccgacaccacgtcaccgtggggattgcggggcatggtctcgaaggtgtaaccttcatcgatattggcgtaatgccacgttttggaataggcgtattccggcgtatggctggccgtgtcgagccagttggcgaaatagacgatcgaatagccgccgagcacccggtcgatccgctcggcagcctccggggtgaggttacattcggcaatatacgccgtcacatcgtgccctttggcgccccacgcccaggcattgaccgacgcaaggagactcagaaacaggatcacaaaccgcctcatcgccatcgattttaatggttcatcgtcgccaggaactcctcgttgttttccgtgaggcccatttgcttctggaggaattccatcgattctacgggggtcatatccgagaggtacttgcgcagcacccaggtgcggttcatcacatcgcgcggcagcaggaggtcctcgcgtcgcgtgcccgatgcgattacatcgacggcagggtagatgcgcttgttggaaagtttgcggtccaactgcagctccatgttgcccgtacctttgaactcctcgaagatcacttcatccattttcgagccggtgtcgatcagggccgtggcgatgatggtaagcgatcccttctcctcggtgttgcgggccgcgccgaagaagcgtttgggcttgtgcagcgcattggcgtccacaccacctgaaagcaccttgcccgaagcgggctgcaccgagttgtaggcacgggcgaggcgggtgatcgaatcgaggaaaatcaccacgtcgtgaccgcattcgaccatgcgtttggccttgtcgagcaccatttcggccaccttcacatggcgcgaagcctgctcgtcgaacgtcgaagcgacgacctccgccttgacgttgcgggccatttcggtcacctcctccggccgctcgtcgatcagcaacacaatcatgtaaacctcgggatggttgtccgcaatggcgttggcgatggattggagcagcatggtcttacccgtcttgggctgggcgacgatcaggccgcgctgtcccttgccgataggggagaaaagatcgaccacgcgggtcgaaaggttgttgtgcccgttacccgtcaggcaaaatttctcgctcgggaaaagcggcgtcatgaactcgaactgcacgcggtcgcggatatattcgggagccaggccgttgatatcggtcacgcggaccagcggaaaatacttctcgccctctttgggcggacggatcacgccggtcaccgtgtcgccgggcttgaggccgaagagcttgatctgcgacggcgagacatagatatcgtcgggcgagttgaggtagttgtagtcggccgagcggaggaaaccgtaaccgtcgggcatcacttccagcacgccctcgcccgcgatctctcccgagaaatcatccttggtgatgacctcgttatccgacatgaaaggcgcgggcgccgtctcttgttccgcgggctgtgtcgcggcctgcgacggtgcggattcgggcatgggtacgtcggcttccgcagcgggcgcggtttcgggttcgtcggcctcgagcagcaggggagcgtcgtccatcacggcggatttgggcttgcgaccgcggcgtttgggcattgtcgccggctgctccccgggcatcggagtctcgttagacggtgcgggttcgcgctcgggtttctcctcctgttcctgccggggccgcggcagcggactttccgccttgaggatgcgcggacggcgtccccgttttctttcggcgggtttctcttcctgcgggtcggtatcttgtgcggtttccggcgcggacggggtcgcagcggcgatcttgccgagcaattcgctcttcttgaccatcacctcggcaatgccgagcgatttggccatttcgcgcagttccgccaggcttttacctttgagggctgttacatcttgcataaacgattgcaatttcaatttgattttcagaccggccgatcgaccggtacgatggatttcgcatgcaaagataatgcattattttgaatttcaaaatacaaaaagaaaagagaaccttgcgattctcttttcaaacagaggggattccctccgtgtcggaccgaacaccgaactaacgggaagacttgctgcccgagttgttcctcgtgtactggttgtgaccctccggattgttgttgtgcgatccgcggctcgaagagctgttttccccacggctcgagctgctctcgccacggctggaagaaccctcgctgcgctcgctgcgctcgctgcggctggaagagttctcaccgcggctcgacgaagagctgcgacccgacgagtggctcgacgagttattggtgtactgattgtgaccttcgggattgttgccgcccggtttgctgcgaccatcctcacgacgttcgtcacgttcgttttcggaattgttggactgtctcataatgctacaattaatttaaaacatttttttgcgacgcacgccccgaacggcttcgccgcccggcactccgcccggggaacccgcgcagatgatgcttcgtgtgatccattcaagcaaaatacataccacaatagcctcaagcgaggatttacacaaccgttatgaccatttgcccgccccgggtgccgcccctccgaccgctttatttcgggatgaaaataaaaaagtctccacggagtacgcggagacacaggtaaaaaccttcggcatatagccttattgtggtaagatgtagaattcttacgggacgaatataatccgaaaatttgatagccgcaaatttttgcctatttttatctcaaaatagggcttatggcgaaaatactgggtttggatttgggcacttcatcgatcggctgggccatcgtggagcagcacgacaacggatattccctgctcgaaaagggagtggacatctttcaggagggggtcgcccgtgtgaagaacaacgaaaaaccggccgtgcaggaccggacggacgcccgcgcgctcaggagacattattttcgccgtcgcctgcggaaaatcgaactgctcagggtgctcgtccgccacgatctctgtccgccgcttaccgacgcccagctcgatgcctggcggagccggaaaatctatccgctgaccgaagaatttctgcgctggcagcgaacggacgacaacacggacaggaatccctatcgcgaccgttatcgcgccctgaccgaaacgctcgacctgacagcccgcagcgaccgtcatgcgctcggtcgcgcgctttaccacctggcacagcgccgcggctttctgagcaaccgcaagcaggccggcgaagaggaggaggggacggtcaaagagggcatcagggatctgaccgcggatatggccgatgcgggatgcacctatctgggggagtatttctaccggctttaccggcaaaaggataaaatccgcaaacactacacctcacgcaacgcgcattacctggcggagttccgtgcaatatgcgaaaaacagcatcttccggaggagtggcaacaggcattgcaccgcgccatcttcttccagcggccgttgaaatcgcagaaaggatcggtcggcaggtgtacgttcgagaagggcaaaagccgctgtccggtatcgcatccgcacttcgaggagttccgcatgctcagtttcgtcaataacatccgggtgcagaccccggccgactcggagccgcgctcgctgacgcagagcgaggcggaggcgatccgtccgctcttcctgcgcaagagcaaaccccatttcgatttcgaggagatcgcccggaagatcgccggcaagggaaagtatgcctgcaaagacgaccggaacgaagccccctgccggttcaatttctccgccgccacgaacgtgagcggctgcccggtgacggccgcgctcctcttcgttttcggcggcgacctccggacaatccgcagccgctacacgctcgccggggataagagcgacgagcaggtcgtgaacgacatatggcatgtactcttcgcattcgatgacgacgagctgctgttcgactgggggcgggaaaaactggggctgtcgcccgaggatgcccgaagcttcgccgccatccggcttccgcagggctatgcgtcgctgagtctgaatgccattgacaagatgctgcctcatctgcgcgcagggtaccggtacgacgaagcggtgtttctcgccaacctgaaggccgtgctgccggcggcggtgtggaacgaccgggggaggcgggagcatatcgaacaggggattgcggaggtcgtccggaattatgagcgcaatccctacgacaaatccgacacgaaagagcgccgcatagcggagtggctccgggatcaggggatcgatacggcccgttgcgaccggttctatcatccgtcgatgatcgaggcctacacgcaagcccgacccgataaaaagggcctgttgcaactggggtcgccgcgcacggcggccgttcgcaatccgatggccatgcgaacgttgttccgcttgcgcgacctgttgaaccaactgctgcgcgagggtaagatcgaccgcacgacgaaaatcaacatcgagttcgcacgcggtctgaacgacgcgaaccgacgccgggcgatcgagcaataccaacgcgaacgggaggcggaaaacagggctttcgccgaagagatccgcaaggagttcgcagccgccacggacggtcgtttcgaacctacggacgacgacatcctgaaatacaggctgtggaaggaacagaacaacatctgcctttataccaagaaacaaatcggtttatccgattttatcggctctgacacacgttacgacatcgaacacaccgctccccgttcgcggggcggcgacgattcacagatgaacaaaacgctgtgtgaaaaacagttcaaccgcgacatcaagcggacgaaattgccaacggaactcgcgaaccatcaggagatcatggcccgcatcgaagcgctgggctggccggagaagattgcggggttgcagcggcagatagaaggccaaagacgtcgcagcaaaaatgcgacaaccaaggccgaacgcgacagcgccattcagcgccgccactacctgcaaatgcatctcgactactggcgcgggaagtacgagcgtttcacgatgaccgaagtgccggaggacttcagcaaccggcagggcgtcgatatcggtatcatcggccgctatgcccggctctacctcaagaccgttttcgagcggatctacacagtgaagggggccacgacctccgcattccgcaagatgtggggcttacaggaggagtacaccgccaaaaagcgcgtgaaccatgtgcaccactgcatcgatgccatcacgatcgcctgcatcggccgcaacgaatacgaacgctgggcgcaattcgcgggcgacgaagagcgctacctccgcggcgaagcggcccgaccccggttcgagaaaccgtggccgacctttacccgggatgtgatggcggtggcggacgagctgctcgtggcccaccatacgccggacaacctacccaggcaaagtcgtaaaaagctgcgcgtgcgcggcaagatacaatacggaaacgacggtaaagcgctttacatgcaaggtgacacggcccgcgggccactccaccagcaaactttctacggagcgatcaagtgcgacgaccagatcaggtacgtcgtgcgcaaaccgctcgaccagctccagccctccgacatcgagaagatcgtggacgaagcggtaaaagcccgtatgcgggaggcaattgcggcatatggattcaaagaggcgatggaccccatgaaacataccgtctggatgaacgaggcaaagggcatccccatccgcaaggtgcgcatctatatgccgagcgtcacctcgccgattcacctgaaaaagcaccgcgacctctcggtgcgcaagtacaagcaggattaccacgttgccaacgacagcaactattgcatggcgatctacgaggggacggacgccagaggcaaaaccaaacgttcgttcaggctggtaaacaatcttgaggcggcacgctatttcaaggcgagcaccgaccggacggcctgccccgacctggttccatcgtccgacaagaacggctacccgctcaaatgtatcctcaaaacgggcacgatggtgctgttctacgtaaattcgcccgaagaacttcatgaatgtacgcccaacgagctggtgaagcggttgtataaagtgacaggaatgagtatgctggcattgcagcaaaaatattactttggatcgcttattttcaagcaccaccaggaagcccgtcccgccggagagctgaagataaaaagcggcgtgtggaaaatcggagaggactatcgacctgtgatttcaattttgcacacccagttcaacgcctgcgtcgaacacgatgacttcgacctgaccgttacgggcgagatcaaattcaaacgctgaccgccatgctcaaacgcgcactcttcttttcgacaccgctctgtctgagtctgcggaacaatcagatgatcgttcacaccagagaagcccccgacatgcaaaagcgcattccgatcgaggatatcggcttcgtggtgttggaacaccagcgacaagcgggccggtgtgatcctctcggacatccgctcgaagaggggaacccagcgcgatatgttcgacaccacggacagggagaagcacgaccgcctgatggcggctgtggatgcccagaagcgcctacggacgacacaggatcgtcacggcggccgagggtttcgagccattcaaaatgaacagggagcattagtcgcagcgtttcacgaccgaccgggagcctatcatccgagtcaaatccgagtaggtcacccgcagtgcgacaaagatatacggttccaaaggatttcgacccgcgggtcaagaaaatttgcataatgagctgttaaaaagggcggttttacttgttttcttcgtttattttcataattttgtatgctctcccgaccggcgggtatcggatagccggccgccgcagcgtggagagcctgcacgagaaagacggttactcgacagttcgctccggtcccgacggagtaggtcgaagagagcgacgacgcgacgacagcctcggcatttacggcttcggttccggacgagggggggggtgtcgctgctgcacatgcgatccgcgccgaaagccgtcggccgaaacgaataacgggtacggaatccctcgtctttcctgtgcggtttttccctttttatggacagtccgtgcggggattcgacggattaaacgatttaggtatgaaaaaattattgttttgtgcgatggcccttgcagggctgattgcctgcgacagcgattccgatgcaccggaccagccgcagccgcaacctcagcaggtgacctgcacaatctccgagcccacagcgctgacggagatcaccccgggaacgaccgtaatcatcgcaggcaacggctcggtcaaccacggaagcatcacccgggtaacgctgaccgtgggcgacgagcagattgcagccgtaaccgaagtgcctttctcctacgagtacctgttcgagggggggggaatttgcccgcaggtaatctgaccatctccctggaggtggagggtgaccgcggcggcaaagctcgggacgaggtcacggtaatcatccgctccgaaacggatcccgacgagcagatcctcgaattcgaggatcccaactttttggaagcactcctcgtcgtcaaagagatagaaatctacaaccatccctccggatttaccacggtaaaacaggatgtggacgaaaaccgcgacggccaaatttcgatcggcgaagcaaaaaaggtgaaggcgctgatcctctacaaccaagaaaccgatcggggctacaacatcacgagcatgcccgaaatcaaatacttcacctcgctgactcatctgcggtgcgacggaaatctgctgaccgcactcgacgtatcggagtgctccgccctgatgaatttcgactgctccaacaaccaactgacctcgatcaacatatccggactcaaatccttgcaatacctcacttgcggacacaacgatctggaaacgattgacgcatcgggttgcaccggactcgtttccgtaacctgctatgacaaccagctcgccaagctcgacttttcggaatccctcgccctggaacttctctactgttctgagaatcaactcacttcattagacctttcgggctattccgcactgacccacctggactgcgtcaacaattccctgaccgtactcgacctttcgggatgctccgccctgaggaatcttgcctgctattacaacgccttgaccgcactcgactgctcggactgcgtagcactgacatcgaactactgcaatggaaatcagctgtcgtcgctcaacctctccggatgcgcggcactgaaagagttctcctgccgcgacaaccagttaacccggctcgacgtctccgagtgcagcgccctgcaggagtgctggtgccagaacaaccagctgaccgccctgaccgtatcggacgcccagcagaaccagccgtggatagattggattaaagactggtaccccgcgattgaaattatcgtaaaatagaagcgactccggttaaagccggatacttcacatcagcccgctgtttgctccccccccttaaacagcgggctttttctgctggctaatcgctgcattctgcgaccaggcagccgttgcatcaaccgggtgcgcaagtcgatgccgccctccggatatacataacatctgagcgtgacggacaagcagtatggcgagaccttgaatttctggggtaaaatcgaacgcgccagacccgaaacgcctcaacaattggaatttttttgatacatttgtccgtctgagtttgaaaaaactacattcaagctacttcttcgataagatagggacgattttttaagcggaattccgctataagtaactggaattctatcttttattgatccgaggttgtggtttgatgtagaaatttaataggatacaacgtaggttggcttcacacgttttgtcgttcagttgtggtttgatgtagaatttttttgttccgtcgcgttgcaagtgccgcaaacgggaatgagggtagcggtttgtcgcagaacaccagaaagcttcacgacttatcacgacctctttttattttgtgcgataaattcggaaaatcgcataaattgtaaaagccgctcggtcgagcggcttttacatgaaatttgatgcaccttacgcggactgctaacataattcgtaaatgaattattccagccgggagcacgactgctcgacgcggccataggaggaattgccgtgtttgtcctgctcccgggaagcaagatcaagtaccgtccggacctccctgctacaaaatcacgacttcgccgcccccttcgttggagccgtcccagtcggtatccacatcgaccgaaaaatcgatatccccccgaaaatcgtcctccttgaaacgggttgtgagctcgagcaactggttgcgctcgatgcggagggtatccgtcaccatccggtcatagacgggaactgtttcgtctccggcatagagtttcaaccgccacgaagttctggcacccggaagggtcgaaaaggttccgagcgtgaatgctccgtcggtacgcgatgcccagtccgccaacgcaacccgcttggcgaccgtgcacggcagatcgggctccccggcaagcggcgtccgttggccgacttcgtcgagtgaaacctcgatcgaggtgatttccggcggaatttgctcgaaacggaagcgggtcacaccgtgtacgcgctgcaagacggtttcaaacgcattgctgcacgggcaggtcacttcaaacgggaggtcggcgcggaaatggtcgtcacccttgccttctccctgataaacgatataataattttcgggcgcatccggattcccggtcatcatacgggcggttacgttcgccacgaaaaccagccgatatgccccgaaggggagcggatcgtggcgataaacgtaggtattcccttcggcagcctgcatgtcgtcgagacggccctgctcgagcagccgtccgttggcatagagcatgtagttcaacgaatggatgcgtgcggcgacgttctcttccaaatcctccggtgcatagggtggacgggttcggaacttctcgacccggatcgtgaccgcaacgctcccgccttcgggcggacaggcgtcgagatcctccttgatacacgatacggcgctcaacagacagaggagcgaaagcgatagataggataggattttcattgctgcaaagtgttatcggttgccgcattccattcgtaaaaaggatcgaaaagcagctcggcacgctcaggttcgcccttctcatcggtggcttcatcgagtccgacctgcacttgcgacgaagaatcatcgacctgatcgttcgtctgaaatacgatgcccgtgatcctgctcgcaccaagcgtccgcgaaaatacgcggtcggttcgataggtgaatccgccgctggcacccgtaatgcgaatttccgaaatctcgaacgcctgctcctcctgcgcgggatcgaagaaaaggaagggggagaagaccgtcgagtgggtatggcacaactgataccgctcaccgttcgacaaatggaactctccgcgggtggacatgcaccacggcagttggtagagccccggttcggagtaatacatccccccgagcgcgtcgattccctcggcaaaaggtcgatcggacgtaaaaaccccgtggaaggtatgcgcagtccgctggaacgtgagcccgtattgcggcgaaggtttgtccttaagcaaaaaacggaacttacccacacgacgcaccgcattgagctccacaggcgccataccggtggcatgcagatcgccgctcttcggcaccgtgaaatcggcaaccgcgacgaaaacctcgcgggtgagcatgcggtatcccctattggccggatgcgacgagacggtgtaagtcatcaggggcggcgttttcagcgcgacctccctttcatcggcgacaacggttccgggtgtcagcgccgtattccaggaagcgacctgtggattgacaatcgctacgacgcggtaatctccgggcctcatttcaaagccgaaagtgcacggcggcaaatcgcccgaaagttttatctcgtaaaacagcgaggaattcgcctcgagcagtatcgtctgcgtcccgtccacgatccatttgccgtcggtttttttcagaatcaacgccttgcattgattccacagccagtttacgtaagccgtggaccgtgtcatcggctccaacgatgtttccgtatcgaaaggtgtctccatgcggaaagccaccgtcaccgattcgtcttcgacagcagccgggttgaggccggaatcctctttcgagcaaccggccgctaaaaagagcgccaacacgcacagtgcgggaaattttttcataaccgttcgtttatgcttttcataaccagccgaattccatggcgatactcccgcctaccggaacgtcgatgattcggtcgcatcgcagtccggccttattcaccgtaaaacaatctgcggcgaccggcagacccgccggcgcatctgctgacggcagggtgagggacatccgctgcagcccgtagcatgcctcggtatgatcccccgtatgatcgttgccgcaggtcggagtcgtatcgtaataggtgaaggtaaggttcacgcggagttttgcatccgacggcagcacataggcaccttccatacgcaggcttccgcgtaaagatgcgtcgtaaaccccgagccccaggtctgcctgcggaagggaaacccggaaattctccatgacgggaagaatgtcctgcctgagcggttcggaggcataggccgcggggatcagcgcaccgtccgtatcgaagcgcagcgaaacggtgggtgagaggtattcgatctcgatcccggtgacccggtcgagcaccgattccacgtcagccgaaaccacgctctcgggttgcgacagagaactgcctatacggaagaaatcgaagagcacctgcccggcgatgcgcgtgagcttcagtcggacggttccgtcggcaaggatcgcagctccgctcaggtcggtaaaaccgcaatatccgtccggcccggcactccccgacgtgcacgtcagccgcagtccgtcccatgtttcgccgggggcgtaggtgctgccctccgccgtccgcagcgaaagccatgctccgccggtcggctgagcgatcatcaggaaacgataatcgctgccctttatctcggagaggggcaatttgagcctctctccgtcggtgaccgacccgtagccgcgtacaaaggtgtatgcgtcgccgctaccagcatcacgccggaaaagatagagcggagtttccaaccccgttgcgggaagcgtcccggcaagccgcacctccacggtgccgttattagcgcacgggagacactcctcctgtccgtcggaggcgcaagccgtgccgaacaggagcagcagagcgccgtaaacccgataaagataacctcgtttcatcttccaaattttattcccagataccccaatcgccctcctgctcccgatcgatcggcgcgacgtcgatttccacaccgattacgggatatcccgaagtgatccacagcgtcacatcgagacgtttgttacgctcggccttacccgccagccgcaactgcgtcggctgcaatgtggcccccgttgccggaacgaccgagagaagcaggtcgatcgcctctccgccggccggcgggatgaccaacggtccttccagccgcacgaatccctgttcggtgagctccgcataatccgaagcggcgagcgtggtccgaaccgatgccgttccctcgcttccgcccggccccacgcgcagacccgcattggcagccgtcaattcgatccggtcaatctcgtccagcacggagtacggcggtgtgtaaggtacctccacgtaccccgttccgtcgtgataacctcttttcacggtgacccctattcggcttacagcgcgggtcaatcgggccgaaaccgtaacatccgcaccgccgagggtatagacggcatcggcatccgcagcgggaaattgcagaaaaagatcatcggccggaagatacatgcccggcgccgcaggatcttcccttagggtaaaggcggtctgctcccaggtggtttgcccggtcagcggcgcgggctccaacgccaggttctcgcccgcaccgctgacgaacagaaatttatattgtccggcaggcatacggaccgacagggttccgtcgggcgtccacccgtcccggaaaaacgtgtcgtacaggaaggcatcgtcctgccggcgaaacgcatagaccgtaacgtcgtgcatcccatcccgttgcagcgtgacgcgcgtatcggccggatcgggaacggcgacacgctcctgcgcggactccgagcaggccgtgaaagcgacggcagccagtacgacagtcgtgaagtacctgaatttcatagtcggccgatttaatgcgttcgtcagtcgatctctccgtccacgaagttcgagccgtcccaaacggtatcgacctccacttcaaattccacgcccgtggtaaagacgttgtcgcccaggacataaatgcggatcaacgtggccttgttccgctcgacgggaatcttgtccttgagcgtgatggtgcgcgtcgagccctcgcccgaggtaagctgcatcgaaaatcctgtcgtggccgcattgtccgcattgggaatcaggtacgtacccttcagatgcgccgagcctgccacgatatccgccggcagcacgttttcaaaatcgtaaccgtccgtgccgaccgtcgtcgaagagcccgtacccatcgtcagcacgtcggccggtgatgcgatcgtatgctcggcatcgaatgttccggcaaccttttcacccgacagtccgagacggctgttggcatcggtgaacgacaatttgaccgtcgccagtttctcggggccgaacacgtcgtcgcccgccttctccgcgtaattgcctgttgcggcctctttgtccgcacggataaagagcacatcgacacgcgacacggagcggcgcagcgtcgcactcactgtctgtttcggcccgtcgagcgacacggcataggaaggaaccacatcgagcggctggttgagcatgaaggccgccgggaaactctccccggtatgcgtaatgtaaagcgcatcggaaagcgtttggtcggccaaagcgggccatgtataattgcccggagcgacaaggccgtaagaggggaggaatttgtactcacccgcggggagctgtacggtcccggaaagtttccgacccgcgtaattcatgcccatgagcggaagatcccggaagtagataaaatccgaaccgctcttccggaaagcgagaatacggaattcgtcggccgtataaaccgggccgcctgcggtgaggtcgaattgcacgttcccgtcggcatggggaaccggattcgatttttcctcatcgccggaacaagacgccgccaaagcggcaaaaacagttaagaccagtaaagtgtagatttttttcatttcagtgtattattatgtgttttttagagcaaattttcagaagaacgctggccgaaatcttcatagctcagctcgtcgaaatgggccagattgtaggcagcatccgcggagcccctatccgcggcaagcgtgaagcaatggcgcgccttttcccggtcgccttccatcagacacagcacccccaggttgttgagcgaccgcgggtcgtccgcacaacgactcaggtaatgccgtgccgtctgcgtgtcgccctgccgcagcgcgagcatcgcggagttgttgcaggcacagggatcgtcggggtagtatgccgacgccacggcacataccgaagcccgctcgggagagtcctcggggtaggaggcggcaagccggcacatctcggccagactcaactgcccgggaccggattcgatcaaccggcggctctgctccgtggtaaaggcggggaggaggtattccacccggtaatctacgcggcgcaactgcggatagacctcgtgcaacagccgcagataggtcttgccgttgtcgatcttccagatggcggcatcgcgcgcatccggatcggacacctcgtcgatcacggccagcacttcgtccctgacgggcaggtcggagacgacgatccagcgccgcaggctgtcccaatcctcggggacggtcgccgtggtgaaatccgactctggaatcgcaaaacgctcgtgcaggtagttgcggatcgacgcgacgcggttggcggaaagcttcgtattgaaggcatacgtatcctcgggagaggcataccctttgaggtagattttctcgatcgtcaagccgtcgttctcctgcaagcgggcggtgaggctgtcgatccgttgcaattgacgcccgttgtcggcaaagccccggagcaataccgaccggccctgcggaaaatgcacgaccgccgtgatctgttcgctgcgccgtttgaccggttcctccgccgggacgagcagcgtcagttgcggccttacgggtgcagggatacgggcaaggagcagcggggagaggctcgcagaatggcccgcgcaccccgtcagatcgcgttggagcaccagatcgcctccggccatccacggttcatagggcacatccccgacataaaacaaggtctcttcggacgcctgttttcgattgcggaggacgatgttgtccgctgcgccctcgggcagagccggggtgccgtaaagccgttcgcggcgttcatcgactttctggcggatacgtcccgtaaaaacgacgggtgcgagggccatccgatttttaccgtcggtaatgaccggtgtaacgatcagttgttcgttggccgaaagttccgtttcaccggtaccgagcgtgagttccacgcacagacggtcgcctttccgaaaaaccggagggtttccctcaccggcaagggcggcagccgagaggagcatgtaaccggccagcaggcacgacgtgcggtatatgcgattgcgtttcatatccgagggaattatttgataaagaaaatgaagctcagaccgatttttgtcggcccgaaataattgcgcgagcgggtgcggagcacctccccgcaatcggcaatcggatatttccgatcccacagtcgcgcataaccgacgcctatggttgcttccagattccagcgtttgccgatgagccactggtagccgtaggaaataccggctccgcagagatggccctgataccggttgtgtcggaaggtttcattgaaactgatgcccccgacgttgtattccgcataatgcgcatggaggccgaaaaa

SEQ ID NO: 505 - DNA, 23636 bp, synthetic construct
  source 1..23636: mol_type = other DNA
  misc_feature 1..23636: note = Synthetic
ggaggagcccggaaagcccaagtactatgtgctggacatgttcccttatccttcaggagccggacttcatgtgggacatcctctgggctatatcgccagtgatattgtttcaaggtacaagaggctgaagggcttcaatgtgctgcatccgatgggatacgatgcttttggccttcctgcagagcagtatgctatccagaccggccagcatccggagataaccactacccagaatgtagcccgttaccgcagccagttggataaaataggcttctcttatgactgggaccgcgaattccgcacctgtgatccggattattacaagtggacccagtgggccttcctgaagatgttcgacagtttctattgcaccaagtgcggcaaggcgatgcccatctccgaattggttgctcattttgagaaacatggcacccgcggctgctatgctgcccatggggaggaaatggaattctctgccgatgactggaattcctggtccgatgcccgcaagagcaaggtcctgatgaattaccgtatcgcttatcagggagagaccgccgtgaactggtgtcccaagctgggtactgtgttggccaacgacgaggtcaaggacggcctttccgtaagaggcggcttcccggtggagcagaagaagatgactcagtggcagcttcgcgtttccgcttacgcagagcgtcttctggacagcctggagactcttgactggacagattccctcaaggagatgcagcgcaactggattggccgctcaagcggtacggaggttgttttcaaggttgtatccggggacaaagagaaagacattaccatctttaccacccgtgtcgatactatcttcggtgtaacattcatggttcttgctcctgagagcgaccttgccctggaactcaccactccggagcataaagcagaggtggacgaatacatcgcctatgtaaaaaagaagacggagagggagaggattgcggaaaccaaatccgtaacaggcgtattctcaggtgcttatggaatcaatcctcttaccggggaaaaggttcccgtatggatatcggagtatgtgctggccggctacggtactggtgccattatggcagttcccgcccatgacagcagggattacgcttttgcaaagaagttcggcctgccgatagttcctattatcgagggctgtgacgtgtctgagcagagcttcgatgccaaggaaggcaagatgtgcaattccggtttcctgaacgggatggatgtaaaagaggccatcgaagctgccaaggactatgtagagtccaagggacttggccgcaggaaggtcaattacaggctcagggatgccattttctcccgtcagcgttactggggagagccgttccccgtttgctttgacgaaggtattgcggtgccgcttccggagtctgcacttccgcttgaactcccggagataacggagttcaagcctacggaagacggccagcctccgctcgcccgtgcaaaggattggacctgggagggtaaacctctggaaaccagcactatgcccggcttcgcaggctcaagcgcatactacctaaggtacatggaccctcacaatgacaaggctctcgtaagccgcgaggcagacgaatactggcgcaatgtagacctttatatcggcggtacggagcatgccaccggccatttgatttactcccgtttctggaacaagttcctttatgaccttggttatgtatgcgaggacgagcctttcaagaagctggtcaaccagggaatgattcagggccgttcaaacttcgtttaccgtgtggtaggcaccaacaagttcgtttcgcttggcctcaaggacaactaccagacacaggaaatccatgtggacatcaatatcgtccgcaatgataaacttgacctggatgcgttcagggcttggcggccggagttcaaagacgccgaattcatccttgaaaacggagaatatgtctgcggctgggcggttgagaagatgagcaagagtatgttcaacgtggtgaatccggacgatatctgcgagaattacggcgccgataccctgcgcttgtatgagatgttccttggccctcttgagcagagcaagccatgggataccaagggaatcgacggtgtacaccgcttcctgcgcaagttctggaggcttttccacgacggtgacaacatgattgtcactgatgaaaaggccgccccggaggagctcaaggtgctccataaactcatcggcaaggaagaatcggacatcaatgaattctcattcaatacaacgatcagcgcattcatgatagctgtcaacgagctgtcggatctgggctgccataagaaggagattcttgagccgatggttgtgatgctgagcccgttcgcacctcatattgccgagcagctctggcacgaccttggccacgaggacactgtcacttatgcgtctttccctgaatttgtcaaggagtacacggtagaaaacaatgccacatatgccgtttccttcaacggaaagaccaggtttactgtagaccttgccaagtctatgactccggcccaggtggaggctcatgtaagggcccttccccagacggagaaatatgttgccggccagaacatcttcaaagtgattgtagtgcccggcaagattgttaacatcgtagtaaaataataacacataacacattgaaactaatcaacttatgagtaaaaagcaaagtaagttcacacttttcctggactatgtctggatgactgtcggctgcgttattttcgctatcgcctgggaggctttccttatatccaatcatatagcgagcggtggcctggcaggtatctgtactgttattaacttcagtacgggaatccctgtttccttctcttacatagtccttaatgtccttttgcttggaattggtttcctggtgctgggcaagggtttcgggttcaagacaatatattgtattgcacttacgacggtgctctttgacgtattgccaagaacgccttttatcgcgaaccttgagaccaatcctctgctcgacgacaaagtgctgaatcctatcatcggcggtcttatcgaggctatcggtataagcttcattttcaaacgtgggggaagtaccggtggaaccgatgtcatcgcgctgatactcaataagttctggcctgtatccccgggtaaggtttatatgtgtctggacgtgttcatcatcgcttccgtattgcttgttccgggaatgggaataaaggatatggtttacggttacatagcgatgttgtcctttaccctgttcctggatttcctgctactcggaagcaaggccaccgtccaggtgctggttttctccaagaagtacaaggagattgcagatgagatgactataaaccttagcaggggagtcaccgcgttgcaggctgtgggctggtattcccagcaggagagcaaggtgcttcttatcatggtacgcaaaacccagctttccatgattaccagggctatcaaagatattgatccgggcgcttttgtgagcgtttcttctgccagtgctgtttacgggcagggattcgacgagatgcgtaccggcattgacagaaaaaagaaacagcaagaaaataaatgagcaatccttttcagaagagcatcttcaggcttatcaaggagtacttccttgtagccgtcggcatcaccatctatgtattgggatgggtggtatttcttattcctaacaacctggtgggcggcggcgtcaccggtataggtaccattatccagtatgccaccggcttcaatgtcggttataccttctttataatcaacggtatactgctgataatcgcgttctttgtcatgggctccagtttcggaggcaagaccatcatggctattatactggcatccataggcctcagggttcttccggaaatggtgcccgataccatcatccaggccattgcgcttgacaatggcaagctgatgtgcaccctgattggtgccatcatggcgggtttgggtatcggcattgcgatgtcgcagggcggaagcaccggcggcacggatatcatcgccctcattgtaagcaaatacaggaatgtgtcacccggaaggatgatcctggtgatcgatgtcgtcataattgcttcttctttctttgtcccttcttatactgccgatggtgaactggtcggctgggcggacaagtttaccggcgttatctatggtttgctgctggttattgtctgtggaaacgtgatagatatttacctgtcaggtacaaaacagtctgtccaggtgttcatcctgtcgcacaagtatgaagagattgcggattgcattaccaccaatcttcaccgcggggtcactgttctcccggccaagggctggtataccaaggaggacagccatgtgcttatggtgataagccgcaagagcgaccttaacatcatgctccgttacataaaagcaatcgatcccaatgcatttttgtcggttgccagcacaacgggagtctacggccggggcttcgatgccataaaatcaaagccaaaaagtgttgcttgatttgacgaatattaaaattcgtaaaaaaaatattaaaatttgtaaatacctgcatgtcaaaatgaccattgcaggtattcttttattaagtttgcatatcgttccgacagaaagcggacgtctgcaaatatggctgtgaaagaagaagatttgaggaggagttggcttttattggttcctctgacatttgttatctcatcaattttgtctgtttattattcagacggtctgaccttcctttgggcggtgggctcgttgtcggtggcgggctgcatggtgctggtcctgctggatgcgactcttggcaggaggccttgcaagattctgtttttgttccaggctttgctgctcttgctgtcggcttttatgccggagttttccagcggtacgatgctgtctcccaggctgattgttttttctgtggggacgtctgtggctatgtgcgtgtctttgtttgttaatctgtactacaagagcctggatgcggatttcctgcttggggagtaccgcggccgggattttcttgccgatgccatgcgcgttgtctatgccttgctgctgaatacggtgctgatggccgtggcggagacttactgggcgagcagtcttatcaggatcacggtggggatacttgccgttgtgctggctctgttcttttttacgattatatccatgcgcttctatgcgatgtacactatagagcgcaccctgaatgcagagggtgtgccttcggagagtgatacgcagctttacaggcagattatcgagctgatggataacagcaagccgttcctggatccgtcacttaatgtcgatgagatttgcaagcagctggggactaacaggagttatatttcccgttgtatcaatgcctgtactggcttcagtgtgccgcggtttattaacaacaggagggtgctgtatgccatggaactgtatcagggtaacatgtccctgaaggtgtcggagcttgcggtgttgtccggcttcagcaacggggttactttcaatacggctttcaggctggagactaatatgagtccgcgggattggtgccgggagaggcgggatgaggctgcaaaagagcggaaacgcctttccaagttgatggaacaggagcaagaagagtgatgttttccttggtgacggggtggggaagggttatgcttctggcgtgcaggcagatgctgccgtcggagttgctcctgggtgctccgtatttgaggtctccttttattatgcagccgatgccggcgagttggcagcgtatctggtggtggcggccggtgaggagttctacctgcagcaggtggtagcggtctgtgtccccgatatgggtgtagatcagtttggctagttttgcgtctttgaagcggccttcctgggtgatgaaacttttgttgagggcttctttgcggatgagccagttttccagcagggcgtggggctcttttggggcggctatacagagtgcgagatatattttatggacttggccgtcgcggaaggaggctgacaggcgttcgagtgcttttgaggttttggcaaagacggttatgccgctgacggggcggtccaggcggtgggggattcccaggaagactttgccgggtttggagtttcttatggcgatgaaggctttgtatttgtcgcagagggtttcgtcgccggttttgtctccctggacgatttcgcctgcttttttgcagacaatcagcaggtggttgtcttcaaacaggatccgtccttccagatccttatattcctgttctgtcaaattcctgtattccatacctaatattttatttgctctgagtgtaacctgttgcccgttccgtcttccgaatacaaatataagaagaaaatatgacaaaatggcagaaatgttggaatggcacaacattcgatatattgagaatcgaattccgagcgaagtcgaggaatctcaaaataaagaaaaaaataggagattaaagatatgggtaaaattattggaatcgatttgggtacaaccaattcatgcgtagcggttatggaaggtaaccagcctactgttatcatcaacaacgaaggccagcgaacaactccttctgtcgttgcattcacagacggcggcgagcgtaaggtgggcagccctgcaaaacgtcaggctatcaccaaccctgcaaacaccgtattctctatcaagaggttcatgggagagacctatgaccaggtaaacaaggaagtaagccgtgttccttataaagtggtacgcggtaacaacaatactccgcgcgtagacatcaacggacgtctgtattcacctcaggagatatcggcaatggtactccagaagatgaaaaagaccgcagaagattatctgcgtcaggaggttacggaagctgtcgtaacagttcctgcatacttcagcgattcacagcgtcaggctaccaaggaggccggaaagattgccggtcttgatgtaaagcttatcatcaacgagcctaccgcagctgcacttgcttacggtcttgacaagactgacaagagtatgaacgtggcagtttacgaccttggtggcggtacattcgatatttccatccttgagcttgactccggaatcttcgcagttaagtccaccaacggagacacccaccttggcggtgatgacttcgaccaggtaatcatcgactggctggcaagcgaattcgcatcagagaacggcggtgcagacctcaagaaggaccctatggctcttcagagacttaaggaagccgcagaaaaggctaagattgaactttccagccagacttctacagagattaacctcccttacatcatgccggtagacggtgtccccaagcatcttgtaaagactcttaccagggcaaagttcgaggctctctgcgacgatcttttccagcgcactatcgagccttgccgcaatgctcttgcagcagccaagatgaatgtttccgatattgacgaggtcctgctcgtgggcggttcaacacgtatccccaagattcaggaaatcgtaaagaacttcttcggaaaggagcctaaccgcagcgttaacccggacgaggttgtagcagtaggtgcagctatccagggcggtgtgcttgcaggtgatgtaaaggatgtgatccttaccgatgttactccgctttcactcggtatcgagacccttggcggcgtgatgacaaggatgattgaggccaatacgaccattcctgtagacaaggagcagattttctctaccgctgcagataaccagccttcagtagaaatccgcgtgctccagggagagcgtccgatggccaaggataacaagcagatcggtgtcttccatcttgacggaatcgcccctgcaccccgtggaatacctcagatcgcagttaagttctctatcgacatcaatggtatcctgaatgtatcggcagtggacaaggccacaggaaaggcacagagcataagaatcgaggcttcttcaggcctgtcagaggatgaaatcaagcgtatgcgcgacgaggccaaggccaacgaggcagcagacaaggcagagaaagagcgcgtagacaagatcaacgaggccgacgccctttgcttccaggcagagaagttcctcaaggataacggtgacaaggttcccgcaatcgtaaaggaggaagtagaaaagaacgtggcatccctcaaggaggctatcaaggcccagaacctggcagacatagaccgctacaaagaagctcttaacaaggctttcgaggctatgtaccagcaggctcagcaggcacagggcggccctcagggccctcagggtggcaatcctttcggccagggcggtcctcaggcaggcccgcagggacctcaggacaacactcctgacgagcagtaaacttttatgacagtgcagatttttatctgcactgtttttttattacctttgccttccgaattaatgagatgtaatatgggaagagttatccttactggcgaccgtcctaccggcaaacttcatcttggacactatgttggctctttgagaaacagggtgcttctgcaggatgagggcaactatgacaggttttttgtttttattgccgatgtccaggcactgacagacaacgccgacaacccggagaaggtgcgccagaatgtgatcgaggtggctttggactatctttctgccggcctggacccttccaaggttactatctttgtacagtcacagattccgcagctgcatgagatgacccagttcttctccaacctcgttactgtacagcgcctgcaaaggaatcctaccgtgaaggcagaaatggctctgcgcggtttcaacgccgatgcagaagaggagaaccgtcgcggacttccagtaggtttctttacttatcctatcagccaggctgccgatatctgcgccttcaagtcaactactgttccggtaggcgaggaccaggagcctatgattgagcagtgccgtgagattgtgcgcagtttcaatggtacttacaattgcgacgttctggtagaaccccagatactgcttccttccaacaaggtttgccgcaggcttcccggaacggacggcaaggccaagatgagcaagtcgcttggcaattgcatatatctgagcgataccccggaggaactcaagaagaaggttatgggtatgtttacggatcccggccatcttaaggtagaggaccccggcaaggtagagggtaataccgtgtttacatacctggatgctttctgcgaggaatctgactttgcgcagttctggccggattacgccaatcttcaggaggttaaagaccactatatgcgtggcggtcttggcgacgtcaagtgcaagaagttcctcctgaatgtgctcaatgcccgcttggaacctatccgcgcccgccgtgcagagtacgagaaggacatcccggaggtttacaatatcctcaagaagggcagcgaggccgcccgcgaggttgctgctcagacgctttgggagatgaaagaggcaatgaagatcaactacttcgacgacgccgccctcatcgccgcccaatccgcaaaatacagtaagtaatccattccttctcttcgccgatagagcttctttttaggactgcaattgactatcaatgagttacgcattttaactctgattatttttccgagttaaaatgcgtaattgcttgattatcaatatgggtatttggtaaggcctttgcctgttaaaaaacgggggcttggagcgccggctaaatactgacttgtaaataggctaattatttattatatttgtcaaggatacaaaaagccccacggcgtacgcggggctataggataaaatccttcggcatatagccttattgtgataagatgtagaaaatcttacactgcaaagttatctgaaattttcgtaaaagcaaaaatatggaaaaagttttaggactggatcttggtaccaattcaattggatgggctgttgtagaaagaggggaggataataagtgtaaacttgttggaaaaggagttaacatttttcaggacggcgtcgcccatgataaaagtggggagaaaccggctgtgcatgaaaggacatcggcccgttcctccagaagacattacttcagaaggagactccggaaaattgaactgttgaaagtcctaattgagaacggcctgtgtccggccctgcctgaggcggctttgcttgaatggaaaagacgtaaactgtttcctttggataaggcttttctggagtggcagcgtacagatgacaatgtggataaaaacccttatcatgacaggtatctgtcattattcactgaattggacttgagcaggcaggccgacaggtatactttgggccgtgctttctatcatttgaatcagagacggggctttttaagcaacagaaaggaagctgtgcgggagagtgacggcaaggtttctgaagatattaccaacctttccaaggaaatgaaggatgccggatgctcatttttaggagagttcttctataagctttatgcggaaggtaaaaaaatcaggaacaggtacacttcaagagaagagcattacaagaaagaatttttcgcaatctgtgaaaaacaaggtctttctgacggtttggtacacagtcttgaacgtgcgattttttatcagcgtcctttaaaatcccaaaagggaaatgtagggcgctgtaagttcgagcccgataaaccttgctgtcctgtttctcatcctttgtttgaggaattcagaatgttgcagtttatcaattctatcaggttgaaatcgccctcagatgatgattacaggcctatcggcaaggatgagtatcataagatacttcatctgttcttcagaaaaagcaaacctgatttcgattttgatgaggtcgcaaaagcaatagccggtaaaggtaattattgttcaaaagacgatgtcggctcatacggatatcggtttaattattcaatggggacgaatgtcccgggttgtccggtatcagctgctataatggctgccattgatgcctctccggaagattggacggacattctgagctctgtgtatgttaagggcgagagaaagacaagagcgcaaatcgtcagtgacatctggcattctttgttcttttttgatgatgaccagaaactgtcggaatggttgtcagccaacttgcagatagatgcgaaggctgcttcctcactttctcattttaatatccctcaaggttacgcttcattgagcctcaaggcaataagcaaaatccttccttggctaaggctgggatatgtttacagcgatgctgtgttctttgcaaatcttccggcgattctgcctaagtccgtcctcgggaacaaagccaggatggacgatatagaagagaatatcagaatcctcctgagtgacagcccacttgacggaaagtccggtactttcaataagtacaacaatatacatgattatttattgggtgtcgcagaaaacgtcaaggctgacaaattatatcatccatcgcaaatagaactttacaagcatgctttgccggatgagaacggccgtatactgttgggctcgccaaggactaatgctttcaagaatccgatggcgatgcgcgcgcttttcagattacgtaagctgattaatgaattgctggttgaaggcacgatagatcctgatacaaaaatcaatattgagtttgcaagaggacttaatgatgccaacaagagaaaggctattcaggactatcagaagaatctggagacccagagggaaaaggacaggcaggagataattgagttattcaagagcgacggcattgattacgagccgtcaagtatggatttgcttaagtatcgcttatacgaagagcagaaccacaggtgtatttatactgatcgtcagatatctccaagaatgtttttgggaaacgccacggagttcgacattgaacatacaattccaaggtcgcgcggtggcgatgattctcagatgaacaagactttgtgtgagagcaggtttaacagggacgttaagaaagcaaaaataccatcagagctggactcacatagcattttgcttgacagggtatccgagtggaaagaaaaggcggaagagattgacaagcagattgtgttttggcgtcgcagaagcaagcatgcggcatcgaaagatgaaaaagataatgctatacgacgggcccattatttgtcaatggaaagagactattggctcggaaagtataatcggttcgtgatggaaaaggttccggatggcttttccaacagacagggcgttgatataggcatcatcggcagatatgccagaatgtaccttaaaaccgtgtttaataaaatttatattgttaaaggtgctacaacggctgatttcagaaaagcctggggcttgcaaaatgagtatgaaaagaagagccgtgacaatcatgcccatcattgtatcgatgccataaccattgcctgcatcggcaaaaaggaatatgatgagtgggcagggtttatgaaacaggatgaggattataggtttggccggggtaaaaggccgttttttgagaagccgtggccgacatttacggaagatgtttcattaattacgacggagctgacaatccctcattatactccggataaccttccaaaacgcgcaaaaaagaaacttagaatcagagggattattcaaaggaattctgatggggaaattaaatatgcacggggagattctgccagaaaccctttgcatatggatactttctatggtgccatcagtgttaatgatgagattaagtatgtggtcaggaagagtctggattcattgaaggagtcagatattgaaaagattgtggatgatgtcgtccggaataaggtcaaagaagctgtcgcaaagattggttccttaaaaaaggcagtatcggagggcatttggatgaatgagaagttgggtattccaattaacagggtccggatgtttgcaacatcggtcactaatcctatttctctgaagaagcaaaggtttgtgtcagataaagagtacaagcggaactactacgtgacgaatgacaacaattattgcatggcgatttatggtacaaagaaaccgtccttcaagttgttgaattcgttggaggctgcaaaacaatttaatggcaaacagtcgaatcttatcccgatgtccgatgaaaaggataatccgctgaggtttgtccttaagattgggacaatggttctgttttacgagaacagtccgtccgaattgttgtcctgcaattctgcagaactctccaagagactgtataaggtgactcggttgtcgacattgacaattcagcaaaaataccactacggaagtattacgttgaagcatcatttagaggcacgaccgtctactgaaattaaggctaagaatgggttgtggcatattggagaggagtatcggccaattattgttttaacacataagcaacttaacgtttgggtagaaggcgtcgattttgatattacccagaccggtcgaatcatatttaaaccacatccgctatggtaaaaaggacattgtttttcggcagtgcatgccgactatccctgaaaaacagtcaactggtcatagaaaacaaggaaactggcgagttgaaaacgtgcccgatggaagatattgggtatgcggttatagaggaccagtctgtttcgataacaataccggcattgaacgctctgtcaaggaataactctgccgtggttttctgcgatgaaagacgtatgccgtcttcgatgctgcttaatctggattccaataatgttcttgcggaagtttataaacttcaaatcgaggcttcggcccctttgaaaaagaatctttggaaacagataattgtggccaaaattgagaatcaggctcgtttattaaacgagattgggaaagacggtaatgcgtttaagccatattatatgaatgtaaaaagcggtgattcggataacagggaaggtattgcggcccggctgtattggaaatctcttttcggggagggttttatcaggtccagggagggtgattccccaaatgctttattgaattatggatattcaattctccgcgccggaatggcaagggctattatgggatccggcctttttcccgcttttggcttatttcataagaatcggtacaatgcatttcctttagccgatgatttaatggaaccatacaggccatatgttgatcaaatagtctatcaattacattcggatggaaaagtaaaattagacatcggcgccaagcaggagttgttgaggctattgtttaaggatgcttgttttaataatgtgacaaggccgatggaaatcgccttatcaattacaacggcatctttggtgaaatgtttgaaaggagagactaaacagttattatttccggcgctttgattatgatttctgaatacagactcaatgcttatcacgttatgtggctatttgtatttttcgatttgccgacaactacaaagaaggagaggaagtatgcagctggattcaggaaggatttggaaaaagacggttttcgcatgatgcaattctcggtttacataaggcattgtccttcaaaagagaatagggatgttcatattaaaagggttcggagttttgtcccgccatcggggatggttagtattatgtccgtaactgataagcagtatggagaaattgtgaatttttggggtgcaaagaggtctcctttgccggagactcctttgcaattggaattattttagtatttttgcaaaaacgctacatcattttacttctttggcgacagagtgcctttttgaaataagaaaatcactcgtaactaattgaaaaacaatctataaaccagccaaggttgtggtttgatgtagaaaaggaatgaagaacaacttaaaaaaccaacagtatatgaaaacacagttgtggtttgatgtagaaaaggaatgaagaacaacctttgcatcaaaagggcgttaaatcaaagagttgtggtttgatgtagaaaaggaatgaagaacaacctaagtgcttgacttacagaactattttctgttgtggtttgatgtagaaaaggaatgaagaacaacgataaggttcgtagcaccggcagccttgctgttgtggtttgatgtagaaaaggaatgaagaacaacagtcagttgtttgtaagcagaatcaagcgagttgtggtttgatgtagaaaaggaatgaagaacaacttcatctttgagtcttttgaagaattgttgttgtggtttgatgtagaaaaggaatgaagaacaaccgtcctgaccgctcttgaagcaaaagcaggttgtggtttgatgtagaaatggaatgaagaacaacctgaagggaaatgtctcgcggtgtaaatgtgttgtggtttgatgtggaaaaggaatgaagaacaacgcgcactatcagtagcgcgttaacacaaagttgtggtttgatgtggaaaaggaatgaagaacaactttatattcgctgcttgaaaagttaaggaagttgtggtttgatgtggaaaaggaatgaagaacaacgccgccggacttagacgcgtatatgcacagttgtggtttgatgtggaaaaggaatgaagaacaaccaaatatcacatggaaaagagagaacgtttgttgtggtttgatgtagaaaagaatagataatgattcactgcgatggcagaccgtctgtgagccgctgctgataggctttaattctccgcgagactcttcgaactctttttttttgacactggccggtagcggagaccggacatcaggagactcaaaagcgagttagcttctttttctaaaaacacatttctcaataaatattgtgcatttttaaatatattgagtaaatttgcgcagtgcattgagtaaaattagaaaatcggtataactcgttatgtatcagagaaaacaatatcaaactttattttccagaatgctggaaaaacgacgttttatccaagtgattatggggccgaggcaggttggaaagtctaccttgatgaaacaggtagtaaacgcactggatattccattcgttttctatccagccgatgctgtccctgccacacagctaagttggatcagtgattgctggaacgctgcccgcgccaagatgcgcctggagaatttgaaagaactcattttggtaatagatgagatacagaaaatcaatggctggagcgaggtggtaaagaaagaatgggataccgatactttctatgatgtcaatctgaaagtaatccttttgggctcttctcgtgtgatgctggataaaggatttgccgacagtctggaaggccgctttgagcgaattattctcccacactggtcctatgccgaaatgcgcgatgcttttggcttcactttagaccagtttatctattacggagcgtatcctggtgctgcggaactaattggtgatgaagaccgttggcgggattatgtcaccggttcaatagtcgatgcaaccataaataaagacattctgatcaacgagaatattgccaaacctgcattgcttcgacagaccttcgaactttctgcagcatattcgggcatggaactgtctttcaataaaatgatcggtcaactacaggatgccggcaacacaacaacattagccgggtatttgaatttgctatcacaggccggtttatgttgcgccttgaacaaatatgccattgatcttgccagaaagaagagcagcattccaaagcatcaggtctacaacaatgccctgaaaaatatttactgcaaaccatttgccgaagctatactggaccgttccctttggggccgattgttcgagtcagccatcggagctcatataatgagtaacgcatatgcgggcgattataaagtgtattattggagaactaatccaggatgtgaggtagattacgtactggagaagaatggccgaatagtcgctatcgaggtcaaaagcaatagtgatgcaggcaataaaggcctgatggagttcagaacacaattcagcccttatctttcactggttgttggtgatggtggaatgaaagcggaagatttcctgagtattaacccagtggatttgttcaagtagccaggaaactggattatttcctccaagtattgtacggatgcatacttaggtaggagttggtgaattccttgacgccggtgacctctgtgccaagccaggcgggggtggggtaatctgtgtcaggcgaagggagttccacttctgcgacggtcagctgcgaattgtctcctttgaactcgtccacttcccatttaagcccgttgccgatgggaatgatgttgcgcgttttctggataagtccggatttgcagagctttagaagctccactgcgtcggagtacgggatttccatctcccattccgggcggctgagaccgtcgggcgtcattcgtcccttgattgtcaagaagccctggttgtcgcgtatacggacgcggacggtgttgccgccgtcccgggctatgtatccctgggaaatctcgtaggatttctgtacgtcctttttgtaactgtcgtcctttacaaggaactttctttcgatttctacattcatgctacatcagccattttgtcatatcctttcctgccgccattgcatcccggatttccgtagaagagatagtaacaagaggggcattcataagggaaatattataattaggattctctttaatcaggcgggctttcaggtggccccgatggtatcctttgcggggataaacagctatgccatactcagtcagaatgcgggaatagtccctccaccgggggaaactttcaaggttgtcggccccgacaacaagggtaatctcatcttccggaaacatcgacctcaaagtatccaaagtgcggattgtataatgtggcggagtcatggcaagctctatgtccgacacctccacccccttcaactccggatggcgagccacggcttcaatggcagctttatagcgggcgaccccggtttcatttgccgatgcatccttgaacggattctgcgggctaacaacaagcagcacacggccatagccggcggtctctgtcagataccgcataatggccaggtgacctgtgtgaagcgggttgaaactgccgctgtaaactgccgttttcatagattcttcacttcgttcagaatgacaaactacttgttcagaaaattgtctacaagggcttcggcctctgcgtaggctacgtccagtttgtcatttacaagaactacgtcaaacttgggggcgtaggtcatttcttccgcagccttggccacgcgctccgctatggcttccggggtgtctgtcttgcgggcgacaagcctgcggtgcaactcttctaccgacggtgcctgtatgaaaacagacagagccttgtccccgaagtatttcttaagattcacgccgcctttgacatcgacatcgaagataatcacatgccctttgtcccagatgcgctgaacctcacttttaagggtgccgtaataccgtccctcataaacctgctcatattctacgaacatatcggcctctatgcggcggcggaactcttctacagtaaggaaataatactcaacaccgtcctgctcctgaccgcgcggctggcgggaagtagctgaaacagagaactcaatctccggatgcaagccaagaatatgattgacgatggtgcttttcccggatccggacggcgcagagaaaatcaggactttgtccttggacagactattttttttacaagccataacttttatcgttttatcattcagatggttgtattcaatatttgaactttttgcaaatttaactaaatttgcctgatttttgaagcaattgcatattgtttttacaaacagcttctatagaagccatggaccattatttttggtttctatagaaactgtttgtaaacggaaaagaaatataatttataatatatagttactatggtatcttacaaagaattgggcctcgttaacacccgcgaaatgttcgcaaaggccgtagccggcggatacgcaatccccgcattcaacttcaataacatggagcagctccaggccatcatcatggcagctgcagagaccaaatctcctgttatccttcaggtttccaagggcgcacgcaactatgcaaaccagactcttctccgttacatggcagaaggcgcagttgcatatgcaaaagagcttggatgggagcatccccagattgtccttcatcttgaccacggcgacagcttcgagctttgcaagagctgcgtagacatgggcttcagctcagtcatgatcgacgcttcttcccttccttacgaagagaacatcgccctcaccaagaaggttgttgattacgctcatcagtacgatgttaccgtagaggcagagcttggcgttctcgcaggcgtagaggatgaggtttccgcagagaagtctcactacactcgccctgaggaagttatcgacttcgctacccgcactggttgcgacagccttgcaatctctatcggtaccagccacggtgcttacaagttcaaacccgagcagtgcacccgtgaccccaagaccggccgtcttgtacctccgcccctcgcattcgatgttctccacgagatcgagaagaagctccccggtttccctatcgttcttcacggttcttcatcagttccccaggagtatgtagacattatcaacgctaacggtggcaaacttcctgatgcagtaggtatccctgaggagcagctccgcgaggcttcaaagagcgctgtttgcaagatcaacatcgactctgacagccgtcttgcaatgaccgcagctattcgcaaggtattcaacgagaaacccggtgagttcgaccctcgtaaataccttggtcccgcccgcgacgagatgaagaagctttacatgcacaagatcgttaacgttcttggcagcaacggcaaagccgaataagctaaagcatcaagtaacaaaaaagtcttcaggaacccctgaagacttttttgttgtcgcactacgggcttagcgcagatcccaggcgaggtggccggggcagacgccggtgtctatgcgggagataagcgcgccgtccttgccgaaccggtacagggagccgggggaggtgtagttgcctttatcggcaatgtaaatatctccgtccttggggttgatccaaacgccggacggggcaccgaagctggcaaaggcgctcaccggaacggggaaggaggatacggtatcggtctccgggttatagatgcagttgctgcttacccaatccatcgtggtgtaggagaaagcagtgtcaaaaatgtacagcttgccatcgtagacatcggcataggtgccaccaaaaccaaaggtctttacaacagcggaagtccttgtgtcatagatgattgagcacggagcaacaccgttgtagtcaccggaggaattgataaagaaagatttgccgtccggcatcagggtaagcggtgagtaagcgttaatgattccaaggaaaaccctgtcaacttctgtaaacgtgtcaaggtcgataacagagatgcttgcaatctcattattgccgccgccggtgaagtccgtatggtagctgcatgagttgagcacgtaaagtttgccgtcaacaatggccagcccctccggctcgtgaccggtggcgcaagtcttttcaacctgctttctcgtaagagaaacctttgctacgtaaccatcattggcataggaagttacgtatgcgtaaccgccatcgcaggcaatcatacggcagtttggaatctctacagcagccacgtgccttccgccgcgctcgcttatctccagaagattggaagcgttcacggtaacaagtacgaactcgtcagtaacggcaatgtcattagcgacatcgcccaggctgccgcgaaccgtagggttaatttccgcccaccagttgttcaacatggtgtaagtctgcaagttatagtaatccagggtggcgttgttgtggccccactggccctcgctcacaaagtaaaaaccaaggagttcggtgttgtctgccggatcttcatcatcgtctccgggcaggattggatcgtgtgacttgcgacaagccgtggcagcggaaaacagcatcgccgccagcagcaaatacttagttaagttcttcataatcaatattctattgttaattttatcaaaatatgccggccgggcatggggtagcgtgtcacaacctcatagtcctggtcaaatatgttgttgatgtccacgccgatacctcccttcgcccgtttgccgatgcttcctttccatgccatcgccaggtccgttgtataccacggatccagttcgtttgccgggatattggcggcatcggtatatcgtttgcccgtataaagccatgatacacaggcgtttaatcctttatagcccactgctgccacaagcgagcctgagtgcaggggagagtaggccgtgcggccgccataccatctggaagccttgtccgtgcggtcccgcgaatcctcgtaactccatgtggccctgaaggacgtttccacttcctttatatttaccgatgccgctgcgctcacgtccactccctttgctcgcaccttcccgtagttgataaccgaccagcggaactggctggccgccgggatggcaacaatcttgttgatgatgccggcaaggtaggtatcggcggaaagtttaaagactttgccgatgctgacatcggccccagcatccagctgcctgctatattccgggctaaggtttgttcgccctccgatgctgtaataaaggtcgttgaaggtgggtgcgcggaagatttccttgtaaaaagtgcggagcttaagccagctgaggccttcgtatgatacaatgacggtgggagtccatttggcccgggacttccaggcgctgccggcagaggttttgtccttgaaaacgcttgacaggagggaagtgtgtatatgccagccgcagccgggggaaacggcaatctgtgcggcagtaaggccggaaagcctcttggcccatggaaccggtgcggctgcaagtgtctcgctttcggaagaaaagccgttccggcggccgtcaattgaaaaaccggcacccagccagtcggaaggcctccaggcaagggcggcgtaaaaatagagctcgttctggcggtatttgttatccactttcatcacagccgcgttttgggtggggtcctggagataccggcaatagtcgcgggcaaatttgccgccgatgcgaagctgccaattccccggaaaagaagtctcccaggaggcttggatgaaggcagacctgtcccactggcggtcttttgaggaatactggtcgctgatgcggcgtacaaccgggccggggaggcctctttccgacttgtacccgtatgcgtttacagtaagtcctttccagttgaaatacagttccgagtgaagcgccctgatgtccccgttggtgcgggttgcggtggtgtcgtaggccggttcatggaaggtgaaacggtattttccgtcggaataaagccagccggcattgactgatgctttgatgtccctttttacataagaaactgtacctgagggatttacagtgccgaacgcccctgtcctgagacttgcgcgaaggcctgtcttttccggcgcccgtgtcttaagatacaccgatgcggccgatgccaggtctgatgccggttgcaggagctccgccttctgggcttgatacagagtcatcgactccaggttgtccagggaaaaccgccccagatccacctgtccgttctgggcgttgtccatccttataccgttataatatatgcccgtatgctgtgcgcccaaagacctgacattcacggtcttaaggcctccgactccaccgtaatcctttatttgcacgccggcgaaatacctggcggcatcggcaacggaagaagcgggaagcgcctcaattgtcttgcggtcaaggctggccacaggcagggcggcggatttgatatggatgatgcgggaagcttttacggtgtcagtgacagcggaggtggtatcatgggcaaacagcggagtggccgggccggcggggcccagttgcagaaatatggatattacggcaccaatcatttccttagtccgttgtttcacctaccactccggtcgcttccgcaagccccttctggcttggagaaagcagccgtaaaaagggctgctcccggaatcaggcagtgctgtctgctgaatgttgaatttgtggatgcaaatataacaagaaaaattagtacatttgtaggacgtgaatatgaaaattattacaaatatggataaaataagctacgcattgggaatgagcatcgcccacaaccttgttcagtcaggggtgaaagatatcaagacagaagatttcgtagacggccttaaagccactctgaacgggcaggagcccaaggtttcctatcaggaggccggaaagatcctggaggattacttcagcaaca

SEQ ID NO: 506 - DNA, 23630 bp, synthetic construct
  source 1..23630: mol_type = other DNA
  misc_feature 1..23630: note = Synthetic
ggaagggaaatgagtgatttcaaggaagttgcgttggatttccttaggaacctgttctctttcgaccaggcccatccgctgttgttcacccagttctatttctgggcgttcttcgccttcgtgatggcattcctctgcctcttcaggaacaaaaccctgatgaggaacgccttcctgttcttcgccagcctgttcttctattacaagaccagcggactgttcataatcctgttcggcttcgtaatcgtttacaactacctcacaggcaggctcctgcctcattgcaggaggcggttttgtaagggtctggtgctgttcctggggattacggtcgatttgtcgctgctgttctattacaagtacgcatacttcctgaccgacgtggtcaacaacctcttcggtaccggattcgaggtgaaggattatttcgcagtcgccggcaaccttatcgcagggcacaacgcgttcagcgtggattctatcttccttccggtaggaatatcgttcttcaccttccaggccatcagctacatcgtagatgtgtaccggggcaggtatgcattgcttccggtaaagaatttcttcgatttcgggttctacctcagtttcttcccgcagctcgtggccgggcctatcgtgagggcggatgaattcatcccgcagcttcgcaagccgttcttcctgacccgcaagcagttcggaatagccatcttctggattctgaacggtttggctaagaagctgattatgagcgacttcatcgccattagcctgtgcgacagggtgttcgagaatccgacactttacaccggcttcgagaatcttctcgcgatgttctgctattccctgcagatatatgctgatttctccggctataccgacatcgcaatcggtacggcgatgctgatgggtttctaccttccgaagaacttcaactctccgtacaaggccaccaacatgtctgtattctggaagagatggcacatatccctttccaggtggctgaaggattatctttatattcctctgggtggcaaccgcaagggtacggtctggtcctatctgatcctggtctgcacaggattcctggcttccgcgctgaacaagagctggtggatgctctgggcgacgctcgcccttacggcggtactggctttcttcatcatattcgtgaagaagagccggaaggaactggtgtcggatgtcaacaggatggacaccatgctactgggaggcctttggcacggggcgagctggaatttcatgatctggggtggcctgaacggactggggatgataatctaccgcttctggagcaagtgcaacgtctatgtccgtgccgcgctgacggcggtggtctccggaatcctgtacttcctggcgaccaactatccttctccggctttcaacctgttcctggtgtggatcctggtcattttcacagggtccctggtccacatgctttaccattcctgcgggttcaaggctggattcaagtggctggcaaacgcctgggccgttttcaacacgtttgtgttctttacattcacgatgatgttcttcaggagcgggtccaacatcgatccggccgaggccaatgcgaaggcatgggagaatgcccggaacatcatagcccgtataggaggaccgtgggacctgagccttatcccgaagatagccgcccagcacagggtcgccatcatccttttcatcgtcgggatgctcatccactggcttccggaccgcttcaagcggcgctaccgcatctggtttgcgaatatgccgcttcctctgatggtcctggtctgcgcactggcggtattcatcatctgccagttcctgaccgccgacctccaaagtttcatttatttccaattctgacaactgtatgaaaagaacgatcatacttacactgctgtcgcttgcatgttccttttcgaacgggcagaccaggctcgtcgcagactttccttccggcagcgccccggggcaagtcattgtccaggtttacgacggcgaaaggcgagatacagtaatttatgttcccgtggtggacggcaaggtggatgtaaccttcccttcagacaagacccgtcggggaactttcgggcttggcagttccgcccatttcatcttcgagccgggtaccctgaccttcttcatcgatgaatatgacgtgatgcgggtcaaggccttcgagggttccctgaccgacaggctttctgccgaaacggcgttccgctggaagatgaccaaggccttgagcgacaagctccacgaactgggagtggataccgccctggatgacgccaggaaggaagagttgttccaggagttctacgtcgagcagcgggaaacgatcagggactattatctttccctgttagacaagaatcgcgacaactatttgggaatcaaggcgatatcatcacttcagcccatctattccgggaggccggaggttctcgattccttgatggccaagctttcggaagaagcgcaggaatgcagctacatcgtgagtttcagggaagcgaacaagaccaggatcgctaccgcagaaggccgcatgttcaccgatttcgaggtaaggcagccggacggaactgtccgccgcctctccgattatgtcggcaagggaaagtatatcctcgtggatttctgggcttcctggtgcggcccgtgcagggaagagattccttacctcaaggaggtctggagcgagttcaagggtgatcgtttcgatatcctcggagtcgcttcatgggaccgtccggcaagtaccatggcagccatcaaggaattgggcataccttgggaccagatacttgacgcccagcaggaggtaacgtcactttatgggattgagggtatcccgcacatcatcctgttcgctcctgacggaacgatactcaaacgcaatctcagaggagaaggtataaggaaagccgtcgccggctgcctcagcgactgacggtcacagagacgctgttctccccggctgccctgatatcggaagcaagggattctgcttcggcttttacgtcgaacggcccgactttgaatatcaccgcaccgttgtcaacggtcttgatgagatcctgtccggaataatcgtgtatcctcgctatgacttcctcagggagggactggccgttctccggatatatgaccacgatgtaaaccgaaagttccgattccaggttcctggccttggaaacaccgatggactgtccgttgctgaaggctattatctcggcgttgcggaagcctctgctcttgaccttgttgatgttcgagagggcgtccctgtatgaattgaacaaccctgcggcataactgtagccggatgaagtcttcctttcataaaccggactcagtcctttaaggtcagccagggaagccttccttggctggctgaacagcttgatctggtaaaccaatccgtccggcagggtgttgctgtcggcgaaacgggcctcgttgaggatcttgaaagaatagttgatcttcggtttcgtgctgctcatcctgagctggagattcggacccatttcgcgtctggtgaattcgaaatgcgaagtgtttccgccgtcagtccgactggcttcggcctcaagcttcctctcatccgggacaatgccctttgacaggaattccatttcgatctcctgcagctggcctaccgctttctgcagagcctcgttgagggcaggcagctcttcctcccttgaagcgatgacatcggcaatgttctccttcctctccggatcggccgtggccatcattgtccttagctcatccatatgcttcctgtaagccgagagggagtctcgcaaagcccggacttccttcagcttggcgacatacctccgggtactttcgttctgcggttccgtgccttgcccgccagcctcttcttcctctgtcccttcgtgaattacttccagggcggcaagttggcggagttcatccacgtcatctatcgacttcctgacaggaacctcgtcatattcaagaacatagatacatacgctgtccttcgggcaatcgcggttggaggcgaagagggaatatttcccgtcttcggaattcatgaacagcaggtcatcgtatggcgaggaatacgggaagcccatgttcactggcacgtcccaatccttggtgtccttgttccagtgtgaaacgtagagatcgtatcctcccattccgtagaggcccttagaagcgaagtacagggtctggccgtcggccgaaagcatcgggtagatctcgtcggatgcgcttgtaagccgttctccgatcagcgccggcgccgaccagagatctccgtcgagagtggtcttgtagatgttgcggatgccgtcgtcgtcgtttgccgaatagtagatctcgctggcgttgtcaggaatatatacagccctggccatcaagtgtttcccggttgaatccagttggttcggagtaggtctccagcttccttccggaagcggatagtagaggaagaaatccttcagggagacaaccttcctggcgatgaccgcaggctggctgcagtagcccatcatgctcaggccgttctgggccaggatgagaggctcttcgcacctggagcgtgcagtagaatccagccgtatcgctttctggcataattcgagggctgccgggaaatcgtaggccatcctggcggaatcggaaagggccaacagtcttttctgggtggtctgggcatatgttccgacacaggtcaggatcgctgcaagcaaggcggaaatgcttaaggatagcttctttctcatctcggaaaaacgcagtcaatgcatctgcaaaaataagaaatacttggcagataatttctttctaagaaaaaaatgctaaatttgtacccttatttttatgcgaagtaactaaaacaataaaaaataaaagtaaaaagttatgcaaagtaaaggttggatcaggctcgtcgccattctgcttgcgattgcttccctctggcagctttctttcactgcagtgacagccatccaggaaaagaaggcggagaagttcgcggaaaaggcagccgtcgcagcccaggaagccgcagctttcgcccagatccctgtcgagaatcaggcatattacctggattctatcaggaaagaacagaacagggtctacatcgattcgatttcaaacaagaaggtttatctctggaacacctacaaggattgcaaaacccaggaaatcaacctcggtcttgaccttaagggcggtatgaacgtcatgctgcaggtgcagctccaggacctcgtgaaggctctctccggagacaacatgaatcctgagttccagaaggccctcgctctcgcaaaggagcgcagcgtcaattccagggacgattatataaccctcttcgccaacgcttggaaggaagtttccaacggccagaggcttgcccagatcttcggaacctacgagatgaaggacaaggtaaagccggagtccaccgatgccgaagtcatcaacgtcatccgcgaggaggctgagagtgccgttgcgaactctttcaacgtgcttcgtaaccgtatcgaccgtttcggtgtcacccagccttccatccagaagcttggaaacagcggaaggatcctcgtcgagctccctggtgtaaaggagcctgagcgtgtgaggaagctcctccagggtaccgcctccctcgaattctgggagaccttcaccaaccaggagatttccggatatcttgctgaggccaatgccaagctcgctcagatcctcgttgaagaacctgccgacacggcagccgctcctgtagcagaacctgcagccgaaccggctcctgcaactgaaggtaccgactccctgctgaacgccgaaatcgcgcagaaccgtaccaacagcgaggaactcgaggcttacaagaagcagaatcctctcttcgccctccttaccccggctcagtacaacggaagtgcttgcatcggttacgcatccgcaatcgacacggccaagatcaacaagtatctggctatgcctcaggttgccgagatattcccttccgaattcaggcctatgtggacggtcaagccatcagaggctatcgattccgacaacatcttcgaactcgtcgccatcaagtccacttcacgtgacggaagggccaagcttgacggtggtgtcgttaccgacgcccgcgtggtttacgaccatggttccaacggtgagccgtccgtttcgatgagcatgaacgccgaaggcgccaacgtttgggcccgcatgaccggtgacaacgtaggacgccagatcgccatcgtcctcgatggtatggtgtattcctatcctaacgtcaacagccctatcaccggaggtcagtcttccattaccggtcacttcactccggaagaggctaccgaccttgtaaacgtcctcaagtcaggtaagcttcctgcccctgcaaccatcatccaggagcaggtcgtgggaccatccctcggtgcgaagtccatcagggcaggtatgatttccttcctaatcgccttcctgctcgtcctcctttacatgatattcttctatcagggagcaggacttgcagctgactgcgctcttctgtgcaacgtgcttctcctcttcggagtcctcgtttcattcggagccgtcctgacactgcctggtattgccggtctcgtcctgaccatgggtatggcagtggatgcgaacgtgattatttatgagcgtatcaaggaagagcttgcggcaggcaagggtctgagcaaggctgtcgccgatggttacaagaatgcatattcagccatcatcgacggtcaggtgaccaccctcctcaccggtatcgtgctctttatcttcggttcgggtcctgtccagggcttcgctacgaccttgatcatcggtatcatcacttccgtcctcacttccatcttcatcacccgtctgatcttcgacgaccgcatcaagaagggcaagaacatcaccttcgagaacaagctgacgaagaacttcctgaagaacacccacttcgacttcatcggagcccgcaagtggtcctatatcatttcaggtatcctgatcctcatctccctggtttccatcttcaccaagggcttctcctatggtgtcgacttcaccggaggccgtacctatgtcgtccgtttcgacaagcctgtgaccgctgagcagatccgcgaggcagccatcgcagagttcgacggagctgtcgaggtcaagcagttcggtggtgagagccagatgaagatcacgacccagtacaagaacgacgaagagtcttcagacgtggatgcagaagttgagggcaagctctacaaagctctccttccttacttcgaggaccagagcctgactctcgatgaattcaagtcctctctcggcaacgcgaacggtatcatctcatccgacaaggttggtcctaccatcgcgaacgacatcaagagggacgccgtgatcgccgtgatcatcgccctcctggttatcttcgcatacatcgcgttcaggttcaagggctggacctggggtctcggtggtgtggtatcccttgcgcataccgccatcatcgtcatcggtttcttctcactgttctccggtatcctgccgttcaacctcgacgttgaccagacgttcatcgcggctatcctgaccatcatcggttacgccatcaacgataacgtggttatcttcgaccgtatccgtgaatacaggcagaaccatccgaacaccgacctcaagaccaacaccaacctggctctcaatgcgaccctgacacgtacggtcaacacttccatctcgaccctcgtgaccatgctcgcaatcgccatcttcggtggtgagtccatcaggggtcttgcagtcgccctcatcctcggtatcctgatcggaacatatgcttcgatcttcatcggtacccctgtgatgtacgacgcaaccgtttccgcccagaagcgtcaggccgagaaggctgtcaagggtggcaagtcttccaagaagtaattctggatacatacataagaatggcagaaggtggctgagtcggccaccttctgctttttcatatttgcttatgaatgatattagaagtacatttgcataatatacttaataacacaaaaactgattttacttactgatagttatgagcgaagagaaattcaggattgaatccgacctgctcggcgaactccaggttccagccgatgcgtattatggtgtgcagacccagagggccctcaacaattacaagatttccaccaccaggatgcgcgattatccggaatatgtcatagcgatggcttgcatcaagctggctgccgcccagaccaacaaggaactcggtgcccttgacccggaaatcgccgatgccatcatcgctgcatgccgtgagatcatcgacggcaagctgcatgaccagttcccggtggacatgatgcagggaggagccggtacttccgtgaatatgaatgcgaacgaggtcatcgcgaaccgcgcccttgaaataatgggacacaacaagggtgagtaccagttctgctctcctaacgaccatgtcaattgcgctcaatctacgaatgatgcatatccttcagcattccgttatgctttcatcaggatgaacagaaagctcgagaagagcctccaggacctgatcgattccttcaggaagaagggggatgagttcgcagacgtgatcaagatgggacgtacacagcttcaggatgccgttcctatgacttccggccaggagttccatgcatatgcaaccaacctttccgaagagatccagaacctcgagagaaacgtcaacctcctctatgaaatcaacatgggtggtactgccatcggtaccggactgaatgccaagccgggctttgccgagctttgcgccaggaagatgacggaactcaccggggagaagttcatcgcagctccggatcttgtcgaagctacgcctgacaccggtgcttatgtaagctattcgggtgccctgaagaggcttgcagtcaagctttccaagatttgcaacgacctgcgtctgctgacttccggtcctcgttgcggtctgaaggagatcaaccttcctccaaaggctccgggatcttcaatcatgcctggaaaggtcaatcctgtcatccctgaggttacaaaccaggtctgcttcaaggtgatcggtaatgacatgaccgtttccttcgcggccgaggccggtcagctccagctcaacgtgatggagccggtcatcgcagaatccatcatggaaagcatcacctggctgaccaatgtcatgaacaccctccgtactgagtgcatcgatggtatcacggtcaacagggagcgttgcttcgacatggttaagaacagcatcggaatagtgactgccctaaacccgatcatcggatacaaggccagcaccaaggttgccaaggaggccctggagaccaaccgttcggtctatgacatcgtccttgagcacggcatccttacccaggagcagctcgacgaagccctcgacccgaagaacatgatccgctaggtcttcttgcaattaatgaataagaggtcggccaaacaggccggcctctttttgtattgattcactattattgtttgcttctttgggcaggggttgtacctgagagaactacgctcacttcgttcgctccggcccctcccacaatctacggcgtcccgcaaaagcggaacttgtatcttgcgggccccgccccctgcccctgtccgggggtggacaggtctctcaggtgcaaccccagccaccaaagatacacgaccaggctctttgagacagcgttttatcgttgttattgtaagattaaaaaactacctttgtttatactaaataggtcccacggagtacgcaggaccataggaattaatccttcggcatatagccttattgtggcaagatttaggattacttgcaatgcaaatttagcgttttttcataagaaatcaaatcatggaaaaggtattgggtcttgaccttggaacaaattcgattggttgggctgttatcagtagggaagatgatggatcttgtagtctaatagacaagggtgtgcatattttcaaggatggtgtttcccatgacaagagtggggagaaaccagctgtgcaagagagaacagcagccagagcttctcgtaggcactatttcaggcgcaggttacgtaagatcgagttgctaaaggttcttacagagtatggtctttgccctcctctcacgcaagagcaactgaaaaagtggaaagaagagaaagtttatcctttaacagaggcctttttagcatggcaacgatcaggtaatgctgctgatggtaatccttactatgatcgttatgtagccttgacccaaaagcttgatctgtccgatatcaatgacaggtacattcttggtcgtgccctttaccatatcaatcagcgccgcggtttcttgagcaatagaaagaatgcggcggaagattcggaagatggtaaggtaattcaagatattagtcagttgtcagaaagcattgagaaatccgggtgtcgatatttaggagagtatttctataaggtttttcgtgaaggagggaaaattaggcggcagtatacagctcgcgttgaacactatcacgcagaattcaaagctatttgtgagaagcaaggattagatgctgtgttaaagcattcgttggagcgagcaattttctatcagaggcctctaaagtcacagaaaggccaaattgggaaatgcagttttgagccagacaagcctcgctgttctgtgtctcatcctaaatatgaggagttccgaatggaacagttcattaattcgattaaggtacaaagaccagaagaggattccctaactagtctcactaatgaggaaaagaaatcaataagacccctattcttcagaaatagtaagccgagctttacttttgaagatattgcgaaaaaactagctgggaaggggaactactcttattttgaagaaaggcgcgatgacatctatcgattcaactaccggatgtcagtcagcgtttctggttgtcctgtcacaacagctcttatcaatgccttggagcttgattcttttaacgattgggagacagaactatgtgctgtttacactaaagccgaaaggaaaaccacaaatgagattatcaacgatatatggcatgctctgttttcatttgatgataatcgactcctttcccaatggcttcggtcttctctccaactgagtgaagaaaaggctgaggccttggcaaagtgccgtataccgcaaggatatgcatcattgagtttgaaagccatcaacaagatattaccatggcttaaaaagggattggtttatagcgatgctgtattctatgctaatttacctgaggtgcttccgtcttctattcaaaagaatcccgcaaagatgtctgaaattgaagagaacatcaggataattctggaagatactccaaaagatcagaaacagagggagtctagtaaggtaaagaacatcactgattatcttcttggagtggcagatggtgttcgtccacagagactttatcatccttccatgattgaaacctatcccgctgtcttgcctgacgaaaagggacgcatccatttgggatctcctcgtattgagtctgtcagaaacccaatggcgatgcgctctttgttcaggttgcgtgctcttcttaatgaactacttgatgatggagttattgatcctgatactaagattaatattgagtttgcccgagaattgaatgatacaaatatgcgaaaggcaatcgcagatttgcagagggagaatgaaaccattcgcaaaaaggattatgaagagatctgtcagataatgggagaggggtacgaaccaactgaagaggatcttataaaataccgactctatgaagagcaaaagcacatttgtttatatactgggaaacaaattactccgcgaatgtttcttgggaacgcacagatatttgatattgagcatacaatcccaagatcaaagggaggtgacgactctttagcaaacaagactctttgtgacagcaagttcaacagggagattaaattagccaaattgccttcttctttggaggaacatgatcagattcttcaacgaatctctaactggaaagatgtcatagaaagcctggagatacaaatgtccattcaaagaaacaaagcaaggaatgcgtcatcaaaggaagagaaggattcagcaatcagaaggcgtcatttcttaaggatgaagagggattattggaagggaaagtatgatcgattcataatgactactgtacctgaaggcttttcaaaccgtcagggcgttgatatcggcatcataggtaagtatgccagaatgtatctgaacaccgtattcaagcggatttatatagtaaagggttcaactacagcagattttcgcaaggcatggggccttcaaaacgagtatacgaagaaagaaagggtaagccattctcatcattgtattgatgcaataaccatagcatgtattgggaaaaaggaatatgaaacgtgggctcagtacatgaggaaagaggaggattatcgtttcggcaggggtgtaaaaccgcattttgataaaccgtgggaaacattcacagaggatgtccttgcgatatcttcaggacttgttacatctcattattcaccgaacaatctttccaaaaagagcaagaaaaagattcgtgtgcgtggggttatacaaaggaatgctgatggaacaccaaagtatgcacaaggacacgcggctcgtgttctccttcacaaagattctttctacggagccattcagaaagacggagagataagatatgtaattcgaaaatccattgactcaatagaggagaaggatatctcaaagattgttgacgatgttgttcgtgccaaagtaatggaggcagttgcccaatatggaagtttgaaaaaggctgtttccgagactatctggatgaataaagataagaaagttccgattcgaaaagtcagaatcttcgctccaatgattacttctcctatcgccttaaagccccatagggatccttctaataaggagtacaagcggaacttttatgtagccaatgatagcaactattgcatggcaatctatggaagcgataagacatcattcaagttgattaactctttgtccgccgtgaatcattttaacagaaagcctggagtttgggttgaaccttgtgatgagaaaggtcgtcttctaaggtgtgtcgtaagaccaggaacgatggtactcttctatgagaaatctccggaagagctatattcttgttcccaagcagacttgtcaaaacgtctatatgaagttatcggattatctacgcaaacgattcagaataaatatcattatggaatacttacgctcaagcatcatttggaagcaaggccgtcttcagaattaaaagagaaaaaaggtttatggaaagtaggagaggatattcgcccgattatcggtataaaccataatcagactatgttccttgtagagaaccatgattttattctaacagttagtggcagaattcactttttgaaagaggaattgtgatgaagcgaacaattgttttttccagtgcatgtcgtatttctcttaagaattgtcagctaaatgttgagaatcaagatagtggagaattgacccggataccagtcgaagatttggctattgttatcatagaaaaccagcaagtcagtatttctatacctgcactgaatgctttggcggaaaacaagatggattcactatgatgcaatattcggtatatatccgtcattgtccttcaaaggagaatcgagacgtccatgtaaaacgtgtaaaggcgactgttccagaagaggggatggtaagtatcctatccgttacggagaagcagtatggtgatatcatcaatttgtggggtaataaacaggcacctttgcctggggttcctctacaattagaattgttttagatctttgaattattgtttatttttgaactattgagggccacttcttcaatatagtttcagtttttgtccgaaggaatattggataacttattgatatataatgtattgtagagttggggttgtggcttgatttaggatagagataaggaacaacccattgaccaaacttgtaatgcaagaaattgttgtggcttgatttaggatagagataaggaacaacatggacgccgaagaaccggcagatctcaaggttgtggcttgatttaggatagagataaggaacaacgccacggaactgcttggctgcatcgctccgttgtggcttgatttaggatagagataaggaacaactcggatgcaagaacttattgacataatctgttgtggcttgatttaggattggaataaggaacaaccacaaaaattgcacaaaaatgcgcccaaagttgtggcttgatttaggattggaataaggaacaacatagtccgcgaaacagtaaatcaaagaaggttgtggcttgatttaggattggaataaggaacaacacggactccgacaacatcggatggcgtctgttgtggcttgatttaggatagagataaggaacaacaatggcaagctacatttcagaaagcggctagttgtggcttgatttaggatagagataaggaacaacgtcagtcatccgggactatttgtctctcagttgtggcttgatttaggatagagataaggaacaactacccttccggctgcatcctcgcactcaagttgtggcttgatttaggattggtaaagaactgctgaaataaaagacgaagctaagaagccggcagatactgacgggcctgtccacccccggacaggggcagggggcggggcctgcaagatacaagttccgctttagcgggacgccgtagattgtgggaggggccggagcgaacgaagtgagcgtagtccagtcagtatctctggcttcctagctcccggctattcctgtcctgctttggcgaaggctttctgggagaagaacatcacgatggcgaggaggatgaagaggccgatggagccggctaggaaggcgaagtctcccatcttgaggagtacgaatatataggcgtacagcaaggtggcaaggccgccaagggcaagggaatccttccacgaaccaaggactgatttcatatagaggaccatcagcacgatagtcatcgccgctgcgatcaggaatgcccagccgaagccgatgtgctccgagaaagagaacagaagggtgtagaatatcacaaggtcagctcctgtcaggatatactgcaggtagttgacctttttccctgtccatatttccatcaggaagattgccagcatcgtgatcaggatgatgagaagggcatatttgcaagccctttccgaaagtctgtattgcgatactgaatcgatgagtccgacacccgacagcgaagaccccgtgagactgtggacattgcttgtctcgcagacttgagggtagtccctgttgagcgcgttcaccttccacactgcagagaatccgttgtcgtccacgttcctttctgaaggcaggaaagcaccggagaaggaaggatccggccagtcggaggtcatcttgacaacgttggtctctccgacaggtgccacattgaaggaagccgctcccttgaggttcagcaccaaggaatattcgatggaatcctttccgttcagcaagccttccggaatcaacgccaccagttcgggattctggttgctcatcctgtccgttttcactctgttggagaacttcaggctctgtcctccaagcaggatatctgcttggtcttcaaggcctttgaggtctccaaggctcagacagagccgagcctcggtggcaggagtcaggaaattgccgacctcttctccgaaagtgaaagcgccgccggccttgacgttgcttctgtacacagggaccttgaatattccccttttcaaagttgacgaagtgagatcgatgtcggcattgaatgattccgggaaaacgcacaggtatttcttctgttcttccttctggttgatcactgttttgctaaactcgatgtaaggccctgtgatgaattggcgtcctccccatgaggaacccacttcggagatggcctcttccgccgtatgcgaacggcttcgtatggtatccttcagaaaggatacaggaatgaggaggagcagggacagtcctgccacgaagaggagtttcagggcttgcctgccctggaatttgtttgtttccatttcgccttatttattggtatctttgctaatgcaaccaaaatcgagccatatgcgaaacggaatcttttacattgtgaccatcgccctgtgccttgctggctgccagaccgccaggcattcgacagcaaccatcaatgcgggaaccttcaatctccgttgtgagaacaagggagattccctgaacgggaacgggtggggaaggaggtgtccggtgatggcctcgctcatcaagttccatgatttcgaaatattcggaacccaggaggcgagcaagaggggtcttgagcagatgcgttccatgcttccgggattcgattacataggtgtaggaagggaagatggcaagacgaaaggagagcatgcggcgattttctaccgcacggacctgttcgaactgcgtgacagcggaaacttctggctttcagagactcccgaggttccgagcgtgggatgggatgctgcccttccgagaatttgcacctgggggcgcttcaaggtgaaggccacaggccaggagttctgctatttcaacctgcatatggaccatgtgggagtgcaggcccggatggaaagtgcgaagctggtagtccggaaggtccgtgagacaagccatgggctgccggtaatcctgacgggcgatttcaatgtggaccagaccaattcaatatattcggaaatagttggaagcgaggaacttcaggacagctatgagacttgcgaactgcggtacgcctgggacgggactccgaacaacttcaacccttcgagtttcacctcgagccgcctggaccacgtgttcgtttcgccggagaccagggtgatccggtacggagtcctcaccgacacttaccgcacgatgactgaagaggccgccaagtacaaggacggcaacttcccgagggaggtgtcgttccaggcttatgaggcccgcactccgtcggaccatttccctgtaaaggcagtcatagaactgaacgggaagaaggtgaagccggccatcggaaagaagactctcgatcctgaaggctgggcgccttctgtctatgccggtctcacggaaatgatagccagggtcgggaatacatcgccggactatgatccttcctgcaagccctatgcagtgttcgatttcgacaatactaccataatcggcgacatcgagcacgccttgttcaactacaagatcgagaaactgaaataccgcacagctccggacgagatgttctccctcctgacaagcagccttccgagtgcggacttccttctggatatggggggaggacgaaaagtgcccgtcagggctctggtaaacgacatcgtttccgactacaggttccttttcgggaaaccgctcggggaagtggaagggactttggaatatttggatttcagggcaaaactgaaggcgatgtattacgcattggtcaggactatctcttacgagaacaccgccctgtggctgaagagactgcagaccgagggaatgacagtcgaggagttcaaggccctggtgcgtgaatctacggcatattccttcaccaagggaggcaacgccccgaagacctggacgagtcccgtgatgggtgaagccggatatgtcaccgtgaccaccgaatacggccttggtatctccaagaatatgaaagacttgtatgccaagttggaagccaacggaatcgttccttatatatgcacggcgtcgattgaagaaaatgtcacggctgtcgcctgtgacggctcgctcgggataaaggttcctgaggaaaggatattcggagtcaaattgctgaaggatgcttccggacgtttcacggatgagtacgacccggaatgggtcctgaccgcaggcgccggaaagacagagaccatcctcaagaggatcgctccgttgcacggagggaaggggcctgttcttgtcggcggagacagcaacggcgattatgaaatgcttactgatttcccggatatgcagtgcggactcatcatcaacctggacaggacggaccctatacgttctctctacaaccagcaacctcggtatctgctccagggccgtgacgctgcgcatagccgtttcgttcctaattcggaaagccgggacaggaagatggtcatggcccgtttcgttcctgaaagggaggatgacttcatattcgagaacaacctgtcctgcggcaggatttacggtaaagccttggagaacagcatcatatctccgggagtcgacatctgggtgaagacccctggaggcctggtcgccgacggccggtatgccgggacgcatgaaggcaggtccttccacaaggactggggcaacggcaaggactgctaccaggtggggatttccctcggcggtggagcttcttctccgatcgtgggaggcaatctggtattccctgcaaccaactatcgctcatacgaggtactcgaggacaatcctgaaagggtcgtattcgtgctccactacccggagtgggaggccggcggaggccggatcgccctcgacaagaaggtcaccgtggtgccgaacacatatttcttcaaggcggaagacacctataccttctccggttttccgggagataccctttccatcgctgctggaatatccctccacaaggatctcggtaccgtggcttctgaatattccgattcaaggagctgcgcaatctgggagaaagcttccgaccaggcgcaggaaaaggaggacgggatgataggagtcgcagtcgtgatgcctgatgccggatgggtcggggcgaccgcagacggatcgcacctggtctgtaccaggaccatccgcagcggcgagaccgtcacctactggttcgggaactgctggagcaagggcagcatcaagactcctgcgaagtggttccatctgacagccaatcttttgcccgaataaaaagaaagtcctatatttgagaatcaaaaccttgttgacgttatgaaaaaattaggatcattggcgtgtgccttcattctctgcgcgtcctgtctggtgatgttcgactcctgcaagggaaagacagccaagaccgctgaggcggacatcgaggagcaggaatccatcttcaacgtgattgacaagtacgttgccgaagaattcggcagccagtattcacagggcgatcactgtatcccgagcccgctgatcctggaagttgacgagtccgatcccggggacatcaaggtatggggagatttccgcgtttacaattacgtccagtccggggacactctcaagaccgtttccggaggcagccaccctggactccttcatctcaaggaggtcgatggcaaatttgaagtgaccgatttcaatgccgtagctgacggcgccgacaatatcccttcggccgaaaggatattcaaagacaagttcgacgctttccagaaaatggtatcggatgaagcggaccgggaggaggtcaggaacagggctatcgcggcctatgccctgaagcacgacctcgacgtcactgtctatcaggatttcggatgggatccggaggagataatctttgattgatcaggggtccagaaccttgattttcacattcttgtaccaggcctcgtcaccgtggtcctggagaagtatatggccggtttcgaagttcccgaaattcggccataccttgtatttgctgtaggctacaagggcattccacatctggttgccgcgctcatattccagcagtttgactccgttcagccagtgctccacgtggttgccgcaaacgactatcattccctggttgaaggccctcatcacgaaaggcttgtcttccggtgccggaatcaggtcgtacagtgcgcctagccgccggttgccgttcactcccagtttggcatccggatggtgttcatcgtcaagcacttggaattcacagccgatctcagacccgatcccggtgttggtgcccttctgtacgaaatacttcactccgctgttcgaagccttgaatatcctgaaatcgaacttgaggatgaagttcttgtaagggacgtcggtgatgatatccccgcccatgtccttggcgttgtagccgccttcttctccattggtcctgtggaccatcagcagcccgtcggcgatttcccagctcttttttgggaatccttcatatttcgcgctcgtccagcccttcgaggtctttccgtcgaacagtagtctccagccgtcggcttcctcctccggggtaaggatattgaaagaagtgttgaacagaggtgcgcatccttcttccggagtgatgaaggacgccacgtccttggtcattatgcggatgttccgccaggatatttcctggcccttcctggtttcgtcatctcctatattgtggacctgcaaggcgatgaatccggaagctcttccatcgtcgaatatattggcgcacgggactccgttgaggaaggtccgtatcctgttcccaaggcattctaccctggctttgttccattcccctgccttgaatgcggtctttgcggggcggttgaattccaggggatatatccaggcgcgcatcttttcgttgccttcgtcgtagattccgccggaccagccccggtcggaagggtctatctcaaattgatatcccctgaccctgccgttgtccacgtctttctcgcttacgcttcggaactggactccggagttcatcccgggaacgaccttgaaatcgaattccaggatgaagtcgccgtagtccttcctggtcacgaggaaggaattcggagtattgcagaccgtggttcctttgatggtaccatcgaccaccgaaaacttcgctttgcctcccagttgtttccaccccttgaggttgcgtccgttgaagaggtcggtccattcctgggcgccggcaagttggaagattccggcaataagcaggatggagaacaggaactttttcatattcaatgatttacaattcataaagatactcccagccgctgcgaggtggtacacctgtgagcatcgcatcggcaaacttgttgttggttatcctcttggtcacagggtcgaagaagagcctggtattgagtctctgtgcgatgactcccaggctgaacacctggttgaggacgccgttgatctcgaaaggagaccgggtcttttcctctccgcggatcgctttcaggaagttctcgtaatggttggaaggactcttaggcacctccggaagcttgctttccatctcctttgccttggattccgggattatcgacagggtggagccgtggctgcctcccttgaacgtgaggtcccgggaatatatgatcttgcccggattcagcttctcatccttgtaatcaccctggtttgtggaagggatgtccgacacgaactgggacttgccgaatccttccgggatcggagggaagttggtcacgccgtcgtaccaggtaaggtccaccggaggcatctctccccgcggtccgaaacggtagaaaatggtcgatgaatatgggaagaagaaatcgttatggccttcagctttcttcatctcgatctcataaggcaggcctagttcaaggaattcgtgggcggtatctataaggtgtgctccccagtctccgagggcacccatacccaggtcgtaccagcacctccagttgccctggtggaactgggcgttgtagtcgtgccaaggtgtaggaccgagccaggcgtcccagttcatattctttggaagcggctctgcatcagggaatttcttgatattggaatcgaaactgtgccagcggcgggcactgttcatatggacatcgatccgggtgacgtccttgatgattccggcgtccttccatgtcttgaactggtagtagtttgcatcggaatgaccctggttgcctacctgtgtcgcaaggttcggacgcttcctggctgccgccatcatcagttcggcttcgaagaaagtgcggcacatcggtttttccaggtagatatgcttcccctggctgagcgcgagcatagcgatggcgaaatgggaatggtccggagtcgatacgcacacagcctcgaatccgttgccgaatttgtcgaacagctccctccagtcattgaacctcctggctttcggaaagctctcgagtgcccatttgcactgcttcccatccaggtccacgtcacacagggcggttatttccaccagcccggtctttacgaattgcttgatgttctgctccccgcgattgcctataccgatgcaggccagcttgaccttctgggcctcaggtgcggttttgccaatcttttcgaagaggctcttagcctcaccctttccgacgcctgccaccatggaggcggtggcgagggtcgatgcctttatgaaattccttctcgaaaccattgtcgatgattatgttagtgtctgataaatatacggttaaattctgaaatccgccaatatgaaatagtggtcgctggggtacatattgcccttatgctccttcacgatctccgcataagtcgtttcaacaggcccgcggtggaagatgaaatcgatcctccgacccttcccacgagcttcgcccaggaaattgtggcacgtgaatccggcttcttccttcccgtgtatatcctcgtacatctcgctccagtcttcgtccgaatggatatactggatcggagcattcttgattccggaattgaaatcaccgcacagaatctgaggcatatccttggaatactggccgcattcctcgactatcatcttcatttgctccagcctggcctggtcactcttgtggtcgagatgggtattgatcacccggaattccttgccggttttcttgtccctgatcctcacccagttgcaatgccttgcgcggttggtcccccaggacatcgatccggctatggtaggggtctcggagagccagtagctgccggaggagacccactcgaagcggctcttcttgaacaaaatcacgttcttgccgatgaagtggtaaccttcagtccagggatccatctcagggccttcgaacccgaaatggtaataatcctttccgaatttcttcaggaaccaggaatatgagtcatatatgacttcctggaggcagatgatatccgggtcctttccctttatcgtactgatacacaggtcgcggcggttctcccagactctctcgggatacggagcgtcgtctgcgagtccggtgatcctgatattgcaagacattacacggtagttgcccgcgggacgtttcgcaccaaaggcggccatcggcagcaagactgccataaggcagagtatgattattcttttattcattggaaacaatttgattgtcaggttgttccgggc

SEQ ID NO: 507 - DNA, 23630 bp, synthetic construct
  misc_feature 1..23630: note = Synthetic
  source 1..23630: mol_type = other DNA
cgccgaaggcatacagatacccgtcagcgaggtggcgagcgtggaccttgtcagcggcccgttgcaaatcaaccgcgacgacaccaaacggcgtatcgttatcggggtgaatgtgcgcgacgccgacatacagcacgtagtggagcgcatccgcgagctgctcgaacagaatatcactctgaaacccgggtattatttcgaatacggcggtcagttcgagaatttacagaatgctataaacactctattggtcgtcgtccccatagcgttattcctgatcttgctgctgctgttcatttccgtcagaagtatagcctacactctgataattttcactactgttccgctgtctatcatcggcggcgttcttgcgctgtgggttcgcgggatgccgttcagtattacggcgggtgtgggtttcatcgcgctgttcggcgtatcggtaatcacgggcatactgatgatcaaccatttcctcgaacttgccaggcgtagcaaataccggatgaccaccctgaatattatccgtaaaggcacgccccgtctgctgcgtcccgtgttcctgacgggattgaccaccgcgctcggcttcgtccctatggccgtcgccacatcggcgggagcggaagtgcaacgcccgctggcgacggtggtcatcggcggagtgatcgtgtccaccctgctcactctcatcatcattcccattttctattacctcgtcaattcatcgagcgccgttatgcgaaaatccttcatgcgtaaaatattccgtcccaaaccgatattgccgctgttgttggtggcgatgatggcgactcccgctctcgcacagcagaccgttactctggaacaggctgtggcaatggcgaaggagaacgatccccgactaaaatcggccgaagcgtcgatagaagtcgccagagcgagcagaggtgcatcgtgggagttgagcaacacatcggtggactattcatggggtcagctcaacggccttaccagaaacgaccggcagcttaacgtcgttcagagcgtaggctctgtcatcacgcctttttacaaaaatgcgctcgccgagcggcagatcgttacggggcaacgtaaccgcgacatcgtggaaaaagagatcaccgccgaagtaacccatgcctatgtttattatctctacacgctcggcctggtgcggatatacggtgacatgaacagttttgccgaacagctcctccaaacgggcgaactccgctaccgcacgggcgacataacgctcctcgaaaggaatatgattgccacgcaggcagccaccatgcgcagcaaggcgttccaggcaggtgaggagcaccggctcgccgccgcgcgactgcaatgggcatgtttttccgatacctccgtcgtgccgtcggacgctgtgctcatgctgctgcctgtccgtagcctcgacgggccgctcggcgaaacgtacagagcatatcataacagtcttgcagaagaagcgcgggtgcaggtcagcatagagcgcagccgccttttccccgaactctctgccggatacatgcgccagaatatccttcccgacaaaggactgaatgcatggacagtgggcattaccgtacctctcttcttcacgccgcagaaaagccgtatcaagcaggcaagactgaacgccgaggtcgcccgttatgacgcgcagaccaacattcgcgaacttaacaacaaactcgaaacagtaagggccgatctgcgccgctatggcgaaacggtcgagttctatcgcatatcggcgctttccgaagccgaagcactgatagctgccgcaaaacttcaactcgaacacaacgatacggacataagtcagtttatccaaagcatgaacaatgcgctggaaatcaaacgggcctatgccgaagccatatatctttacaatgtggcggttatcgaatatgaattgtatcaataaaaccaaagtgaaaatgaaagccattttgatttctgtcgttgctttgacgcttgtttcctgcggtggccggaaaagtgaacagacgatcgtgcttgccgaacccatgtcggccggtatttcgatcacgatcgacgacgacccgcagacagatgccataagctccgcaacacgggcaaacaaccggccgacgttcaacggtatcctgaccataccgccccagtatcacgctacggtcacattgctcatggacggggtggtgaaaagcacgtcgttgcttgccggtaagttcgtgagaaaaggcgagctgctggccacgctcgaaaaacccgaattcatcgcgctgcaacaatcgtatatcgaaaaccacgcccaggaagagttcctcgaagccgaatatcgcaggcaggaaatattggccgaaggcgaagccacatcgaaaaaaacattgcagcaaagccgtgccgactacctgtcgatgcgaagccgccgggaggctgctgccgcgcagctcgttctgctcggcctagaccctgcacgggtgcttgccaacggcatcgtcccgtacctggaagttcgctcgccaatcgacggttatgttgccgatgtgcagataaatcttgggaaacacgtagccgcaggagaccccgtatgtgatattatcaacaaaaacatggcgttgctgaggctcaccgtttacgaaaaggatatcggcaaaataaacgtgggcgacaggatggagtttcgcgcaggcggactggcaggacaggttttcgaggctacggtgacctctctggggcaaacggtggataacgccagccgttcgatagaagtctatgcccgtgtaaacgaacccgtcccgcaatttcgtcccggaatgtacgtcaatgcacaattggcaggagagtgaggccgaaataaacggcagattatactacaatcgtaaagcagttcatcgaaggaatgcaacaagctgaaaatcaacggaaaacgcgctgggctgattcacgggtgcggattttcagactttgctgaaatattggttggacgacgtttagccttaggttacaaagcaccgtccatttactgccgaaaaggttgagtggaaatgagaaaatcccaaagaatcgtctgattctctgggatttttctttgtatgcaaattcgttataattatgtttgacccgaaactgctcactcccagtacgactccataacccgcttcaattcggaggagtcgtccgtgtcgccgtattcggctttcagttcgagcaggcgcgatttcatcgcagcgacaatctctgcaaaagccgcatcgccgtatatgttcctgttctgctgcgggtcggtggccagatcgtagagttcccagagccgcaggcccatgtcgggatcgcctttcgctatttcgcgctctcccttgccgtagaaaaatataagtttgtagcggtcgttgcggatgccgaaatgggcaggacgtataacctcgttcatccaatagcggtagtacatatcttttctgaaccgctcgccgtcatcgcctgccagcagacggcggaaactgcgcccctgtgcattttcaggcgtttcgcttttggcgtaatcggccagcagcgatgcgaagtcgatattaagcactatgtccccactgcgccggccggccggaatttcacgcgggtatcggactacaaaaggcatccgtatcgactcctcgtacattacgcgcttgtcgaaaaagccatgttcgccgagaaaatagccctggtcggaggtgtagatgactatcgtattgtcggcgataccctcgctgtcgagccagtcgagaaggcggccgatattctcatcaaccaccgccacacagcgcaggtagtcgcgcactaatttctgatatatcttgcggcgggcggcgacgctgtccagtcccgctgtcgagaacggcagttcgggatagtccgtccaccaactttcgggcgtctcggacgcgatcgtccaccgccgtcccatattttcgagttgctggccggggaaaacacgccccgacgcctgcggcccgaactccatcaggttagccggttcgggaaactcctcaacatggtcgtatatatgcgccaggcgctcgggaaagtggaacggctcatgggtcgccttgaaatgacagaacatcatgaaaggtttcgagcggtctcgggtcgagagccactctatcgtcttgtctgtcacgatgtcggtcgagaagccttcgacgaccgttcctgtgcgaccctcgcagtcgtctacccagtcgtgcgcccctttgaaaatcgggtcgaaatactcgccctgatcgtggagaaccgagaaatagtcgaaccccgaaggctgttttttgagatgccacttgccgataagcgcggtctgatagcctgctgcctgcatccgtttggcgatattgtcctgctccggtttcagcgcgtcgtcgagcgtatagaccccgttcgaattgctgtactgtcctgtgagtatcgccgcgcggctcggcacggagatcgaattggtgcaaaagcagttatccagcacgcacccctcgcgggccagccgcgcgatgttgtcgttccgcacgtatggcgctaatatgccgccgtagatcccccatccctgcgccgtatggtcgtcggaaagaatgaagaggatattgggacgctgctgtggagcagccgcagtcggaggcgctccacccgcagccggaacggcaaacaaagcggcgacagagccgctcaatatgtattttccttgcaccatcttttacaaaactaatgtctcagcgtgctgatgtcgagggcgatctctgcgcccgcggcatcgaacagcctcagacatatgacccctccgttgtccatgtcgaagtaatatagtttaatcgggtgcaggcctttggcaagcgctatctgtccgtcgatcgtgatcggcccgtgcggcccgtcattatctatcaccatttcgccgccgatgtaaagcatgctgccatcgtcggaagtgaggctgaacgtgtagatgccgtcgaccggcacttcgacgtagcctgtataaaccagtccgcgcttgccgcccactcctttgggcacgacaatcgcttcgacgacgtattctgccttgatcggaacggtctctatctgcgcgcatctgttaaaaataccctcgtgccatacgcatttcaggccgggtgtgtactccgcaacctcgaccgccgctcggtactcctctttgcggtagacggtgcggataatatcagccgcgctttggtcggggcggaacatacgtatcgtgaactcggtcgtttcgtcgatatgtatcgggccggtgtagggctgcgagttgcggtcggggatcgtgccgtcggtcgtgtaacgcagctcgacggcaggcagcggatagtcccacaccacactcgtctctccgacgaaagagttcacggcatagacgccgggaaggtcgagcgggcggtagttgacgccgaaacggtcgaggcgcgggaagtgcgccagaagacgcggatagaactcatcccactcgcgtccggtctcacccctccatgccacatcggcaaagaccggcatacgcgggaacgtcatatactgcatcctcgcccgcgatggaatatactcagtccacacattggcctgaatgccgagcagatgctctttctgcgcatcgtcgagtcccgccgggaccggcgagaatgcgtataggtcgcgcagagtgttcgcgtgttgctggtagtcgaaatagtaatgggaatttggagtgagaatcacttcgttgccctgtgcggttgcgagcggtacggcattgcgcgcccacgtgcgccaccacatcatgattgcggtcggcgaaaggccgccctccgttatctcatcccagccgatcattttgcggccgttgtcgataaagaactgctccatctgcctgacgaaccacgattgcagttccttctcgttcgcaagaccctctgtttttatcctgcgccggcaatgcgggcacttctcccaatttatcttctctacctcgtccgcacccagatgcgcatattcatacgggaacagctcgaatatctcggcataaacgtctttgcagaactgcaatgtccaatccttgccggggcagatgggcgcagagaacgtctcaccccaacccgcctggtcgaaacacgaaagctgcgggaatgccgcaatagccccgctcatatggcccggcatgtcgatttcagggatcacgtcgatgccgagcgccgccgcataggcaaccacctcgcgcacatcctcctgcgtgtagtagccgccgtattcggtcacgccgttgcgctcgcggagtctgtcctgcggcagcatgtaatcggggttatggtcgcgccgtgcaatcgcaatacaccccagatcgtggttattgaactgacgccagccgctcacttcggtaagttgcgggtacttctttatctcgatacgccagccctgatcgtcggtcaagtgccagtggaacttgttgagcttatagaaagccatcaggtcgaggaattccatcacctcctgcttggcgaaaaagtggcgcgacacgtccaggtgcatcccgcgccaaccccatgcgggcgcatcttctatccgcacggcgggtagccgcatcttgccgccatcggccggaaacaactgtctgatcgtctgaatgccgagtacagccgagcggggattggccgcttcgagccggacgccttttttggttacggtgagccggtaggcatcgtcatcgccgacttcgggtttcagcgacaggacgatatcgccgccgtcaccttcgcccgcaaccgtcatttctatgccggtgtccgctttcacaagccgcacgagcagctccgcctgctctttgagatcgtgagaggcatagctgacggtggtttgcgaagttaccgcaaaatatcctttgcccgtctccatcttcacgggcagggggatgatatttatatccgcagggtttacgggcttgtcgcacgctgcggcaaacgctgcgactgccaaaagaaacagtaatctcttcatatcagggttattatgttttcggtagtattatgtgttatttttcgaaactatatatttaacggcatatataacttctttattctatcctccctatcgggcggcggttagcccccgcgcggccggtcagcacatcgcccatatcctcgcgcgccgcttcgaccacccgcatcagctgctcgataacttcgggatgttgctcctgcacgtcgtagcgttcacccggatcacgccgcaggtcgtagagcgcctgcggaacgtccatattctctgaaacctcgcccggcctgccatcgttgcccggcaggtagccttcataggtacggcttcggtgcggcagcacgagcttgaactccgcattacgcactgcttggagttggttatcgcggtagtaatataggaaatactcgcgcgggttggtatcgggatcgcccatgaaaacccgcgtcatatccacgccgtcgatcttcttctcgggcagtcgcgcgcccgccatcgacactatcgtcggcagcaggtcgatattgaccgccaaccggctgctcaccacgccagccggtattttgcccggccagcggattatgaacggcacgcgcttgccaccctcgaacgacgttcctttgccctcgcgcaggccaccggtcgagccggcatggttgccgtaattgatccacgggccgttgtcggaggtgaacatcaccaccgtattgtcgtcgagtccgttatgtttgagcgcctttaatatttcgcccagactccaatcgagctccatcatcacgtcgccgtaaagcccctgctcgctcttgccagcgaatttatccgaaacgaagagcggaacgtgcggcatggtatgcgcaagataaataaagaacggtctgtcgcggttttccgtgatgaacctgaccgcacgttcggtgtaatccgtagtaagttgcgtctggtcctcgcccgtcattgcggggtttatcacctcgttgccttcgtagagcggcagcggcggatagtagctcccggcggtcggatgatagggccacatatcgttcgagtagagcaggccgtaatattcgtcgaatccgtggtcgagcggcatgaacggctgcttgtcgcccaagtgccacttgcctatcgcactggtcgcatagcccctttccctgagcagcgaggcaatcgtcctttcttcggggttcaggccgacgggggagttaggattgagcgcacccgcaaagccgagcctgttggggtagcatcccgtgagcagccccgcgcgcgacgcggtgctaacggcctgcgcggcgtaaaagttggtaagacgcataccttccgcacacatgcggtcgatattgggcgtgcggtatcctgtcgctccggcggccgtaaagtcgccgtagcccatgtcgtcgaggttgatcactatgaaattgggcggcggggatggctcggcggcgcatccggcgggagcgaataccgccgctccgagcaataaactcctgacgttatttttcatcgtatttatttccattctttttcatgtatgacattacattggcgggcgagcgacgggcggcaagttcaccagccataaacttcatgcaagcgtcggcatgagcaaagaacatccgatacccttcgcacaacgaatttaagcctttttcgccgttttccgccatatcgaacctgtgtttgggacactcgccgcgacatgcgaaaagccattcgcaacgcttgcactgacccggaagctcgtttcgcttggccagcccgaaccacatctgccgctggcatttaaccatgtccgccatcgtttcgtgcgcgatatttccgagccggtattccggaaacacgaagtggtcgcaagcatagacatcgccgttgctctctaccgccaacgcccggccgcaggtttcgccgagagtgcagagagcaggcgtaaggcccacgtactgagccagcaccgcatcgaaaaagggcacgaaataatttcccacatcatgcgcgacccagcggtcgaaaatgtctaccataaactgcccgaaccccgccgccgacaccgcccattcggcacgctgcgaacccggcgttccgggcggaactatcgcggcccgacagccatccccgaccgtatgctcgaccaccggcataaactgcatgtagcggctgccgaccgatttcaggaactcgtaaacctccgtgccgcgcccctcgctcatgcggttcaccgtgctcagagtgttgaactccacgccctcttcacgcatcagcgagacggcgtgcataactttggcgaacgttccgcctccggcacggtcgcgacggtatgcgtcgtgaatatcttcggggccgtcgatcgaaatgccgacaagaaacccattgcggcgaaataaactacaccatgcgcggtcgagcagcgtaccgttggtctggaccgtattctctatacggcgaccgcgcccgtgctttttctggtacgccaccgcgcgctcgaaaaaaccgataccggccagcaacggctcgccgccatgccagcagaacgagaccacttccgcagcattgtcagtaatatactgacgcacatactcttcgagcacgctgtcggtcattttttgcggctgcccgctctgtccgcctttgccgagataatagcaataggcgcagtcgagattgcaggccgaacctacgggtttcaccaccgaagcaaataccgtgcggcctgtcgcacgctgcgcatcttcgtatgtgaaaagacggttcaatatgcgaacaaaagattttcgcgaagttttcaagcaaagataagtacaattttcggtttcggcagttgtctctgatttcgcaaacgtagctgtctgataaaaaagaagctcccaccgaagcgggagcacaggataaaatccttcggcatatagccttattgtgataagatgtagaaatcttatggtgcaaatatacgtatatatttttatatttgtacttttattgcacaatatttcgaattatgaataagaataaggtattggggctcgatctggggacgaacagtatcggatgggcgattgtagaggagcggccggacggttgcgcccttcgtgagcatggggtggatatttttcaggagggggtgaagatcgaaaagggtatcgaatcgtcgaaagccgccgaacggacgaaatatcgcgccgcccgtcgccggctgatgcggcgcaaactgcgcaagatcagaacgttggaagtgttgtcggaacaaggtctgtgcccccgcattgtgccggaaagacttaaagcgtggaagcaggaggggcaatatccgctcgacgacgagtttatcctgtggcaacgcaccgacggggataagaatccgtatcacgaccgaaacgaagccctgacccgaaagctcgacctcagcgtgcaacgggacagatacattctcggcagagccatgtatcatctcgcccaacggcgcggattcctcagtaatcgcctcgaaaagaccaaagagagcgacggcgcggtaaaaaccggtatagatgaactcagccaagacatagaaaagtccggatgtcggtttctcggcgaatatttttaccggtgctattgcgaaggcgaaaaaatacgcacgagatacacctcgcgcaaagagcactacaatgcagagttcgacgagatctgccgcgtgcagcaactggacgaaaacttgaaaaaagaactcgaaaaggcgattttctttcagcgtaaactcagatcacaaaaagggctggtcgggaaatgcactttggaaaaaagtaaaagtcgctgtccggtatcgcacccgcgattcgaggagtacaggatgctgcaactcatcaataatataaagatacagaccccgatagatgaagcgttgcgtccgttgagtcgcgaagaaaaagaacagatcattccgctgttcctgcggaaaagtaagaaacagttcgatttcgaggatattgctaacaaacttgcagggaaaaacaattacgcttattacaaggataattcgggtaaaccgtatttgttcaattataaaatgaatacatctgtctccggttctccggttacggtatcgttgcaagatattttcggcgagcaatgggatgcggttcttgccgaacggtatacggcaaaaaatgggaaaacacagcagcagatagtcaatgacgtgtggcatgttcttttctttttcgatgacgacgaaaagttgaaagagtttgccatgaacaaactgcaatgctccgaagaagaagcgaaaaaattcagcgaaatacatctccctcaggattacgccgcactgagcctcaacgcgatagagaaaatattgccgtttctgcgtgaagggatgctctactcgcactctgtttttctggccaatatgggtaaggcgctgccggccgaagtatggaatgatcctgagagccaaagagttattatccgccatgttgcagatataatagacgacttccccaaagaaggtcgtctgccgatcggagatacgatagaatcacgtatcgcgagttttatagaggctcatttcaacgtgctgccttgtagggtcaaagataggctctaccaccccaccatgatggaaacatatcccgaagccaaatccgacgaattcggcaggctgcggctcggctcgccgcgaacgtcatcagtgcgcaatcctatggccatgcgagcgctgttcagacttcgcaagctcgtcaatacccttctggatgaaaacaaaattgacaaaagcacgaagatacgaatagaattcgcacggggactgaacgacgccaatcgccgcaaagccatcgaggactatcaacgcgaaagggagacggagcgaaaaaaatattatgaagaaattaaaaaactctatctggaagagagtggccgagagatcgaacctaatgagacggatgttctgaaatttcagctatggcgggagcaaaataagatttgtccttacacggggcgtacgatttctatctgccaattcatcggtgcaaatcccgaattcgacatcgaacacacgatcccgcgcagtgcgggcggtgacgactcgcagatgaataaaacactgtgtgagtcggcgttcaatcgaaacgagaaagggagcaagctgccgtccaagcttgcccgccatgcagaagtacttgtgcggatagcccattggaaagagcgttgcgacgaactccgcaagcaaatagaacgtaccaaaggctcgttctcgacgaaagagataaaggatgccatgatacggaagcgccataagttgaaactggaattggattattggtcggggaaataccgccgtttcgagatgaccgaagtcccggaagggttcagtaaccgccagggaatcgacatcggcattatttcgaaatacgcccgcctctacttacaaagcgtcttccctaagacttatgtggtaaaaggcctgacgacagatgcgttccgcaagatgtggggcttgcaggaacagtatgagaagaaagagcggggcaatcacgcacatcattgcatggatgccattacgatagcctgcatcgggccgaacgaatatgcgcgaatggccgagtatttccgcaatcaggagcaatacaggtggtatcgtaatcgcgaaaaaccacaattccccaagccctggccgacatttaccgaagatgtgatagccatagaacagaagctgctcgtttcgcaccacacgcccgataatatgtcgaggcagactaagaaaaagtggcgaaagcatggacaggtgcagagggacgataatggcaaagacctctacgttgccggagactcggcgcgcggctcgcttcatcaggataccttctacggtgcgataatgcgtgacggagaacttaaacacgtggtgcgaaaatcgctcggttcgctcaaagaaggcgatgtcgataagattgtagacgaagtggtgcgcgaaaaagtccgtcaggcggtcgaagaaaaagggttcaaacaagcgatggccggcccgatctggatgagcgaggagaaaggtgtggaaattaagaaagtgaggtgctttaccccgtcggtcacttctccgatccgcctgaaagaacatcgcgacctttcgcggcacgaacacaaacagcatctgcgcgttgtcactggcggtagctatctgatggctgtatatgaggtggtagatgcaaaaggaaaatcgaagcgcgactttgaaatagttaataacctggatgcggcgaaatatttcaaggcgagcagcgaccatgcggcgtttacagatattgtgccgctcacgagcgaaaaaggctacccgctgaaatggacgctcaaatcggggacgatggtgcttttctacgaaaattcgccggaggaggtctatgaggccgataatacagaactcaagaaaaggctgtataaaatcacaataatgaaaaaaaacggacaaatcacttttatattccatcaggaagcaaggtcgaaaggcgagctcaatgaaaaagatggcgaatacaaatcgggagaagagcatcgtcctttaattagaatgtattccactcggctcagagccctcgtcgaaggccatgatttcgagctaagtgtcacgggcgaggtgaaattcaaaaacggatagattatgttgaggcgcgcgctgtttttctcgacccccatgaacctgtcgctaaaaaacgggcaactggcatttcatctgaaagaggcgccggagcaaaaacgcactgttccgatagaggatatcggttttgttgttctggaacatcagatgatcagcattacgttaccgttgcttggcgctttgtccgaaaacaacgtggccgtgatcttctgcaacgacaagcagttgcccgcctcgatgctgctgaatctcgactccaattctacacagggagagagcttccgtgctcagatcgatgccagcgaaccgttgaagaaaaatttatggaagcagaccgtcgaggctaagatccgaaatcaggcgaagttactgcacaaactcggtatggatggggatgcgctcaaaccgctgtatatgaatgtgaagagcggtgattccgacaatcgggaaggggtggcggcaaaactatattggaacatgcttttcggcagggatttcgtgcgcgaacgtgagggcgctccgcccaacaacctgcttaattacggctatactattctccgggctgccgtagcccgttcactgatggggtcgggtttgctgcccgcattcggcattttccaccgtaaccgctacaatgcatttccgctcgcagacgatataatggagcctttccggccttttgtggatgagatcgtgcacaatctctatttcagcggagaggtagaacttacgaaagagacgaaagaatcgttgttaaaggttttgtttaaagatacatattttgataaaataacccgtccgttggatgtgggattatctgtcacaactgcttcgctggcaagatgcttcatcggtaaggagaaaaaaatttcctatccgctcctggaataatatgagtgagatacgcttaaattcatatcatattatgtgggtatttgtgttcttcgacctgccgaccaacaccaaaaccgagcggaaagcggcggctcagtttcgcaagtcgttggaaaaagatggattcaccatgatgcagtactctgtatataatcgttattgcgcctctcgcgagagtatggaggtacacataaaacgtgttcgtggcctgaccccgccgagtggacaggtaagcattttgtcaataacggacaaacaatacggggacatagtcaattattggggcaaaatcgaacgggccaaaccacaggccccgcagcaattggaatttttttagtacatttacataatataagatgcggttcggcaatctattggaaacttttttcagcgattgtgctcaccgtacactataatttggacgagaaaaatctgcattatatttacttccataggacgaacagttcgattttcggttggttttacagtgcgtaattgactgattttcaatgtaaaattcgacggtggttgtgatttgatgtagaaaagaaataagaaacaacttacacacatgaacttcgagttccattgctgttgtgatttgatgtagaaaagaaataagaaacaactttttaatctaaaatatgatattgcaaatagttgtgatttgatgtagaaaagaaataagaaacaacgattgccgcaggctttcgctataatcataagttgtgatttgatgtagaaaagaaataagaaacaacgaagtgtggctgcccgcgacaaaggctgctgttgtgatttgatgtagaaaagaaataagaaacaaccgtgaacaatgtcgaatgggataaaagcgagttgtgatttgatgtagaaaagaaataagaaacaacatgccgagaaaacgcatgaattagtatcaagttgtgatttgatgtagaaaagaaataagaaacaacctaatagtcgacgggttaaagtcggctaagttgtgatttgatgtagaaaagaaataagaaacaacttgcgttgcgatttgcggctaatgcagcctgttgtgatttgatgtagaaaagaaataagaaacaaccatagaggctatgcggaaactccacgcggcgttgtgatttgatgtagaaaagaaataagaaacaacatattttcagcgcgaagtgcagatcgcggtgttgtgatttgatgtagaaaagaaataagaaacaaccaatgctcgtatttgggctataaaaacctagttgtgatttgatgtagaaaagaaataagaaacaacaagcttttctgaaatgtgtacgacaaataagttgtgatttgatgtagaaaagaaataagaaacaacatggcccgctgacattattcgtgaaagcgagttgtgatttgatgtagaaaagaaataagaaacaacagcagcgcagctcgataaaaactgcaaagagttgtgatttgatgtagaaaagaaataagaaacaacatgcgctacattcccgctcgtaaggcgaccgttgtgatttgatgtagaaaagaaataagaaacaaccttctttctcgcaacaaatgcaatgttcgagttgtgatttgatgtagaaaagaaataagaaacaaccaacaagggattcttaataatgacctccctgttgtgatttgatgtagaaaagaaataagaaacaaccctgtcgatttccactactatgaatcgcaagttgtgatttgatgtagaaaagaaataagaaacaaccgctggggcgggtcatgtttttgtcgaatggttgtgatttgatgtagaaaagaaataagaaacaacctttgctcttatgattcgaccaaaaacacggttgtgatttgatgtagaaaagaaataagaaacaacgtgtagagcgcgcaaagcagcatcaggcggttgtgatttgatgtagaaaagaaataagaaacaacagtctccagcgccaggacttcagcctcaatgttgtgatttgatgtagaaaagaaataagaaacaaccgagtgtggtttcgatgttctcgggaatgagttgtgatttgatgtagaaaagaaataagaaacaacctttcgaacagattgacaaaaacgatttcgttgtgatttgatgtagaaaagaaataagaaacaaccattgataaattaaaaatcaaagaacatgagttgtgatttgatgtagaaaagaaataagaaacaacacccgcgatggtagtgcgcgccgcttggaagttgtgatttgatgtagaaaagaaataagaaacaacctataaaaatcaaggcaaaataaaaaacgggttgtgatttgatgtagaaaagaaataagaaacaacctcaggccaaagaggagcgcccatttcgcgttgtgatttgatgtagaaaagaaataagaaacaactatgatttggtgaacaacgcaccgttcgagttgtgatttgatgtagaaaagaaataagaaacaacctctcaaaaggcttggatggtgtgagtgggttgtgatttgatgtagaaaagaaataagaaacaacgtagagtggatgcaacggcgatgtaaatggttgtgatttgatgtagaaaagaaataagaaacaaccgttgctgccttttcagattcggcggcgaagttgtgatttgatgtagaaaagaaataagaaacaaccgttgcaaaagcagtcggctttgatgatcgttgtgatttgatgtagaaaagaaataagaaacaactaacatatattaattatgacacctacgaaagttgtgatttgatgtagaaaagaaataagaaacaacgtagcctatcctgttcaatagtatacttaagttgtgatttgatgtagaaaagaaataagaaacaaccgtcgtcagggggagaagcaaattatgacagttgtgatttgatgtagaaaagaaataagaaacaacttttatcggggaatacatcctcagccagctgttgtgatttgatgtagaaaagaaataagaaacaacaatcgtttttcgtcggcgataaagctcatggttgtgatttgatgtagaaaagaaataagaaacaacgttcgcttgtcataaactggtagttgaacggttgtgatttgatgtagaaaagaaataagaaacaactggacggcagcaaagacagcgctacgcgcggttgtgatttgatgtagaaaagaaataagaaacaaccataaccgatttcattattcgccagcgaatgttgtgatttgatgtagaaaagaaataagaaacaactattggcttacaaatgcatggggcaaaggggttgtgatttgatgtagaaaagaaataagaaacaacacgtttttgttcacttcgccctgctcacgagttgtgatttgatgtagaaaagaaataagaaacaaccggatgggaattgcctaaaaactcgaaatagttgtgatttgatgtagaaaagaaataagaaacaacttctggttcttaacacaaacgggaccggcagttgtgatttgatgtagaaaagaaataagaaacaaccaagacttatgcgacggatgtacagcgaccgttgtgatttgatgtagaaaagaaataagaaacaactgtcgggaactgttacgttcccatcttcaagttgtgatttgatgtagaaaagaaataagaaacaacttcgacatgcgcgaagctttggcgcaaaggttgtgatttgatgtagaaaagaaataagaaacaacttgcgttgcgatttgcggctaatgcagcctgttgtgatttgatgtagaaaagaaataagaaacaacgattgccgcaggctttcgctataatcataagttgtgatttgatgtagaaaagaaataagaaacaactcctacgaaatggatagaaaagaacaggctgttgtgatttgatgtagaaaagaaataagaaacaacagattctatgctaaggccgccgccgcgaatgttgtgatttgatgtagaaaagaaataagaaacaaccatcggcttgcagatgcacggggcaaatgggttgtgatttgatgtagaaaagaaataagaaacaaccattcatctttgtacatacatcaagtttttgttgtgatttgatgtagaaaagaaataagaaacaacttgttagcgaaacgcccgcccagtcacgtagttgtgatttgatgtagaaaagaaataagaaacaactcccgatgtatcgatataaagagcttcgtagttgtgatttgatgtagaaaagaaataagaaacaacatttataaccgcgactatatttaccaaatggttgtgatttgatgtagaaaagaaataagaaacaaccaaaggtaacttaagagcatcggatccaaagttgtgatttgatgtagaaaagaaataagaaacaacgacgatccataacggtcatccttggccaatgttgtgatttgatgtagaaaagaaataagaaacaactcctttcgagttcggcgatacgtgcggccagttgtgatttgatgtagaaaagaaataagaaacaacttgcgttgcgatttgcggctaatgcagcttgttgtgatttgatgtagaaaagaaataagaaacaaccacgaccactgcgagaagaaagaaaatgaagttgtgatttgatgtagaaaagaaataagaaacaactttttaatctgaaatatgatattgcaaatagttgtgatttgatgtagaaaagaaataagaaacaacagtgacatcatccatatatgagaactgcagttgtgatttgatgtagaaaagaaataagaaacaacaccgccgagatagcggataccgcgaccctggttgtgatttgatgtagaaaagaaataagaaacaacagatagacggcaatcatgaagtcgcagaagttgtgatttgatgtagaaaagaaataagaaacaaccgagcctcgcgcgggcaatttcatcgtcgtgttgtgatttgatgtagaaaagaaataagaaacaacaagagtgcagaatttccgtgtgagcaatccgttgtgatttgatgtagaaaagaaataagaaacaaccaacacgacctcaattctggcgatgctggagttgtgatttgatgtagaaaagaaataagaaacaacaaagaggctgaatttaataaatgcacacaggttgtgatttgatgtagaaaaataaaaaacaaccaagctactcgtcgctcaccgccgcgtcgccctgcaatcgggcgaaaaaggattattcggatatcgtataaatttagatagaggtctgtctacacaaatttgtgtagacagacctctatgttatgcgttagccaatagactatgtgtgtgcggccgagccggaaaattcacgcgtgtgtaactatcttttccctcgctttttttcttttcctttttcgatcaatgcccgcaccgcatcgaggtcgagcgtggcagggtcggtgtttttcgggatcggataattcgccccgtcgaagactatatagggaccatagcggccgttcattatgtttatcacaggttcgacatcgaatgttcgcagcggtgttttggccgctatatcgtttgcgcgtttcaccgaaataagttccgcggcgcgttcgagcgttacagtatgcgggtcgtcggttttggccagcgacacgaatttgccgtcgtggcgcacataaggtccgaaccgccctacgccgatgactacctccgacccttcgaactggccgatattacgcggcagtgagaacagctccaaagcctcttccaaagtgattgaggcgatgagctggtcttttctcatactcgcatatcgcggcttttcgccctcctcgaccggttctatttgcacgatcgggccataacggccgatgcgcgccaatacttcgcgtcccgtcgccgggtcgcgccccagcacgcgcgactgtccgggacgatgctctttctcctgcatcgcttcggataccgtcgtgtggaacggcgcgtagaacgctgcgagcatcgcctcccaactctttccaccctcggcaatttcgtcgaattccttctcaacgcgcgccgtgaaatgatagtccattatgcccgtgaactccgcttcgagatagtccgtcacgaccatccctatatcggtcggagcgagcttgtttttttcacgccctacggtttctgtaccgggtttttcgcttacagcgctcttttcgagtacaaggcggtcgaacgtgcgtttcactccgtcgcggttttgcttcaccacatagccgcgcgttacgattgtcgagattgtgggcgcgtatgtggacggccggccgatgccgagttcttcgagcctgcgcacgagtgtcgcctcgctgtatcgcgggggcgattgcgtgaaccgttgcgtcgccacgaggcggcggtcggaaaggcgcgcaccttttttcagcggcggcaacttgtcgtcggccgtctcgctctcatggtcgtcgtccgtagattcggaatacagcctcagaaaaccgtcgaacatgatcacctcgccgacggccgtaaaatgctccggcgtggtgtttatatctatgtgcaccgtcgtgcgttctatttgtgccgccgacatctgcgaggcaagcgtgcgcttgcggataaggtcatagagttttttctccgcaggcgtgccctcgatgtccgccttgtcgatatatgacggacggattgcttcgtgcgcctcctgcgcgcccttgctcttggtcgtgaagttgcgcgtctgggaatattcagcaccgaaaagcttcacgatttcttccttagccgccgccagcgcctgccccgaaaggttcaccgagtcggttcgcatgtaagtgataaacccgtgctcgtagagcttttgcgccgtgctcatcgtcatcgccaccgacatgccgaatttgcgtcccgcctcctgctgcaacgtcgaggttgtgaaaggcggcgcaggcgacttcgtggcgggtttgcgctccactgcgccgaccgtaaattccgctccgatacatttttcgaggaatacgcgcgcctgctccttcgtctcgaaacgtttgttcagttcggccgtgaaaaccgtattgcttgcatccgccgcatcgacgaattccgccgtgacgcggaaatatgccgacggctcgaaccctatgatctcgcgctcgcgctcgacaatgagcctcaccgcaacgctctgcaccctcccggccgaaagcgacggccgcaccttgcgccacaagagcggcgaaagctcgaaacccaccaggcggtcgagaatacgccgcgcctgctgggcgttcacgcggttcatatccaccgtgcgcggattctccaccgctttcattatagcattcttcgtgatctcctggaacgcgatgcgccgcgtgctctctaccggcagccccagaacctgcgtcagatgccatgcgatggcctctccttcgcggtcttcatcggatgccagccacaccgcatcggcttcgcgtgccgctttcgccagctcggcgaccacctttttcttatccgcaggaacttcgtaatcgggtgcaaaaccgtgctctatgtcgattcccatgcccttcttcaccagatcgcgcacgtgaccgtagctcgacatcacgtgataatccttccccagaaatttttctatcgtccgtgctttcgccggtgactctacgatcacaagatttttaagcatcgcgtgttttgtaaatagtatatcttaaaaacaactgttatcccgtgaagggataacagttcggtttattcctgccgacccgaagctcgtttctccctaccttatcaacgtatacgtcagtactaaccgtatcgggtcttccgcgcgcgccgagccttgcagggcgacctgcgaataggtacggtggcgggtgttcacctcaggccccagccaaacctcgcgcggcgtatggtcgggataggccagcagcgaagtgacataacccgtgatattcatgccgtaacgcccaagcgaccgtgaaatgaatccgccgtaggatgttcggctgttcgacgtattttcgacaaaataagcatagtccggaatcggaacggggccgaaagccgccgtgcggtaaccgtacggcgccatgaaaaaccacggaaacatgctcgaagacaactcggctacgggctgaccgtatgtgtagtacattcccagtcgcgccggggctatattcatgttttcgattgtcggttcatccaacggaaagtgtaggcgcgcctcgttgataacgattgccgagtattctataccatcctgtttccgcaagtcgttcaggctctccaccaactcgtcgctgaacctcaggtatgtcgccacaccgcccaacccctgcacatagaccgtttcaagcgctgccgatgtgcgcatagtgtcgttcagcctgcctgcgatcgcgggcgggtatgtgaatgtcgtgcggttcacgttcagattgacggtcgatctggggttcgtcgcaagccagatgttatcagcaaaacggaaatacccgatcagcgtgtcctgaatctgtgtgggattcgacttgttgtaattatgtgcccagacgaacatccctgcgaaatcagagcccacctgtcgttcgcgcaggctgaggcgatatatcgcgccgtcttccggatagtcgggcgcaggagcgaaatacagcccgtagaacaatttatggaaattgtaacgcggcgttttgtatacctcatcgctcgtctccacgatccttcgcataaattcgagtccctccgccgtcggctctaatttccgctcgatgatcgaattgggcagcacctccttatctataacgaacgagaatagcggcttgctcttgtctaccagtgtctctatggggtcgctgaaaaaatacagcgagtcgcgcctcaggctatcccgcatttcgtagacattgatccgctgtccgtcgcgcggcgtgccgcgaatctcgtctactataaaatcgacgaaaatcgagtcggccaccggattgaaaccgaaaccttcctcgctctctatctcgctgtcggtatcgtcatcggggtcgaaatctttgagcgtaaaaacatatacgccctgcgggaaaaagtcgctcatcgcgctagcttgcactcgtccgaaaac

SEQ ID NO: 508 - DNA, 23627 bp, synthetic construct
  source 1..23627: mol_type = other DNA
  misc_feature 1..23627: note = Synthetic
ggttcttatgaattaccgcatcgcttaccagggagaaacatcagttaactggtgccaggagcttggtaccgttctggctaacgacgaggttaaggacggtctttcagtgcgcggcggtttcccggtagagcagaagaagatgacccagtggcagctgcgcgtttctgcctatgcagaaaggctgcttgacagtctggataagctggactggacagattcccttaaagaaatgcagcgcaactggattggccgctccagcggtacagatgttgtgttcaaggtgctgaccggtgacaaagctacagatattaccatttttaccactcgcgtagatacgatatttggcgtaaccttcatggttctcgcccctgaaagcgaccttgcccgtgagcttaccactcctgaaatgaaggatgaggtagaggcttacatcgcttctgtaaagaagaagacagagagggaaagaattgcagagacaaaaactgtaacaggtgtattctcaggttcttacggtatcaatcctctaaccggagaaaaggttcctgtatggatttcagaatatgtactggcaggttacggtaccggtgctattatggcagtgcctgcacacgacagccgtgactatgcctttgccaagaagttcaatctgcccatcgtccccatcatcgagggctgcgatgtttcagagcagagctttgatgccaaggaaggcaagatgtgcaattccggcttcctggacggcatggacgttaaacaggccatcgaggctgccaaggactatgtagagtccaagggcctgggccgcaggaaagtgaattatcgactcagggatgcaatcttctcccgccagcgctactggggagagccgttccccgtttgctttgacgacgagggcgtggcaattcctttgccggagtcagccctgccgctctgcctgccggagatcgacgaattcaagcctacaagcgacggacgtcctccgcttgcccgtgcaaagaactgggagtgggaaggtaaacgcctggaaaccagcactatgcctggctttgccggctcaagcgcctactatctcaggtacatggatccccataacgacaaagctcttgtaagcaaagaagcagaccagtattggcgcaacgtagacctttatatcggcggttctgagcatgcaaccggccaccttatctattcccgtttctggaacaagttcctctttgatcttggctatgtctgcgaggacgagcccttcaagaaacttgtcaaccagggaatgatccagggccgctccaacttcgtttacagggttgtaggtacgaatcagttcgtttctcttggccttaaggacggttacaagacccaggagattcatgtcgatatcaatattgtccgcaacgacaagcttgatcttgacgccttccgtgcatggaggcctgaattcaaggatgcagagttcattcttgagaacggcgaatacatttgcggctgggctgtagagaagatgagcaagagtatgttcaatgtggttaatcctgacgatatctgcgagaactacggtgccgacacccttcgtctgtacgaaatgttccttggccctctggagcagagcaaaccctgggataccaagggtatcgacggcgttcaccgcttcctgcgtaagttctggaggctcttctttgacggcgacacccttgtcgtaaaggatgaaaaggcttcacctgcagagctcaaggtattgcacaaacttatcggcaaagaagaggaagacattaccaacttctctttcaataccaccatcagcgctttcatgattgccgtaaacgagctctcagaccttcagtgccacaagaaggaaatacttgagcctctggcagttatgctcagcccctttgctcctcacatcgcagaggaactctggcatgcgcttggccatgaagactccgtaacctttgctcctttccccgtattcgtcaaggagtacacggtagagaacaatgccacctatgctgtttccttcaacggcaagacaaggttcaccgtcgatctgtccaagtccctttctcccgccgaggtcgaggctcatgtaagggccctgccccagacagaaaagtatgttggcagccagagcatcgtcaaggtgatagtagttcccggaaagattgtcaacatcgttataaaataacacacaacacactgaaacttaataacatatggctcaaaaacaatcaaagtcttcggtacttctggactatgtctggatgactatcggctgcgtgatattctgcttggcatgggaagtatttctcattgccaaccatattgccagcggtggtcttgccggtatctgtacggtcatcaatttctgtacgggtattccggtatcctattcgtacattatcctgaacgtagtattgctgggcgtcggtttcctggtaatgggaaagggctttggcttcaagaccatttattgcatagcccttacctccgtcctgtttgacattatcccaaggatggatttcatgcaacagattgttgccaaccccattctgggcgatgatgataaagttctgtatcctattatcggcggccttttggaggccgtgggcatcagctttatcttcaaacgaggcggcagtaccggaggaacggatgtcgtagccctgatactgaataaattctggcccatatcgcccggaaaggtgtatatgagcctggatatctttatcatagcttccgtgcttctggctcctggcatgggcctgaaagacatggtttacggttatatcgccatgctgtcctttaccatgttcctggacttcctgctgcttggcagcaaggctacggtacaggtgctggtcttctccaagaagtataaagagattgcagatgttatgacaggaagccttaacaggggagtgactgcacttaatgccgtaggctggtatacgcagcaggagagcaaggttctgcttatcatggtgcgcaaaacccagctgtcagtaattaccagggctattaaagacatagacccgaatgcttttgtaagtgtttcttctgccagtgccgtttatggccagggcttcgatgaaatgcgtaccggactggaccgcaaaaagaaaaaacaagaacaggaataatgagcaattcttctgataaaagcatcttaaggcttatcaaggagtacatcctggtggctatcggtatcaccatctacgttttgggatgggtggtcttccttattcccaacaaccttgtcggtggtggcgtcacgggtataggtactattctccagtacgcaaccggctttaacgtaggttataccttctttataataaacggtatcctgcttattatagccttcttcgtgatgggggctggcttcggcggcaagaccattatggccatcattcttgcatccataggtttgcgagtccttccggaacttgttccggagacgataatccaagccatcgcccttgataacggtaagcttatgtgcaccctgataggtgccatcatggcaggtttgggcataggcatggccatgtcgcagggcggcagtaccggcggcacggacattatcgcccttatcgtcagcaagtaccgcaatgtctctcccggcaggatgatattgcttatcgatgtagttatcatcgcatcttcattcttcgttccttcatacacggcagacggcgaattggtgggctgggcagacaagtttacgggcgtagtatatggccttctgcttgtaacggtatgcggcaacgtgattgatatttatctgtccggtaccaaacagtccgtgcaggtattcattctatcgcataagtatgcagaaatcgcagactgcataaccaccaacctgcatcgcggcgttacagttatgccggcccagggctggtacacaaaggaagaaagccatgtgcttatggttatcagcaaaaagtcggatcttaacataatgctcaggtacataaagtccattgatcctgatgctttcctgtcagttgccactacaaccggagtttacggacggggcttcgatacaataaaaaccaaggcaaagaaggtttctgaaaagattggttagtcaagattcgtaaaattaagtcgtcaagattcgtaaagaaagtaaagattcgtaaagcaaagtaaagatttgtaaaaatataatacgatttaacaaaaaccccgtctataattgaattatgggcgggtgttttttgtaaatttgccgccaaggacggaacaaaaaacgtcgccatgatctatgatcgaaactgtaataggttccttttctattgtcggcagcatgttgctgattttgacagataaatctttaggtaaaatgttagtgctgatgcttgtaatctatcaagctgcagcccttattgctgcactgctgtctcctgatccggattcttgcggtgtatggtctccccgtatgttggttttttgcgccggtatagctgtgccggttgtggtgtccctggccgtaaaccttttcaagaagtgtgcggattcttcttttttattaggagaatacagcggaaaggattttgtgatagaatctgccaggtatgtgtattcggtgtgctttatggccttgcttctggcgtcagagtcttcctggggcgcctcattcacagtgcgttatatcgttcagggagtattcctgatcctggccattatcctgcttttcctggtttcggtccggtatctggcaatggccggcaaggacaaacagagccttgactctgagccatcggatatggaggtgcgcatttacgagaagataatacgttacctggaagaaaagaaaccataccttgatgcagcttttaccatggaacgcctgtgccgctatctggggactaatcgtggatacgtttcccgcagtgtgaatcactgtaccggaaagaatctggcacgggtggtaaactcttaccgtgtccgtcatgccatggaactgttcaggaatgacatgagcctgaagatatcggatctatggcagatgtcgggttttggcagcaaggttactttcctggccgccttccgcatagagaataatattaatccccgggaatggtgcaaggagcttcgggacgagtctgcaagagaccggaaactcctttccaagaacaagggacaggggccagaacggtaagctcttcttttgtcacaggatggggaagcgttatgcttctggcatgaaggctgatgctaccgtctgggttgctccttggcgcgccgtatttcaggtctcccttaattgtgcagccgatgccggatagctggcagcgaatctggtggtgacggcctgtcagcagctcgacctgcaaaagatggtatctttccgtactgccaaggtaggtgtaaataagtttggccagtttggcatccctgtattttccttcttttactatatagctcttattctgctcttcgcggcgaagcagccagttttccagcagggcgtgcggctgctcaggtgcggcgacgcacagggccagatatatcttgtggactgtgccttcgcggaaggctgcgctaagcctttcaagggccttggatgtctttgcaaatacggtaatgccgcttacagggcggtccagacggtgggggatacccaggaatactttacccggtttggagttgcgtatggcaatgaaggccttgtatttgtcgcacaaggtctcgtcgccggtcttgtcaccctggacaatttcgcccgcgcgcttgcatacgatcaaaagatgattgtcttcatataggatcctatcctgcaggtccttatactcctgttccgtcagttgcctgtattccataaatgtctaattactctgcaaagatatgacaaaatgtcagaaaaaacgaattggcataacattcgatataaatgaaggcgtcggtcctgaagacagggctggcagatgaaaagataaaaaggagattaataatatgggaaaaattattggaatcgatttgggtacaaccaattcatgcgtagcggtaatggaaggtaaccagcctaccgttatcatcaacaatgagggtcagcgtactactccttcagttgttgctttcactgaaggcggtgagcgtaaggtgggtagccctgcaaagcgtcaggctatcaccaatcctgccaacaccgtattctctatcaagaggttcatgggtgagacctacgatcaggttaacacagaggtaagccgcgttccttacaaggtggttcgtggtaacaacaacactccccgcgtagatatcaacggccgtctctactctcctcaggagatttctgcaatggttcttcagaagatgaagaagaccgcagaggattatcttcgccaggaggttacagaggcaatcgtaaccgttcctgcatacttcagcgactctcagcgtcaggctaccaaagaggctggtaagattgccggtcttgatgttaagcttatcatcaacgagcctaccgcagccgcacttgcatacggtcttgacaagactgacaagagcatgaacgttgcagtttacgaccttggtggcggtacctttgatatttctatccttgagctcgactccggaatcttcgctgttaagtctaccaacggtgatacccaccttggcggtgatgacttcgaccaggtaattatcgactggctggcaagcgagttcgcagcagagaacggtggcgcagacctcaaaaaggaccctatggctctccagagacttaaagaggccgcagagaaggctaagatagaactctctaaccagacttctacagagatcaaccttccttacatcatgccggttgacggtgtgcctaagcaccttgtaaagacccttaccagggctaagttcgagatgctttgcgacgacctcttccagcgtaccatcgagccttgccgcaacgctcttgcagcagcaaagatgaacgtatccgacattgacgaggttctgctcgtgggcggttcaacccgtatccctaagatccaggagatcgttaagaacttctttggcaaggaacctaaccgcagcgttaacccggatgaggttgttgcagttggtgcagccatccagggcggtgtgctcgcaggcgatgttaaggatgtgatccttaccgatgttaccccgctttcacttggtatcgagacccttggcggcgttatgaccaagatgattgatgcaaacaccaccattcctgtagataaggagcagattttctctacagcagctgacaaccagccttcagtagaaatccgcgtgctccagggcgagcgtcctatggcaaaggacaacaagcagattggtgtcttccatcttgacggcatcgctcccgcaccccgtggcgtgcctcagattgcagtgaaattctctatcgatgtcagcggtattcttagcgtatccgcagtggataaggctacaggcaaggcccagagcgttagaatcgaggcttcttcaggcctgtcagaggacgagatcaagcgtatgcgcgacgaggccaaggctaacgaggctgcagataaggcagagaaggagcgcgttgacaagatcaacgaggccgacgccctttgcttccaggcagagaagttccttaaagagaacggtgacaaggttcctgcaaccgttaaggacgaggtagagaagaacgtaagcgcacttaaggaggctatcaagacccagaatcttgccgacatcgacaagtacaaagaggctcttaacaaggcatttgaggctatgtaccagcaggcacagcaggcccagggccctcagggtccccagcctggtcctcagcccggtcctcagggtcctcaggacaacgctccggatgagcagtaatccggcgaattctaaaaaaacggtgcggatttttatctgcaccgttttttttatacctttgcgattctattaagtgaaaataaatatgggaagaattatacttactggcgaccgtcctaccggcaaacttcatcttggtcattatgttggttcactccgcaacagggtactgctgcaggaagaaggcaactatgacaagttcttcgtgttcatagccgacgtccaggcacttacagacaacgccgacaacccggaaaaagttcgtcagaacgtcatagaggttgctttggactacctctctgccggccttgatcccaataaggttaccatctttgtacagtcacagatacctcagctgcacgagatgacccagttcttctcaaaccttgtaactgttcagcgtctccagagaaatcctaccgttaaggcagagatggctcttcgcggctttaatgccgacgcagaagaagagaaccgccgcggactccccgttggtttctttacctatcctataagccaggccgctgatatctgcgccttcaaggccaccacggtgcctgccggcgaggatcaggagcctatgctggagcagtgccgcgagattgtccgcagctttaacggaacttacaagtgcgatgtccttgtagagccggagattcttcttccttccaacaaggtttgccgcaggcttcccggtaccgacggccaggccaagatgagcaagtcccttggcaactgcatctatcttagcgacgaccctgcagagatggaaaagaaggttaagggtatgttcaccgatcccggtcatcttaaggtagaggatccgggtaaggtagaaggtaactgtgttttcacttatcttgatgctttcagtgagcctgaggactttgcaaaataccttacggactactcttgccttgaagagcttaaagaccactaccgtcgtggcggtcttggcgacatgaagtgcaagaagttcctgattaacgtgctgaacgaccgcctggagcctatccgcgcccgtcgtcatgcctacgagcaggatattcctgaggtttacaatatccttaagaaaggttctgaagttgctgcccaggttgctgccgagactcttcaccagatgaaggacgccatgaagatcaactacttcgatgacgccgagctcatcgcctcccaggccgcaaaatacaggaaataggggaacgtaactctacgcagtttgatttaccgggagcatcgggtatggcctgatgctccttagtttttgtttgatcttaacgtcgttacgtgctttctgcatattgtaatcggcctgcaggcccataaggatatcggccgaaatgccaagagcgcactccagagccagtgcgatacttgccggcaacggtcttctttcgttaagaatatcattaagcatggtgtatggaacatcaatccagtccgccaaggctttctgaggaattcctcttgcttccagttcgtccttaatgacttcaccgggatgtgttgggataaaacttttctgtgccataactcctatttataatgatttgtgatttctaaaatattgcaaatggttacaactacttctttttctattttttctgtttgaaactccaaacggtacttattatctattctcactgattcaataccagccttatctccttttagcttttcgtaattcagtgagttaaagaagaataatttctcaatagagtctgcatgcttaaggatgtttacgacctttatgtattttttaacgatctctggctgaaaccaggggctcttgtccgattctcctgtttcatacatatgagacaagtagtcttttttaaacaccaacagcataattactctctttttcgcaaagatagagaataatttcaaaaatacactaaaaaagtggatttccttcgaaaaactatattatatccttgatggggtagggctgattcttgttacttttattcacaatgttttgagtaacacttgtataaaacgatacatatatgtaaatttgtaactaccgtatcaaaacaaaaaagccccacggtgtacgcggggctataggataaaatcctgcggcatatagccttattgtgataagatgtagaaaatcttatgtcacaaaggtatttgaaatttttgaaaaatcaaatatatggagaagattttaggacttgacctgggaaccaattctattggttgggctgtcattgaaaggggcgataataatgtttgtaagcttttagataagggcgtaaacatatttcaagacggtgtggctcatgataagagtggagagaagcctgctgttcaggaaaggacggcagcccgctcttccagaaggcattacttccgtagaagacttcgtaaaatcgaactactgaaagtcctgattgataataaattgtgccctgcgcttccagttgatgcccttttggaatggaagaggaaaaaactatttcctcttcaagaggattttatcaattggcaaaggacagatgaaaataaggataagaatccttatcatgataggtatttgtctcttttcactacgttagatttaaacaagcaggaagatagatatgttttaggaagagcgctctatcatctaaatcagcgtagaggtttcctgagcaatagaaaagaagcagctgatggaagtgatggaaaagtcgctgaaagtatcagcagtttgtcaaaagagatttcggctgctggttgcaaatatgtcggggaatacttctacaagatgtattctgaaggcaaaaaaataagaaatagatacaccgccagagaggagcattataaaaatgaattttacgctatttgtgaaaggcagaatcttccggaatcattgattcatcagctggaaagagcaattttctatcagcgtccgctaaggtcccagaaggggaatgttgggcattgtaagtttgaaccagataaaccttgctgcccggtatcccatcctcgattcgaagaattcaggatgcttcaattcattaactcgataagagtacaatcgcctgcggatgatgatttaaggccaataaataatgaagagttggccaagataatgcacttattctatcgaaagagtaaggcggactttgagtttgaagaaatagcaaaagctattgcaggaaaagggaattattgttcgaaggacgattcgggaatgtatgcatatcgattcaattattcgatgtcaacagatgtgccgggatgccctgtgtcagcagcaattatttcagccattaattcgtctccttcaattgattgggaagaggatctatgctctatttataccaagggaaatggaaaaacacaggaacaaatcgtaaatgatgtatggcatgctctgttctctttcgataatgatgaaaaattgacggaatggttatccgatgcgcttcaaattgatgaaaaggctgccggaaccttatctaaattcaatattcctcagggttatgcctcacttagtcttaaggcgataaataagataattccatggcttaaacggggactggtttatagtgatgccgtattttttgcgaatttgaccgatgttctgccaaagaatatcatagagaataaggacaggctatcagatattgaagagaatatccgaatcttgcttgacggacaaactgtagacgggaaggagagtttgacaagtaaatacaagaatatctatgattatttgttaggcgtggatgctaatgtaaaagcaaacaagctttatcatccttcccaaatagacttatacaagccggccttgcccgatgagaatggacagatccgtttaggctcgcccagaacaaaagcctttaagaatccaatggcgatgcgagctctgttccgtttacgcaaattaattaatgctttgctgtcggaaggcgttatcgattctaaaacaaagattaacatcgaatttgccagaggcctgaatgatacaaacaaaagaaaggctattcaggattatcaaaagaatcaagaagccttgaggtcacaggatcggcaggcaattattgctttgtttaagagcgaaggaattgaatatgagccatctacgatggaccttcttaaataccgtttatatgaggaacaaaaccatcgttgtatctatactgatagacagataactccaaggatgttccttggaagtgctacggaatttgatatcgagcacacaattccaaggtcacgtggcggcgatgattctcaaatgaataaaacgctgtgcgacagtcggttcaacagagatgttaagaaatcttgtattccttcggaattagagaatcatgctatcctgcttgacagagtgtcagaatggaagaataaagtagaagaactagacaagcaaatagttttctggcgtcgtaagagtaagcatgcttcttcaaaggaagaaaaggataatgctatccgccgggcccatttaatgaccatggaaagggactattggcgtggcaaatataacaggtttgtcatggataaagtccctgaaggtttctctaacaggcagggagttgacatcggtattatcggtaggtacgccaggatgtaccttaagacagttttcaataagatatatgtggtcaaaggtgctacaaccgctgaattcaggaaggcatggggactgcagaacgagtacgaaaagaaagaacgcgtgaatcactctcatcattgtattgatgccgtaactattgcttgtatcggaaagaacgaatacgatgcgtgggcaggattcatgaagcaggatgaagagtataggtttggacgaggaaaacgtccgttttttgagaaaccatggccaacctttactgaggatgttcttgccattacatcggaattgacggtgccgcattatactccggacaatatgtccaagtgcgctaagaagaaacttagagtaaggggtgttatacagagaaatgatgctggtaaagtaatgtatgcaaggggtgattctgcaagaggctctttgcatttggatacgttctatggctctattaaggttaatgacgaggttaaatatgtggtcagaaagagcctggattctttgaaggattctgacattgacaaaatcgtagatgagactgttagagataaggtcaaggctgcggtagaaaagcatggttcactaaagaaagccgtagcagaaggtgtttggatgaatgaaaccctacgtatccctattaacaaggtaaggatttttgtgccttctgttacaaagccaatttctcttaaggagcaaaggtttaaatcggacaaagattataaacagaattattacgtagccaatgataataactattgtatggctgtctatggcacgaagaagccatcgttcaagttgttgaatgcattggatgcgacaaaaatgattaacgggaaacgggataacgttattcctttgtctgatgataaagataatccgttgaggtttgttttaaagataggaacaatggttctgttttatgataatagccccgctgaattacttgaatgtgattctgttgagttgtcgaagcggttatataaggtgacggggcttaagtataatacggaacggtacgggatggttgaattaaagcaccatctagaagctcgcccttcttcagaattaaaaaagaaaaatggtaaatggcaaattggtgaaggtattcgaccgatagtggttctaacgcatcatcaactcaatatttgggtagaaggcgttgactttgacataaccgaaactggaagaattgttttcaaaccgcaccctttatggtaaagagaacattattctttggtagttcatgccgcctgtcccttaaaaattgccagttggttattgagaataaggagacgggggagattaaaacatgtcctatagaggatatcggatatgcagtaatagaagaccaatcggtttccattacaattccggcgatggatgcgctggcaaagaataatgtcgctgtggtgttttgtgacgctaagaaaatgccgtcctcgatgctgcttaaccttgaatctaataatgtcttggccgaggtttataaaactcagattgaggcgtcagttccgttgaagaagaatctatggaaacaaattgtatcagcaaagattgagaatcaggccaggttgcttaatgagttgggtaaggatggggatagtttgaagccatattacatgaatgttaagagtggtgattctgacaaccgggaaggtatagcggccaggatgtattggaggttgttgttcggatctgatttcgttaggtctagagacggcgggatgcctaatggtatgttgaattatggctattcaattcttagagcgggaatggctcgtgccattatgggttctggtttgttcccggctttcggactgtttcataagaataggtataatgcctttccgttggcggatgatttgatggaaccctataggccatatgtggatcaaattgtatatgagttggttagcaggggaattaataaactggatataaacgcaaagcaagaattgcttagagtattttttaaagatacaacctttggtactattacgagaccaatggaagtagggctgtcaataaccactgcttctctggtaaagtgttttaatggagaggctaaacagttatcttttcctattctatagtcatgattaccgaatatagattaaatgcttatcatgtaatgtggttatttgtgtttttcgatttgccaactactaccaagaaagagaggaagtacgctgcggggtttagaaaggatttggagaaggatggctttcggatgatgcaatactcagtttatataagacattgtccgtcgaaggagaatcgggatgtgcatgtgagaagaataaggagttttgtcccaccttctggaatggtgagtattatgtctgtaacggataaacagtatggagaaatagagaacttttggggatcaaaacgttcacctttgccggaaactccgttacaattggaattgttttaatatatttgtaaaaatactacatcaaagtgcttccttggcatgatatgggagttttccaacttgcttttaggcttgtaattctttgattttcactggaaaaaccaactgaggttgtggtttgatgtagaaaaggaataatgaacaacaagaatgaaggattcaccttctgccgcattgttgtggtttgatgtagaaaaggaataatgaacaacaataaaatgttcggtacttcgccgtaaacggttgtggtttgatgtagaaaaggaataatgaacaacgcaactctgcaacaatactctgcaactctgttgtggtttgatgtagaaaaggaataatgaacaacaccttgcccgtgcagcacacctcaagcgctgttgtggtttgatgtagaaaaggaataatgaacaactaaatgccagtcctataccgatgcaaccgagttgtggtttgatgtagaaaaggaataatgaacaaccgcatacgaaaaggtcgtggcggatgcggagttgtggtttgatgtagaaaaggaataatgaacaacgtatcagcctggtggacgaccccgccgtagttgtggtttgatgtagaaaaggaataatgaacaacctaagccgatacttagaaacaaaacattagttgtggtttgatgtagaaaaggaataatgaacaacggggtcattgtctcccaagagtcaggaagagttgtggtttgatgtagaaaaggaataatgaacaaccccgaggaacgaaagagtatcaggacagagttgtggtttgatgtagaaaaggaataatgaacaacgtattggacgatgaaacataccgtgtttgggttgtggtttgatgtagaaaaggaataatgaacaactgtggtggcgtgtatgattcttcgcatactgttgtggtttgatgtagaaaaggaataatgaacaaccgggaacgggctgagaaacagcaagaataggttgtggtttgatgtagaaaaggaataatgaacaacggtgacaatgccgaaaagcggaaggagatagttgtggtttgatgtagaaaaggaataatgaacaacttctcacctgaattgtattttgaagatatagttgtggtttgatgtagaaaaggaataatgaacaacaatacggaatggataggaaatgcccccttgttgtggtttgatgtagaaaaggaataatgaacaaccaggaagcatacgataagtggattgagcaggttgtggtttgatgtagaaaaggaataatgaacaacaccctctgggcggtcttggcatccgtcaagttgtggtttgatgtagaaaaggaataatgaacaacgtcccaatggggatttttagccacataggagttgtggtttgatgtagaaaaggaataatgaacaactgtgttatttttaatagcatgaattaaatgttgtggtttgatgtagaaaaggaataatgaacaacttaatggcagcttcacaggcttcttcataagttgtggtttgatgtagaaaaggaataatgaacaacaaccaccagaaaaccagcaccaggaggacgttgtggtttgatgtagaaaaggaataatgaacaacaagttttgtgatgattggattcgtgatgagttgtggtttgatgtagaaaaggaataatgaacaacgggttcacaagttataaatccaaccttccagttgtggtttgatgtagaaaaggaataatgaacaactttaataaaaatttatgagtcgttcagaagttgtggtttgatgtagaaaaggaataatgaacaaccgcagtgtttcatgtccgttatgccacgcgttgtggtttgatgtagaaaaggaataatgaacaactgcttcgcttcgatccgggccgcttcttcgttgtggcttgatgtagaaggaaaggcgcaaaacctatgagttttgcgcctttaccaggtcttgtaggggtgtttggagaggtaggagttgtagtaagaggagacgccggtgacttctgtgcccagccaggaggggcgggcgaaggtagcgtcaggggagggtaactctatctctgccatgactaggccctcgttttctccaagaaattcgtctacttcccacttaaggccgccttctgccggaacaatgtggcggaacttttctatgcggccgcttttgcaaagcttgaacagctccagggcgtcctgaaggggaatctgcatctcccactccggcctgctaaggccgtcatcggtagtcttgcccttaatggtaagaaagccttcatcgtcccggatgcggatgcgcacggtgttgccgccatcatgggcgatgtaaccctgcctaatggaataagtcttgacagcggcagcacggaaactgtcgtcctttaccaaaaactttctctctgtctctgtattcatattacatcagccattttgacatatccttgccgtctgcgctgcggatttctgtagatgagattgtaaccagcggggcattcaggagctctatcttataggaaggatcctctttcatcagccgggccttaagatggccgcggtgataacccttgcgcggatatacggcaatgccgtactcttttaaaatgcgtttgtagtcgcgccagcgggggaagctttccagattgtccgcacctactaccagtgtgatgctatctttgggatttcgggcacggagggtgtccagagtgcgtatggtatagtgcggcggctccattgacagttctatgtccgatgcctctatgccctttagctccggatggcgggccaaggcctcgcaggctgcctcgtagcgggcctggccgctaaggttggaagcggcatccttgaacgggctttgcggacttacgatcagcagcacacgctggtagccggcggttttcaccagataccttaatatggccagatggccaatgtgcagcggattgaagctgccgctgtaaaccgcgattttcattttatttaaggaaatcgtccaccatcttttcggcctcggcgtaagccttgtccagattgtcgtttattaggacaacgtcaaacttgggagcgtaagtcatttcctctgcggccttggctacgcgctctgcgatagcctcaggagcatcggtgttgcggaagataagcctgcgccttagctcctctactgaaggagcctggatgaatacggaaagggctttgtccccgaagtactttttaaggttgacgccacctttgacatcgacatcaaaaataatcacatggcccttggcccagatgcgctcaacctcgctcttcaaggtgccgtaataacggccttcgtacacctgctcatactctacgaactggtctgcctctatgcggcggcggaactcttctacgctaaggaagtagtattccacgccgtcctgctcctggccgcggggcggacgggaagtggctgatacagagaattctatctctgggtgaagtccaagaatatgattgactatagtgctttttcccgaacccgaaggggccgagaaaatcaatactttaccggttttttgttcttttttcttgcaggccataacatttatcgttttagcggcttgatgcccttgaagatttctgcaaatttaattaaatttgcctgatttttgaagtgattacaaataattatcggcaaaaataatcattaaacaatatagtttaaactatggtatcttacaaagaattgggccttgttaatacccgcgaaatgttcgcaaaggccgttgccggtggatatgctatccccgcattcaacttcaataacatggagcagcttcaggccatcatcatggctgcagcagagaccaagtctcctgttatccttcaggtatccaagggcgcacgcaactacgctaaccagactcttctccgttacatggcagaaggtgcagttgcttatgccaaggaactcggttgggagaagccccagattgttcttcatcttgaccacggcgacagcttcgagctttgcaagagctgcgtagacctgggcttcagctcagttatgatcgatgcatcttcacttccttacgaagagaacatcgctcttaccaagaaggttgttgattacgctcatcagtacgatgttaccgtagaggcagaacttggcgttctcgcaggcgtagaggatgaggtttccgcagaggagtctcactacactcgtcctgaggaagttatcgacttcgctacccgcactggttgcgacagccttgcaatctctatcggtaccagccacggtgcttacaagttcaaacccgagcagtgcacccgtgaccccaagaccggccgtcttgtacctccgcccctcgcattcgacgttctccacgagatcgagaagaagctccccggtttccctatcgttcttcacggttcttcatcagttccccaggagtatgtagacattatcaacgctaacggtggcaaacttcccgatgcagttggtattcctgaggagcagcttcgcgaggcttccaagagcgctgtttgcaagatcaacatcgactctgacagccgtcttgcaatgaccgcagctattcgcaaggtattcaacgagaaacccggtgagttcgaccctcgtaaatatcttggtcctgctcgtgacgaaatgaagaagctttacattgacaagatcgttaacgttcttggcagtaacggtaaggctgaataattaagatttttcttaatcactgtaaactaaaaaatcctgctcaattcgagcaggattttttattgggtttcagctggattaaagctggggaccggcctttacaagagccttaccggccttgttggactcgtacttgtggaagttcttgatgaaacgtcctgcaaggtcctttgctttctcttcccattcagccgcattcttgtaggtgtccctaggatcaagaataccggtgtctacaccctcaagcttggtaggaactacaaagttgaagtaagggatagtcttggtaggagcagcgtcgatgctgtggttgaggatagcgtcaatgataccacgggtgtcgcggatagagatacgctttccggtaccgttccagccggtgtttacaaggtaagcctttgcaccgctcttcttcatcttcttaacgagctcctctgcatacttggtagggtgaagctcaaggaaggcctggccgaagcaagcgctgaaggtaggagtaggctcagtgatgccacgctctgtacctgcaagctttgcggtgaagccgctgaggaagtagtacttggtctgctctgcgctgaggatggataccggaggaagtacaccgaatgcatctgcgctaaggaagataacctgctttgctgcgggtccgtggctgtccgggcgaacgatgttgttgatgtgatagataggataagaaacgcgagtgttctctgtaacgctcttgtcgttgaagtcaatcttaccctgtgcgtcaacggttacgttctcaaggagagcgtcgcgacggatagcgttgtaaatatcgggctctgactctttgtcaagcttgataacctttgcatagcaaccgccctcgaagttgaagacacccttgttgtcccagccgtgctcgtcgtcaccgatgaggaggcgcttaggatcagttgaaagagtggtcttaccggtgccggagaggccgaagaaaatagcggtgttctcaccgttcatgtcggtatttgcagagcagtgcattgctgcgatgcccttgaggggaaggtagtagttcatcattgagaacatacccttcttcatctcaccaccgtaccaggtgttgaggataacctgctcacgtgaagtaacgttgaaagcaacgcaggtctctgagcggagaccaagctcctgatagttgtcaaccttagcctttgctgcgcagtaaactacgaagtcaggctcctggtcgaactctttctggttcttaggacggatgaacatgttggtaacgaagtgtgcctgccatgctacttccatgatgaagcgaaccttcatgcgggtgtctgcgtgagttccgcagaaaccgtcaacaacaaagaggcgtttgccgctaagctgctgctgagcaagcttcttgactgccttccaggtctttacagacattttgtggttatcgttgtgatagccttcggtgtcccaccagatctctccgggtttgccttccttggtggtgttgtcatagacaatgtatttgtctttaggagaacgtccggtgtagataccggtcattacgttgatagcaccaagctcggttacctgacctttgtcatagccctcgagaccgggttttgtttcctcgttgtaaagaacctcgtaggtagggttgtaaagaacttcctttacacctttgataccatacttgctcaaatcgaatttaggcatagttttttatattttttagtttaactttccagtctgcaaatttacacaaattcacggatttatacagtaattttcttaaatttgtgctgcaaatttgttgccaagtccgatttttgccggatgtaaaatgttttaagtcaaatatttatgacagcgcttgaagttttgggtacatattggggctataaaagcttccgttccaggcaacaggagatcatagaatctgcagttgccggaaaagacacacttgccctgcttcccaccggcggcggaaaaagcgtctgtttccaggttccggcaatgatgaaggatggcatcgcaattgttgtcactccgctcatcgcacttatgaaagatcaggtgcgcacgttacaggaccgcggcatcaaagctcttgctattcatgccggtatgggcaggtacgaggtcgataccatccttaacaatgcctgctacggagacttcaagttcctgtacgtttcgccggaacgcctttcgaccttcctgtttcgcagctacctgccgcagatgaatgtcagctacatcgtcgtggacgaggcacattgcataagccaatggggctacgacttccgtccggactaccttaagataggggagctccgcaaagaggttgacgctcctgtcatcgccctgacggcaactgccactccggcagtggcaaaggacataatggcaaggctgggcttcaaggaagagaatctaatcggcagcagcttcgagcgccccaatcttagttatgtggtgcgtcgtgcagaggacaaagccggacaactgatgtcaatttgtaatgctgtcaaaggtacgggcatcgtttatgtccgcaaccgtgccaagacagaggaagtggcggccatgctttctgcaaacggcatttccgcctcctattaccacgccggcctgagccacacgatgcgaagcgagcgtcaggaggcctggcgtcaggacaagataagggtgatggtctgcaccaacgccttcggtatgggaatagacaagccggatgtgcgttttgtcgtgcatcttgaccttccggacagcccggaggcctatttccaggaggcaggaagggcaggacgtgacggccttaggtcttatgcggttcagctatggaattcaaccgaccttcagcgcctgcggcagctggaaaaagtcagcttccccccggtagacttcgtagaagacatatatcagaaggtgcacgccttctttgacatcccatacaacaccggagagggcagaatgttgaagttcaatcttgaagatttctgcaagcacttctcactcggccgccaagaggtatattatgctattaaatatattgagcgtcagggccactggacctttacggaagacatggaaatcgagcttcgcgtaaagataagggccagccgtcaggaactgtacgatatagactttggagatcctctggccgtgcctctgcttgaccttctgatgcgaaggtacgagggcatattttcctggtctgtcgccatagaagaagactacatttgctccaagcttggaatcgatatcccggccttgcaccagctgctgtataagctggctataatgcacgtaatcaattatgtaccgcaggacagggctaacgtgataactctgtcgcatccgcgtctggaacccgggaacgtagctctttctcctcttctttaccagcgtctgaaagacagttatcatgcccgctgcgaggccatgacagattatgtgtcggacgatgccacctgccgcagccgcaagctgttggcctactttggccaggctgatgcacccgcctgcggcacctgcgacgtctgccgacgtggagtacagccccgtcctgaatcgctggaggccgcaataaaggcattcatagaaaaaagcggcggagtatatactcttgccgctttgcaggaaaatctggaaagtcttaccggctttaccggccaggaagactggaccagacttctccgtcgcctcattgatgaaggagaagtcccgggtcctaatctttagaataccagttctttatagattggctgcctgctcttggcagtcattccctctatctttattacgtaacgaccgggttcatccggaacattgaagttcagaactgacggctctccggcagcaagcttgtgcagcggactccaatacagggtctgccttactgtaggatagctctccgggaatccggcattggtgaaggcaagggggtaggagagacccttgaaggagatgatcttcacgttgtccccaaacttaaagcctccaagatctgccttataggtagagaaactaagtatgccggagtagttggtaataccgaaggaataatcgaacggataaacctctacagacttgatcataagtggatcgaattccagg

SEQ ID NO: 509 - DNA, 23621 bp, synthetic construct
  source 1..23621: mol_type = other DNA
  misc_feature 1..23621: note = Synthetic
tcgagccccacgatacccatcgcgctgccggccagaccgcggctcttctcttcggccgtgtggggcgcatggtcggtggcgatcacctcgatcgtaccgtcggcgatgccggccagcagcgcttcgcggtcggcgcggccgcgcagcggcggattcatcttgaaacggccctcctcgcgcagatcctcgtccgtgagcagcaggtagtggggcgccgtctcgcagctcacgggcagccccgcggctttggcgcgccgcaccagttcgacgctctccttcgtcgagacgtggcagacatgataccggcagccggtctgtccgaccagccggatgtcgcgctcgacctgccgccattcgctctcggagcagatcccccggtgtccgtgcgtgcggcagtaagcgccatcgtggatataaccgccgcgcagcagttcgtcgacctcgcagtgggcgacgatcggcctcccgaccgccgcggcccggcgcatcgcctcggccatcagctcctcggactgcacgccgcggccgtcgtcggagaaaccgaccgcatagggcgccagcgccgcgaagtcgaccagctcgccgcagccccgctgccccatcgtgatgcagccgtaggggtagacccgcacgaccgcgtcgcggcggatgatatcgcgctgcagcccgagcgtctccggcgtatcgggcgccgggcggaggttgggcatagagcacacggccgtatacccgccgcgggccgccgcggccgtacccgtggcgatggtctccttctgcgggaaacccggctcgcgcaggtggacatgcacgtccacgaaccccggcacgaggcgccgcccgccgagcggcacgacccggtcgcccgcacgcggttcgtcgtcggccgtcacgcgaccctcttcgaccgccagccggccccgctcgaagcggccatcgcggaaaatctccgcatcggtgtaaatcgttctcatcgaacccggaatacaaaaaaatagggcaaccggaacagttaccctaataaaacaatgatgccgaaacccgctgcgaatggaaatcccatcggttatccggctgccggaatacgtgcgcggaggatatgcgggagatacgattcataaaggtctcgggatcgttataatcgtgcacaaagatagcgtattttcacgccgagcacaaaactttcggccgaaaatttatcaacattcgctccacagcccgaaattgccggagggtcccgccgcggctcctcacccgcccgtcggatccgatgcggccgtgcccgtcggacaccccgccgcccgccccgcacgaatatatttgcaccgcagggccgcttgcactatctttgcagcgaccggcaggcaccgtcgcacgacggccccgaatccgccccgaacatgaaccacgaccttctgctccccctgctgctgacgctgggcgccggactggcgaccggcataggcagcgctttggccttcctcgcccgccacaccaacaagcggctgctctccttctcgctcggactctcgggcggggtgatgatctacgtctcgttcgtcgaactgctccggcaggccgacacgacgctcgccgccgagtggggcgcgcgcaacgcctcgctcatctgcgcggcgagcttcttcgccggcatcctcctgatcggcatcatcgaccgcctcgtgccgtcgttcgagaacccccacgaggcgcgcgcggtcgaggagctgaacgacgcgccgcgcaacccgcggctcatgcgcatggggctgctgacggcgctcgccatcggcatccacaacttcccggagggcatcgccaccttcgccgcggcgatggacgacacggcgctgggcgtggcgatcgccgtggccatcgccatacacaacatccccgagggcatcgccgtctcgatcccgatctactacgccacaggcaaccgccgcaaggccttcctgctctcgctcctctcgggcctcgccgaaccggtgggcgccgtgctggcatgggcgttgctggcccccttcatgtcgccgacgctcatgggctgcctgctcgccggcgtggcgggcatcatggtcttcatctcgatcgacgagctgctgcccgcggcgcgcgaatacggcgaggcgcacacctcgatctacggcgtagtggcgggcatggccgtgatggccgcgagcctcatcctgctggcttgacggaaacgacgagcggcacgcgcatccccgcgaaccatcggacgacgccacgaccggcacaacgaacaaaaaaacgacacgacgaaatgaatctgctcttcctcctgctcggcctcgcgatgatcctcggcggcgcccattttctcacggacggcgctgcggccgtggcacagcgtttccgcgttccggagttcgtcatcggcctcacgatcgtggccatcggcacctcgacgcccgaactggtggtctcgctgctctcggccgccggcgggcagagcgacatggccatcggcaacgtggtgggctcgaacctgttcaacgtcttcgtcatcgtcggcatctgcgccctgatccgccccctgcccctcacggcgggcaacatccgccgcgacatccccttcggtttagcggccgccgtgctgctcttcgccatgacctccgaccggctgctgcaccccggcgccgccgaccggctcggccggggcgacggcatcgcgatgctcgtgctctacgtcggtctgatgctctatacgatccgttcggcgggccgcaccgcgccccccgaagccgcccccgcacgctccggaccgaagccgtggatcgccgtcgcgatgatcgtcggcggtctggccgcactggtaggcggcggcgagctctttctcaagcacgccacggccatcgcccgccatctgggcgtcagcgagtcggtgatcgccatcacgctcgtcgcgggcggcacctcgctgcccgaactggcggcctcggcggtctcggtcgtgaagggaaaaacggaactggcgctgggaaacgtcgtcggctcgaacatcgccaacatcctgctgattctgggcacctcggcgacgatccgtccgctgacgaggggcggcatcaccccggtcgacacgggcatggtggtcttgagcgccctcctgctgttcgtcgcggcgttcaccttccggcggcggacgatcgaccgctgggaaggggcgatctttctggcgatctacgccgcctacatggtctacctgctccgctgatcggccgacgcgccatcgtccgcacgctccagatagcgttcgacgagccgcggcacggcatagtcgcccagatgcccgacaggcacggccccgcagcgtgccgcaggagcgaacgcagcggtctcgatccggtggaatacggcatgcagcgcctgatgcgaaagccggtgcggcggcatgacgacgctgcgcacgaggcgccactcccccgccccggtccacgcacggaacgcctccgtgcggctcaaggcggcgaagtcggccgccccgtcggtctcgatcatcgggaactcccacaacccctgccagatatcgcgcccctcgcggcggcagagcaccgtgcggtcgccgcagacgatgtgcaggtagtggaaccagcggtcgcggaccttcgtgcggccctgcttcacggggcgctcccccaccgttccggcaccgagcgcgaggcaccgcgccgccagcggacacgtgtcgcaccgcggctgcgcgggcgtgcactgcagcgcgccgaaatccatgatcgcctgattgtagcgccccggatgccggagatcgagctgcgcctgcgccagttcggcgtagaggcgccggccggccgtggtatcgatcggtgcgtccagatcgaacagccgtgcgaggacgcggtagacattgccgtcgaccacggcgcagggaaggtcgtaggcgatcgagcagacggccgccgcggtgtagtcgcccacgccgcgcagcgagcgcacctcgtcgaacgtccgcgggaaaacgccgccgaaccgctccgcgacctgcttcgccgccgcatgaaggttgcgcgcccggctgtagtagccgagtccctgccagagtttcagcacctcgtcctccgaggccgcagccaacgcccccgcatcgggaaaacgagccgtaaagcggaggtagtagtcgagcccctgcgccacgcgggtctgctggagaatcacctccgaaagccagatgcggtaggggtcgtgtgtgcggcgccacggcagatcgcggccttcgcggtcgtaccagtcgagcaatatgggagcgatgcggtccatgcggatgcaaaaatacgatttttcccggtttcgcgttctatcggaagaaactatccctttcggccccgttcttgcgtccggaacgggcgaacgatacatacacctaaaaatggaacacgacaccccgctgcaacatgtcgacacgcccgacggcggtcgctacgaatggccgatcgacggcgatacggcactgctcgaatacgcccgtcgcggcgatatcgtccacctcgaccacacctacgtgccgccccggcacgagggcaagggctacggcgcgcggctggtcggcgcagcgctcgccgacctcgaagcgcgcggcctgcggatcgtgccgggctgctcgttcgtcgcggcctacatccgccgccaccccgaatgggaacggatcgtcgcgcagcaggcaccgaaggcgacggagcgctgacagtccggggccccacccggcaccgcatcgcgccgaacctccacgccggacgcaccgcacgcaccgcaaaaatgcacggggcgcaggaatgatccctgcgccccgcaccgtttcgctccccgacggcagcatcactcggcctccgtcgccgcgagtttcccgatctgccgctcggcctccgtcgccagcttgtcggcctgcttgcgcgcctccgacacgagcttgtcgcccgccttctcggcggcgatcttcgccagcgcgcccttcgcggccgcagcctccacgagcttggtacgctgctcctcggccgccgcgacgagcttctcgcccgcacgtcgggcttcggcacgcagccgctcggcctgcttctccacctcggcggcgagcgactcgctgccggtgagtttctcgatctcgcggtcgacgatgttcttcaccgcctcctcggcgacctccctcactccgagcgtgatcttcggcgcgacgaaggttccgccgatgcggaccccgatgcgctgcagcacgccgcccgtcgctgcggccggaagcgacaccttcgcctgatagtcgatcgtgccgtcgaggcccgtcgacccggcgaggttcatcgcgacggcgcccatcttcaggtcgaaaggctgcgtggcgagacgtccctcgcggacagtgaagcggatcgcgacatccttcgcctcgatgcggcgcagcgcatcgtcgccgagcgctttggccagcgcatcgagcgccgcgatgcgctccacgcggatgttcgccgagcggatctcgcccgaagcgtcgagcgtccgcaggtcgggagccatcgttgcgtcgagccgcgtgcgcagatcgagcgaaagggagtagtcgccgcccgtctcggcgaagatcggcacgagtttgcgcaccatgtcgagctcctcgaaggtcctgcggaacgaggcgcccgcgaattcggccttcagatcgagtgccggccgctgcggatcggcagccgtggcgtaacgccccgaagcggcgaccttgccgccgaagagccccatcgcgaggcgctgcagagtcagcgcgccgtcggcggcgcggatctcgcccgtgaaatcgtcgatggtcatcccctgcagcagcaccttgtgcagatcggccttgaaggcgaggtcgaggttgcgcggaatctccggcgccgcggcctcgccggcaggcgacggcgcagccttctgctcagggtcggcccctgaatccgcatcctccgaagcgggaagcatggccagcagctcattcagatcgagcagatcggacttcacgtagaggcgccccgagagcggcgcgccgcgcagcaggtagccgaggtagccggtcagccggccggtggccgaaaggtcgctgcgacccgccgtggcaccgaactcgccgagcgtcagcgccgccggcgtgacggtcgccgccatgcggcggatccgcagatcgggcagccccgcgacggagagtccgaccccttcgacgatgcaggtgcccgaggccttcatccgctcgtaacggcccttgtcgatatccgacatgcgcccctcggccttcagatcggccgtgaccagaccgcccagctcgacccccttctccagcggatatacctcgcgcacggagcccagatcgacccgtcccgcgaccgaagcgcggaaggcggggtcggagacgagattggcggcacggaacgtcgccgaaaccgcattgccggccatcttcatcccgaagcgcgcaaggtcgacgaccgtcgcgtcgagcgacccgccggggttcgtcaccgagagagcgacttcgatgtcggtcaccgatttgggcaacgacgcatagcggaacccgccatccgtcacggccacgtcgatcccgaacgcgggcaccgtcgcgtcgcgcagctcgccccgcgcccagagcgacatcgccagttcgcccgtggcggtgaggttgcggaattcgcgcgtatagaaggccggcacgagcgagagcagttcgcggaacttcacggcgtcgcatccggccgtgaggtccatcttcacgacgccgtcgtccgtttcgatccagccgtcgagccccacctcgacggcattcaggcgcagcgtgttctcggcgaaggcataccggccgcgctccggatcggcctcgatcgaggccttcagctccgcctcgacgtcgcgcagcatcggaatgccgcccgagacgaaacgcacgccctcggcttcgaggtgcagatcgaggtcgctgcgcccggccgagagatcgccccgcagacgcagcgagagaggcgccgtggcgaaggcgaccttcgtcgagtcgtcctcatagcggatcgaggcgtcgacgatgcggaagtcgcgcacggccagccggaacgacgacggaccgtcgtcctgcgactcctcctcgggcgactcctccggctcctgcgaaggcttcacgacatcccagttcacggcaccgtcggccgttttgcgggcatgcacggccggggcgtcgagcaggattttcttcacgacgagcccctcgtcgcccagcagcgacagcggagcgaccaccaccgagatgcgtcgggcggccacgatcgtgtcgccggcgaaggcgtcggcacccgtcagggtcagtcccttgagttcgagcgacgcattggggaaatggcgcagcaggctgatgtcgagccgtgcgaagtcgagcttcgcgaccagcgcggcgtcggcctcgcgacgtacgatccgttcgatttttccgcgcagcagcgtcggtgccgcgagcagcacggcgatcaagacgaccacgacgatcgtcgcgatccttacggttttcttcattacttatcgattttccggacgaaaagcgtcgtccccgcctcttcgaatcccatcttgcggtagagcgcccgcgccgccgtacgcgacggattggaggtgagcgccacgcgatcggcacccacccgcgcggcatgcccgagagcggcccgcacgagctcctcgccgatgccccggccgcgcacggccccatcgacggcgacatcctccacccacgccttgcggcccgagggggcatcgtaccacgccaacgtaagcatcccgaccggcacgcccgccgcacgagctaccagcaacgccgtgcggtcgcacgccgcgatcgcctgcagccgctcccggtcgggcggcagcagcgcgggcgaaagctgcggcacgagccgaccgatcgcctcggcgatttcgtcggtcacccgttcgaccgcacacacctctatgttcatatgagtccgatttgcggcaaagttaatcttttttcgatgcgaacatgctacctttgtaccataaaaaacgcacccatgacccttcgcgaacgtttggaggcgctcgcagagcccggataccggctcttcgccgcctcgctgctgcccggcgtcgacgacctgataggcgtccgcctgccgctgctgcgccgcatggcgcgcgagatcgcccgcggcgactggcgggcctacctcgccgaggccggaagcggctcgttcgaggagcgcatgctgcaggggatggtgatccgctgcgcacgctgcgacgccgaggagcggctgcgctacgtggggcgcttcctgccgcttatcgacaactggtcgctgtgcgacagcttctgcagccgcctgcgccccgaagagcgcgagccgatgcggcgcttcatcgccccgctgttcggctcggaacgggagttcgaggtgcgcttcgccgcggtgacgacgctcgtcgacttcgtcgatgaggagcacctcgacgaaacactgcgccgcctcggctcggtgcgccacgaaggctactacgcccgcatgggcgtggcgtgggccgtgtcggtctgcttcgcgcgttttcccgagcggacccgcgcatggctcgcggacggctgcccgctcgatgcgtggaccttcggccgcgcgctgcgcaagatcgcggagtcggaccgcgtgagcgccgagctcaagcgcggcatccgcaccctgaagcggcattgaaggagctcttcggagcacaggatgcgacgcggaggcggaaatcggtccccaagctgcgggacaggcgcacgaatccgcgaaattatcgctatcttcgcacgacggaacccccaaaaccaccgactctatgcgcacgctggtaatcatacccacctacaacgaacgggagaacatcgacgcgatgatcgaaaaggtcttctcgctccccgaaccgttcgagctgctcgtcatcgacgacggctcgcccgacggcacggccgcgatcgtgcgcacacggcaacacgactaccccgggcgcctgcacctgatcgaacggagcggcaagcaggggctcggcacggcctacctcgcaggattccgctgggggctggaacgcggcttcgaccgcatctgcgagatggactgcgacttctcgcacaaccccgacgatctggtgcgcctcgtccatgcggccgccgaggggtacgacgtcgtggtcggctcgcgctacgtgcagggggtgaacgtcgtcaactggcccatgtcgcggctgctgctctcctacttcgcctcgatgtacgtgcgtctggtcacccgcatgccgctgcgcgacgccacggccggattcgtctgctacacgcgccgggtgctggagacgatcgacctcgacgccgtgcgcatgaagggctacggattccagatcgagatgaaatacgccgcatggcggctcggcatgcggctcaaggaggtccccatcatattcgtggaacggcgcgaaggggcctcgaagatgtcgggcggtatcttcggcgaagcgctcttcggagtcctcggcctccgattccggcgcatccgcggccgcaaagcgactgccggacgatgctccgaccgctgaccggcctctccgaacgtcagaactcgccttcggtcgcgacggacccgttccgatcgcgtttccgtattgcgctccgctcttccgccggcagagaccccggcggcccgattcaccccacaaaaaaatgtctccacggagtacgcggagacgtaggtcatcgaccttcggcatgtagccttattgtggtaagatgtagtcttacgccacaaatataggataaaaagttgtagtttcaaaatttttcatttaattttgaagcaaacgggagcggaaaaacgcttcgcgcggtccggctccggtcgttccgcataccctccgggcccgaaccgcaacgaacgacgacaatggaaaaggtattgggcgtagatctgggcaccgactcgatcggttgggcgatcgtgcagcggcacgacacgcgttacgaactgctcgaccggggtgtcgacatctttcaggagggcgtggcgcgcggcgacacgggacaggagcagccggccgtccaacaacgcaccgccgcccgcgccctgcggaggcactacgcccgccgccggctgcgcaagatcgagctgctgaaggtgctcgtccgccacgaactctgtccgccgctgaccgaggagcagctcgaggagtggaagcgcaggaaggtctatccgctgaccgacgaattcctgcgctggcagcgcaccgacgaccgcacggaccgcaacccctaccgcgaccgctaccgggccctcaccgaaacgctcgacctcgcgacgcagcacgaccgctacgccctcgggcgggcattctaccacctcgcgcagcggcgcggcttccggagcaaccgcaaggaggcgggcgccgaccgcgaagagggcaaggtgaagggggccatccgggagctctcggccgagatcgccgacgccggatgcgcctatgcaggcatctatttctacgagctctatcgccgcggagagcggatccgcacgcgctacacttcgcgcacggagcaccagctcgccgaattcgaggccatatgcgcgcgtcagcggctgcccgacgagctgtgcggagcgctgcggcgggcgatcttcttccaacggccaaatcgcagaaagggctcgtcggacggtgtacgttcgagaagcgcaagagccgctgcgcggcgtcgcatccgcgcttcgaagagttccgcatgcggtcgtacgtcaacaacatccgcatcgaaacgcctgccgacccggcaccgcgaccgctctaccccgaggagatcgaggccatcgtaccgctctttcagcgcaaaagccgtccgcatttcgacttcgaggatatcgccaagaagctggcgggcaaaggccgctacgcctgcaaaggcgaccgcatcgaggcgccctaccggttcaacttcgcacggaaggccaccgtcagcggctcgccggtgacggcggccctcgccggcctgttcggcgacgactggctgcgggagctttgccgccgctacgcgctcggtgcgggaaagagcgaggagcggatactcgacgacgtctggcacgcgctcttttcgttcgacgacgacgaacggctccgcgcatgggcgaaagagcggctcggcctcgacgacgacgaggccgcacgcttcgcggccatacgcctgccgcagggatacgccgcattgagtctgaacgccatccgcaagatcctgcccgccctgcgcgccggataccgttacgacgatgcggtcttcatcgccaacctcaaggcggtgctgccgcccgcaatccgcgccgacgaggcacagcggagcgccatcgaggccgacatcgcagccctgctcgacgactaccgcagcaatccgctgaaccgtgcgacgaaggaggagtacatccgcgactacctgcgcgaccggatcggcagcgacgagagccgcctgcgccgtctctaccacccctcgatgatcgaaacctacccggccgcacggcccgacgcacagggaggcatccggctgggatcgccccgcacgccggccgtgcgcaatccgatggcgatgcgggcgctgcaccgcctccgcgccctcgtcaacgcgctgctccgcgacggaaagatcgatccccgcacgaagatccgcatcgagtgcgcccgggagctcaacgacgccaaccggcgcaaggcgctcgaaagctaccagcgccagcgcgaagccgaacaccggaaatacgccgacgagatccgcgcccagttcgccgaagcgacgggccgcgccgtcgaacccacgcaggaggatgtgctcaaataccgcctgtgggaggagcagaagcatatctgtctctacacggggcggcagatcggcatcgccgacttcatcggcgacgctccccggttcgacatcgaacacacggtgccccgctcacgcggcggcgacgacgcacaggagaacaagaccctgtgcgaaagccggttcaaccgcgaaaccaaacgggccaaactccctgcggagctcgccgaccatgcggcgatcgcggcacggatcgaggcgctcggctggcccgagcggatcgagcggctccgcacgcagctcgaattccaataccgaaagagcagacaggcgacgaccaagcaggagaaggatgcggccatccagcggcgccactgcctgcggatggagctcgactactggcaatcgaagctcgaacgcttccggatgaccgagctccccgaagggttcacaaaccggcagggcgtggacatcggcatcatcggcaagtacgcccgggcgtacctcggaacggtgttcgaacgcatctacacggtgaagggcacgacgaccgccgcattccgccggatgtgggggctgcagcaggagcggacgccgaaggcgcggaccaaccacgcccaccactgcatcgacgccatcgtcatcgcctgcatcggtccccgcgaatacgacctctgggcccggtatgcgggcgacacggagcgctacgaacgcggcgaggcggggcggccccgctgcgagaagccgtggccgaccttcacggaggatgtgcggaccctgaccgacgaactcctcatcgcccaccacacggccgacaacatggtcaagcagagtcgcaaacgactctacaagcacggcaaggcgctgtgcgacgaagcgggcaatccccgctacgcacagggcgacacggcccgcggagcgctgcacaaacagacgttctacggcgcgatcctgcgcgacgacgaggtacagtacgtcgtgcgcaaaccgctcgaccagttgcagaaggacgatgtggagaagatcgtcgacgaggccgtcaagcagcgggtgaaggaggcgatcgccgaagcgggcttcaagacggcgacggatccggcgcaatacaccgtgtggatgaaccgcgagaaaggtatacccatccgcaaggtgcggatcttcgctacgtcggtaaaacgcccgctccggctcaaagagcagcgcgatgcgtccgttcatccgcacaagcggcactactacgcagtcaacgacgccaactactgcatggccctctacgaaggcacgaacgaacgcggccggacggaacgctcgttcgaggttgtcaaccggctggaggcggccgccttcttcaaggcgagcgccgaccgggcgtcgcgtcccgacctcgtgccgtgccgcgatgcgaaaggttatccgctgaagtacatcctgaagcccggcacgatggtgctgttctacgaaaaaacgcccgaagagctcggcgaatgcacgccggccgagctggcgaaacggctctataaggtgacgggcataagcacctccctcatcgagcagaaatacgcctacggagtcctcaccctgaaacaccatcaggaggcccgtccgtccggcgaactgaagatcaagaaggggagctggaaaatcggcgaagagtatcgccccctgatcggcatgaatcatacccagctgaacgcctgtgtcgaaggctacgatttcgaactgaccgtcacgggaaagatccgtttcaaacactgatgccccatgctcaagcgcgccctctttttcgccacaccctgcagcctgaagctgcgcgacggacagctggttttccacacgaaggaagcgcccgatatcgaacggcaggtaccggtcgaggacatcggggtcgtcgtgctggaacatccgcagacgaacgtcaccctaccgctgctcaacgccttgtcggacaacaacgtcgcggtggttttctgcggcgacgaccggatgcccaacgccatgctgctcaacctcgactccaaccgcacgcagggcgaaaaataccggtcgcagatcgaggcgagcgagccgctcaagaaaaacctctggcggcagatcgtcgaagccaagatccgcaatcaggccgccctgctgcgcaaactgggcaaggacggcgacctgctgaagccctactacatgaacgtccggagcggcgatgcggacaaccgcgaagggatcgccgccaaagtctactggtcggagcttttcggacgcacgttcgtacgggcgcgcgaaggcgacgtaccgaacaatctgctcaactacggctacacgatactgcgcgccgcggtggcccgcgccctgatgggatcggggctgtttcccgccttcgggctcttccaccgcaaccggtacaacgcattcccgctggccgacgacctgatggagccctaccgtccctatgtcgacgaaacggtctacaggctttatgccgagggccgcaccgaactcacgcgggaggtgaagggcgaactgctgcacctgctgttcgtcgacacccgcttcggcgatctgctgcgcccgctcgacgtggggctgaccttcacggcggcctcgctggccaaatgccttgccgggacgcagaaaaagatcgcctgtcccgcattggaatagccgccgcgaattgtcggaggctacggaatgctcccgtgtgcggaggcgggcgctccggccctccgaaggacctgcaccccgtcggtgataaccaaccgttccgcacctgcggaagcgaaaaaaactacacgatgtcggaactacgtctgaatgcttatcggatcatgtggctgttcgtatttttcgatttgccgaccaataccaaagccgagcggcgtcatgcgacgcagttccgcaaagcactggagaaggacggcttcacgatgatgcaattctcggtctacgtacgccactgtccctcgaaggagaatctggaggtgcatctgcggcgggtccgcaggtcgatgccgccggcaggcttcaccactcttttgagcgtgaccgaccgacagtacgccgaaatccgcaatttctggggcaagaccgagcgctcccgccccgaaacaccgcagcaactcgaatttttttgatacatttgtaagcggcatccgttctttgacattcggaattctcacacgtaaaaatcgcatcgaaaccgctttgccggagtgcgcagcatcggattttatccggtgtcggacaccgcaaaacacagaaaatcaaagacaatatcgaccggcgttgtggtttgatgtagtgaagcaataagatacaattccagatcaaccgcctgcgactgttgcttgttgtggtttgatgtagtgaagcaataagatacaatcggaacgagctgctcgcggtcgcgcgaaggttgtggtttgatgtagtgaagcaataagatacaatctgatttgtttttattcttgcatacaatttgttgtggttcgatgtagtaaagcaataagatacaatctcgaccgaaacgcatttgcccgccgggttgttgtggttcgatgtagtaaagcaataagatacaatattacgcgtatcgcctgttcgcaaacggcggttgtggtttgatgtagtaaagcaataaaattcaatcaggggctggaaaaagaggatgcacagcccgttgtggtttgatgtagataatcaatagggatacaataacacctcgtcgaaaggcggtatggagttgttgtggttcaatgtagacaaataataataaaatggcgtctgcagatcgttcgaaggattcgccggaaggcaccggaaacctcccactatagtcggaaaagtctgtcggcaacgaaaaaatcgcacaccaacacaccggcaggccggaacaccgctgcccggtgatttttcggtgtccgcagccgcatcggcgcagagcggacccttacgaacgaagaaagagaccggcgccaatcaggagttaaaaacgctgttagacaagcagataagcgcacccgaacttttcgccggcacgattcggagagaacgttcgtcggccgaagcggagcaattgcagagaatttttgctatttttgttccgtgcggttttcaaccgctccgtcgttcatgaaaaaagtcacgcataccaatcggcgtccgtctccgatcatcggaaagatagcggtcgcgctgctcaaaaccctgatcgcgctgatcctgatcgcccttctggcgatcttcgcgaccagcgtaagccccatatacgacttcgccgaaccgaaaccgttcagcggccccgacatcttcgatccgtacgagggggggggtcgatgcgactcgccctaccgctggaaaagggccaacttccacacccatacgcgcgtaaaggggcttctgaacgagtgcgcgtactggccggccgagaccgatgcagcctacaggaagttggggtacgacatcgtcaccttctcgaaccacaacgaactgacccgccatccctacgacgcctcgctgcaggtcgatgtctacgaacacggcatcaacctcttcaaataccacaagctggttttcggatgcgacgaggtgaaccgcttcgaccacctgatcccgctcttcgcctcccagaagcaattccagctggatctgctcggcagggagtcggacttcatccagctcaaccaccccttgcggacgacgggcacctcgaaaaaactcatgcagcgcctctgcggctacagaatcatggagctcgacagcggcaagagcaccgaaaacgagtattgggactgggcgctctccgccggacactacagcttcggactggccaacgacgacctgcactatcccgaccggtcgagtcgcatcgccgtgaggtgcaatttcctgtgctgtgcatcggcctcgtacgaagatatcaagaagaccctgctcggaggatgctactatgcgatgcgcgttcccgactacggacgcggggattgggaggtgaagtacgcccgcaacagggagctgccgtcgatcgaacggatcggtctcgacggcgagacgatccgcatcgccctgtcgcaccgggccgacagcatcaaggtgacggggcagcatcacaccaccctgtcgctgatcccgaacgcctccgaagcaagctatacgatgaagcccgacgacccgtacgcacgcatcacggcctacttccccgacggcgaggtgatctacaccaatccgttcgcaagatacgacgcctccgcggcggagacgccctacgccgagccgacgcacaaggtaaacgtacccttgacgatcctcttcaacctcacgctcctcgcgctgtgcgcaggaacgatcctcgcattccgtaagacagtcatcaaatggtgaagttcctgcaagaaaagagcgaccttacccgcgtatgcgcggcactcagcctctttacgctcgtcgcgttccacggaccgtttttccggttcgttatcggaaacatcgaagggggggggtacaacggagtccggatcaccgcaagtctggcgatcctgatgctcgcgctcaacttcttcgtctattacctcgtgctcttcctcgggcgcatcgtcggaaagtgcatcctcgccttcacattcataggcaatgccttaagtctctacttcatcgatacctatcaggtgctcatcaccgacaagatgatgggcaacgtgttcaacacgcggtattcggaggcctcggggttcttctcgtggtccgccgtatggtacctcctcctgctgggaatcgtcccgtgcgtctacctcttcgcgaggcggttcgattacggaagccgcaagcggttcttcgcccgcacgggcatagcgctggccgtctccctgaccgttgccctgatcaacatgccgaactggccgtggatcgaccgcaatgcgcccaagctcggcagcctgatcatgccgtggtcctatacggtcaactccgtacgctactacaactccgtacagaaacgcaaccggaaggagattccgctgcccgacgcgcggatcgcgaccgaaagcaaggacctctgcgtgctggtcatcggcgagtccgcaagaagggcgaatttctcgctgtacggatacggcaagccgaccaatccgctgctcgaaaaagacggtgcggtcgcactgatcgccgatgccgccgcgacctataccacggcgggcgtcaaagccatcctcgatcacaagcccaccaacaaactctacgagattcttccgaactacctctaccgcaacggcgtggacgtagtatggcgcagcaccaactggggagagccgccgctgcacatcgacaaataccgcaaaacgaaggatatcaaagcgtcgcacccggaggccgacgaccgatacgacggcatcctgctcgcgggtctcgaggaggagatacgctcgagcgacaaggacaagctgctggtcgtgctccacaccagcacgagccacggacccacctattacaagaaatacccgaccgagttcgaggcgttcacgcccgtatgcacgaccgtggagatggcgaaggcggacccggaagagctgatgaacgcctacgacaacaccatcgtctacacggactatctgctgcactccgtaatcgagatgctccgcggaatccccgaaaggcgcagctgcatgatcttcgtctccgaccacggcgagtcgctcggggagggaaatctctatatgcacggcgtaccgatgctcgtcgccccgaaggaacagatcgagatcccgttcatcgtgtggacctcggacgaggagctgcaaaccgatccgacggaaaaagcgggccaatatcatgtcttccacagcatcctgtcgttcctcgggatcgaaagtcccgtctacgacgcatcccgggatatcttccggcagccctgaaaagcacccgtactacgaagcgtcccgcatgcggggacgccccgaaacgaaaaatcgctcgatccgccagccggcgaatcgagcgatttttcaagtacccggagccggggtcgaaccggcacgacattgctgtcattggtgtttgagaccaacgcgtctaccgattccgccatccgggcaaagcatatttcgatgtggatcggggcagcaaagatagacaaaaatttcgaaatccgatgtgcgccgtccgaattatttacggacaaagcaccgaaacgcacccctacgccatgcgccgcaccggatctccccggaccggaacgaagcgcatgcggcccaagcgggaaacgggctcggacggtgcgcaatccgggcgataaagcctcgacgcacgaccggccgcgccccaagagggaggctcctactcctcgccgtggaaataggccctgatcttcgcggccttcgccgtacccaccagcgccgcgagctcctcggtcggcgccgccttgaccttcgctacggtacggaaatgctgcaacaaagcctcgatcgtcttgcgaccgattccgtcaatacgctccagttcgctatggatgaaggccttgctccgtttctgccggtgaaacgacacggcgaagcggtgaacctcctcctgtatgtgggagaggaagtggaacagaggcgacgtggggcggatgccgaccagcagcggcggaaatccgtagagcagctcggccgtgcggtgccggtcgttcttggccagacccgcgatcggaatatccagcccgagcgcctccagtacctcgcggatcgcccccatctgcgccttgccgccatcggcgacgatcagatcgggcagttcggccccttcggccataaggcgcgtatagcggcggaagacgatctcgcgcatcgaggcgaagtcgtcggcaccgaccaccgtcttcacgttgtaatgacggtactccttgcgcgccggttttccgtcgcggaacacgacgcacgacgccacgggatcggctccctgcaggttggagttgtcgaagcactcgatgtggcgcggctgccggtcgagtcgcaaggcctcctgcagggcgttcatcaaccgttcggtatgtcgctcgggattcttgatttcgaggttcttgagctgctccgcgcggtagatccgggcgccgcgctgcgagaattcgagcagttcgagcttctcgccccgcttgggcacggtgaaggtcaccccgtcgaacagcagcgtcgtggagggcaggaagggcacgatcacctcgcgggccagctcgcccccggcgacgtgctcgacgatgtgctgcatggccagcgtcagcatgtcgcgctcgtcgccgcccacgccggcggtcagctccacggtctgcacgccgacgaccgacccgtggcggatgcgcacgaagttgcaataggccgtgtcgtcgtccggcagcagcgagaagacatccacgtcgacgatccgggcgctgacgatcaccgaacggctcgagtagttgtccagcgcgtcgagccgctgcttgaaccgctgcgccgcctcgaacttcagcgcggccgccgcacgctccatctccgcctcgaggtagcggcgcacgggacgcagatcgcccttcagcaccgcctcgaccatcgcgacgagctccccgtacgcttcctcgtcctgcaaccccgcacagggcccccggcagttgccgaggtggtactgcaggcacacgccgtagcgcccctgcgcgatccgttcgggcgcgaggttgagccggcaggtgcgcagcggcaccacctcgcggatgaagtcgagcacgctgcgctgcatggccagcgagccgtagggaccgtagtagcgcgacccgtcgcgcacgagctgccgcgtcgactccacgcgcgggaaatgttcgcgccgcacgacgatccacggataggtcttgtcgtccttgagcaggatgttgtagcgcggctgcagggtcttgatgagcgagttctccaacagcagggcgtcggtttcgctccccacgacgatatggcggatctcgacgatctgcttgacgagcacgcgcactttggccgagtggtcgcggttttcgacgaaataggaggagacgcgcttgcgcaggctcttcgcctttccgacatagatgatcgtgccgttgcggtctacgaactggtagacgcccggcgacagcggcagcagcgcgacctgctccttgatacgctccttctgcgattcggccataacgagtacaaagataacgaatattcggttacgcaccacaaaccgggctccgcacccggcccggaacgccatccgcagcggaacggatgcacggccctgcgctcgcggcccggcgaacggcgtcgttttccgcgattaaaaaatacagtcggcttgtattattgagctgaaccgtatacttttgtgcccgaaaacaggaacccgatccgccccctatgaaaaacctccttctgctgctcgcacccgctttgctcgccgcctcgtgcgtcgacaaaagctacgacctgaacggaatcgacaccgacgagatcgccatcggcggcgacgactccgaattccgcatcccgctgaccaccgtcacggtcgccctgcacgaaatcgcccgtgcaggcaccgacatccggacgctcttcgacgacgtcgacacatggctcccctcgacgctgcccggcaacgccgaccatgtcgacattccccggctccggcaggccgcttacgtctcctcgctgttcgacgccctctatgccgagatgggcacaagtacagcgaagcgcgaggcgatggccgacctcctctggcgcaagcatcgcaacgaattcctaccgctgctcacgctcgcaggctcggacgaaacggccttcaagaacgccttcgtggcccagtacgccaacgctgcgatccgctcggaagtcgaacggcagttcggcctctacctccgcgacctcgacacgatcgagccgctgcactacgacctcggggcgctcgacatcgacgactcggtggtggacatgctggccgacaacctcgatccggagaataccgccgccccgaagaacacgctccacctctacggcacgatcggcaacggactgcccctcgccgtcgcgctgcatcccgcactccggaacacgggcatcgacttcgccaccgcggccgaaccgggcgagaacgccatcgccgaacagcgtctcttcgccgaggatctgcgcacgctcgccgcggggaccgatctcacgatccccgtcgcactgcagaaatactacccgggccgcggcttcgacgacagccacccgatccgcatccgcttgagccccgtcaaacggggcccactcaaactcgaactctaacccgctaccggacatgaaaaagatactcctcctgctgacggtctcgctcgtggcgacgggcgtcgcggcgcagaaccccacgacctatttcatggagggctcgaccttccgcatgcagttcaaccccgccttcgcgccccatcgcggctacttcaacattcccgtactgggcggtatcgacctctccgtcggcggcaacctcgcgctgggcgacctgttctttccccgcaacgggaagctggtgacgctgctcgacgcctcggtctcgagcgccgacgccctcgccggactgcggacgaaaaacggactgaacgtcgactcgcgcatcaacatcctcggcttcggagcatatacgcgctaccgcaagcatttctggtcgttcgaactcaacatgcgcaccgcggaagacaccgacctgccctactcgctcttcgagttcctcaaaacgggacgcagcggacgcatctcgaacatcggcgtctcggcgagcgcctacctcgaggccgccttctcctactcgttcccgctgctctgcgaacggctctacatcggcgtgcggggcaagttcctcgccggcgccgcccgcgcccggctgacctacgaccgcttcgacgtctcgctcgaagaggatcgctggaacatcgacgcacggggtacgatcgacttcaccgcgggcggcgccgacgtctccgccgaggagccttacttcaagatcggcgacctcgacatgaagccgaccaaaccggccggctacggcttcgccgtcgatctgggagccacctacgacatcctgcccgacctgcaggcctcgctggccgtcaccgatctgggcttcatgagctggagcaagaagaacaccgtctcgggcgtctcggccaaaagcctcgaattcacgggcacgacgatccccgacgacggcacgccgcagcccgatttcgacctcgacgtactggagttcgaacgcgtcggcgccggaagcagcgcgcaaatgctccgcacggcgatcaacgccgggctcgaatacaagctctggcgccgcaagatcggcatcggcctgctctactcggcccgtttccgcaccggccgcaccttgcacgacctgaccggctcggtcaatttccaaccgatcgactggtttacggtgacgggcagctactcggtcctcgccggccggggaggagccttcggcatcggcctgaatctctgcccgagctggatcaacttcttcgtcgccaccgacctgctgacggcccgccgcacaccccaatgggtgccgatcagacaatcctcggtgcacgtcaccttcggtctgggcgtgcccatcggacgccacggccaacgggccacgaaacgatacatctatccgcccgccatgctctgactgcggacagaggcggtacgacgactgcgggcggcgattccgaccccataatacgacgacagccccggaaccgatcggattccggggctgttccgcctcgcaggca

SEQ ID NO: 510 - DNA, 23618 bp, synthetic construct
  source 1..23618: mol_type = other DNA
  misc_feature 1..23618: note = Synthetic
tgattgagtgtgtgctggtaggcgtcctcattctgacggcctatgcgctgatagcgatgctcatgatctacatggagcgcaaggtgtgtgcatttttccagtgccgtgtgggtcccacccgcgtcggcccttggggtattttccagattgtagccgatgtgcttaagatgctgataaaggaaatcttcatcgtcgaccgcgctgacaagtttctctattgccttgctcccttccttgttgtaatagcctctgtcggcactttctcgttccttccttggaacaagggtgctgaggtattggacttcaatgtaggcgtatttctgattactgcgatttcttcgataggcgttgtgggaatctttctcgccggttggggcagtaacaacaagtacagcgtcgtatctgccatgcgcggtgcagtgcagatgatatcgtatgagatgtcgttgggccttacactcgtggcaatggtcatcctgacgggcacgatgcaggtgagcacaattgtcgagcagcagacggggccttggaactggctcatcgtacagggacacattccagccctgatagccttcatcaccttcctcattgccggcaatgcagaagccaaccgtggtcctttcgacttggcagaggccgagagtgaattgacggcaggctatcataccgaatactcaggtatgggctttggtttctattacctggcagagttcatgaacttgtttgttatttctggtattgccgtgactatcttcctcggtggctgggctcccatcaacattggctcggagggcttcgacaccgtgatgaactgtattcccggcatcgtttggttcatggggaagacgctggctgttgtctggctgctgatgtgggtgcgttggacctatccgcgactccgcatagaccagatattgaagttggaatggaaatacctgatgccactggcactgatcaatatcatattgatgacggtgattgttgcattcggttggacactttaatgctatagaataatatggaaaacaagcaatcatatttcagtgaactcggcagtggcataaagaccctggccgtgggcttgaaggttaccttgaaggagttcttcaccaagaagtcgacggaacaatatcccgagaaccgcaagacgacccttcatgtatcgaagcgtcaccgtggccgtctggcatttgtgcgcaacgaagacgggtcatacaactgtacggcatgtaccttgtgcgaaaaggcatgccccaacggaaccatcaccatactctccgagatgcaggaggaccccgaaacgggcaagaagaagcgcgtgttgctcgactacaaatacgatttgggcgactgcatgttctgtcagttgtgtaccaatgcatgcaacttcaacgccatccatttcaccaacgacttcgagaacagtgtcttcgaccgtgagagtctggtgctgcatctggacaaggaagtctatgatggcggctcgcttcccaacttgattgatggtggcgcccctttgacaataggaaagtttaacaccaaaacaaaataatcgatatgacgaatttgatcattttttgcatgctggcagtagtcatactcggttctgccatcatgtgtgtgaccaccaagcgaatcatgcgggctgcgacattcctgttgttcgtcctctttggcgtggcgggcatctatttcctgctcgactacaccttccttggtgctgcccagataagcatatacgccggtggtataaccatgctatatgtatttgccatccagttggttaacaagaaaacgctccagggaatccaagagaatctcaagttgaagaatgtcctctgtggtcttcttctttcagtgcttggatttgccacggttgttttcgtgttagtaaagaataatgtatttgacaaacttaccaccatggcgggcgatgaagtcggcatggattatgtcggagagaccctcatgggggccgagaagtaccagtatgtgcttcccttcgagttcatctcgttgtttctcctggcatgtatcatcggtggtataatgattgcaagaaaggaggagaaagaatgatacctgcaggctattatttcgtattcagtgcattgctgttcttcatcggtgtgtttggtttcgtcacccgtcgcaacctgattgccatgctcatctccgtggaactcattctgaatgccgttgacatgaactttgcgctgttcaaccgcatcatctatcctcatcatgagttcttcgagggtttcttctttacgctattctctattggtgtgagcgcagccgagaccgctgtggccattgctattattataaatgtataccgtaatttcaagagcgatcaggttgatcgaattcaagaaatgaagaattaataaacagtttcagactatggattattcattcacattattgatccttcttcttcctgcattctctttcctgcttcttggacttgccgggatgaagatgtcacataggacagctggcctgattggcacgaccgtgctcggtgccgttaccgtactgtcctatctgacggcctacacctatttcacctcaccgcgtggagccgacggcactttctcaacaatcgtgccctttaacttcacctggttgccgctgggtaaccttcactttgaccttggcatccttctggatcccatttccgtggtgatgctcattgtcatctccacggtatcgctcatggtgcacatctattcgttcggatatatgcacggcgagaaaggattccagcgctactatgccttcctgtcgctcttcaccatgtccatgctgggactggtcgtggcaaccaacatcttccagatgtacctcttctgggagttggtgggtgtgagttcctatcttttaatcggattctactatccgttgcacgctgcggtggcagcctcgaagaaggctttcatcgtaacgcgttttgccgatatgttcttcctcatcggtatacttatcttcggctactacaccgattcgttcagtttctcgttcatcgacaatgtcgtgatgggcgaaggagcagccccgtttgttgccggtagtgcagcaaaggccgttgccgcaggagcctttatccttcctacggcattggtgctgatgttcatcggtggtgccggtaagagtgcaatgttcccgcttcacatctggctgcccgacgcaatggaaggtcccacaccggtgtcggcactgattcacgccgccacgatggtggttgcaggtgtgttccaggtagcacgcatgttcccgttgtggatagaatacgccccgcaggccatgggcatcatcgtctgggtgggagtattcaccgctttctatgccgcagccgttgcctgtgcacagagcgacatcaagcgcgtattggcattctccaccatctcgcagatagcctttatgatggtggcactcggcgtttgcctgccgggaggacacggtgccgtgcttgacaaccatgcacagctgggctacatggcaggtatgttccatttgttcacccatgccatgttcaaggcttgtctcttcttgtgtgccggttgcatcatccacgcagttcattccaacgagatgtccatgatgggcggtttgcgcaagtacatgcccatcacccacatcaccttcctcatcagttgtttggccattgctggcatacctcccttctcaggcttcttctctaaggatgaaattctgacggcagccatgcaatacagcccttgggtgggttggatcatgaccggtgtggcagccatgacggccttctatatgttccgtctctattacggcattttctggggaactgaaaacaaggaggcgcatgcccatcacaccccgcacgaggcgccttggaccatgaccttccccttgatattcctctccgtggtgaccatcgtgggcggtttcatccccttcggccatttcgtcagtgccagtgggcaggcctacgacatccatctcgactggactgttgccggcacatccattgtggtggccgtgctgagcattgcccttgccacatatatatataaaggtgagcgtcagcccattgccgacaagttgtatgcaacattcccgcgtctgcaccgtgcagcctacaagcgcttctatcaggacgagatttggcagttcatgacccacaaggtcatcttccgtttcgtctccatgcccatagcctggttcgaccgtcacatcatcgacggcaccttcaactttgttgcctggggtacccgcgaggctggcgagagcatccggccgtggcagagtggcgatgtacgcaagtatgctgtctggttccttacgggagccgtggcactcaccctagttttgttaagcatctaagaaaggaggcataaactatgaatatacttacattatttgttgtcattcccgttgtaatgctgctgttcttgtggctggcgcgcaacctcaatcaggtgcgtgcggtcatggtggcaggctcgtcctgtctgttggcactgtccgtttggctgacattctatttcgtgcagcaacgcaacgcaggcgtcaccgacaccatgctcctcacctacagtgtagagtggtttgctccgctgaacatccactatgccatcggtgtcgacggcatctcggttgtcatgctcctgctctccagcatcatcgtgttcaccggtacctttgcctcctggcagttgaagcccctcaccaaggagtacttcctgtggttcaccctgttgtcaacaggcgtatacgggttcttcatctccatcgacctcttcaccatgttcatgttctacgaggtggcgctcatccccatgtacctgctcatcggcgtgtggggtagtggagccaaggagtattctgccatgaagctcaccctcatgctcatgggaggttcggcactgctcatcctgggcatcctgggcatctatttcttcagcggtgcccagaccatgaacatcatcgagatagccaacctgcacaacattccggtagaaatccagaagatattcttccccttcatattcatcggtttcggtgtgcttggagccatgttcccgttccacacatggtcacccgacggtcatgcctcggcacccactgccgtgtccatgctccacgccggtgtgctgatgaaactcggaggctacggctgtttccgcgtggcaatgtatctcttgcccgaagccgctcaggaacttgcctggatattcctcatcctgaccacgatatccgtagtctacggtgccctcagtgcctgtgtgcagacagacttgaaatacatcaatgcctactcttcggtgagccattgcggcctcgtgctctttgcattgctcatgatgacacaaacagcctgctcgggagccatcttgcagatgctctcccacggtctgatgacggcactcttctttgctctcatcggtatgatttatggtcgtacccacacccgtgatgtccgccgtctgggcggtctcatgaagataatgcccttcctggcagtaggctatctcatagccggccttgccaacctcggactccccggcttctccggtttcacagccgagatgaccatcttcgtcggttcgttcgagaacaacgatgtattccaccgcgtatgcaccatcattgcctgtacttccatcgtggtgaccgcagtctacatcctgcgtgttgccggcaagatactcatgggcaaggtgtccgacccgcactacgagcatctgaccgatgccacctgggacgagcgcgtggcagtggcatgcctcatcttctgcgtggcaggactgggtgcaacaccgttcatcttcaagcccatcatcgacaatgccctcgtgccgattctttccgtcatcaatccagcagttgctgccctttaacataggagaatgaaacatgaattacagtcaatttcttaatatgattcccgaggcagcgctcgtagcagtcctgctcattcttttcgttgccgacttctgttcttcgaagacagccgcacgccgttggttccatccgctggccgtgacgctcatggcgctccagttgctgccatgtctcttggcagaaccggcatcagcctttggcgagatgtatgtatctaccgtcgctgccaatgcgatgaaggtcatcctcaccggcggtacgctcatcgtactcatcatgtcccgtgcatggctgaacgacgagcgcgtccgcaaatacgagggtgagtacaacatgctcatcgtctcgacgctgctgggtatgtacatgatggtgtccagcggccactttctcctcttcttcctcggccttgaaatggccagcgtgccaatggcatgcctggttgccatgaacaagtggaagaaaatctcggctgaggccggggccaaatatgtgcttatggcggtgttctcttcgggtgtgatgctctacggcctgtcgttcatctacggctctaccaccaccttgtatttcagcgatgttgccgcccagcttgtcaagtcgcccatgaccatcctcggtctggtgttcttcttcgcagggcttggattcaagctttcgctcgttcccttccatttctggacagccgatacctatcaaggagcccccacgcccgtcaccggctacctgtcggtcatttccaagggtgcggcagcctttgccctctgtaccatctttatccatgtttttggaagcatgattcaccattgggaggccctgctctatatcgccatcgtactctccatcaccgtgggtaacctctttgccatccgccagagcgaactgaagcgcttcatggcgttcagttctatctcgcaggcaggctacatcatgctggccgtggtgggcgcatcggcagcaggactcacctcgctgatgtactacacgctcatctatgtagtggccaacatggccgtctttaccgtcatcagcgtagtggagcagaacaacggcggcaagacagagatagaccactacaacggcttctaccagaccaacccgcgcctgtcgttcctcatgacgctggcactcttctccttggcaggcatcccgccgtttgcaggcatgttctccaagttcttcgtattcatggcagccgccgagcatggcagcgtatgggcctacgccgtggtcttcatcgcactgttgaacactgtggtgtcgctctactactacctgctcattgttaaggccatgtacatcaagaagtcggacaacccgcttcccgctttccgcagcgactgcagcactcgcttggcactggccctctgcacggtgggcatcgtcctcttcggagtctgttcgttcgtctatcagtggctgttcaacgcagcaagcatataagaagaaagggaagttccagcgagcttccctttcttttattttaccctaggccctcctaggctctcctagattttcctattgcttcccttccggtggaaggctctggaagtgccgcgtgcagaaggtctgcagcagatacacgcccgaaagcagtatacccaccttatagggtgccgtcgcatctgttgcctcgaaaagccatccggacagcatcattaccgccagtggggagatgaactgccccagatagagtgctgccgagagcagcggcatgacggtggtggccgagttgcgacccccttttatgctggcaatggtattcagatagggcactcccacacccgtggcaataccgataaaggcagatcccagtacaatggctggcagtgacggctgcagataggcagcatagcctcccaggaagaacaacggggcaaaatatttcacagcttttctgtagtggttcataatcttcccgaacatcagtccggcaaagaatgccaccatgtcgagccccaccatgacgatggttacggtctctgtcgaaagtcctgcctgcttaccggcaatgatggcgaagttggtcgggaagatgaagaatatcatcatcagcaggagcatacccgtcaccgatgggtggaacttcagcagttgccgtggctggaagggtacgccacgcttgttggccgaccccaactgctcgtcggggagccagcgccagaccatgatcagtgcaatcattccaagcagatacaccagaaaggcatagttccatgcaatggtggccagcagtccggccagcagtgtcgccaccacgccacccatctggttcatggcagccgatagtcccatcagcctggcttgttcctccggtgggaaatagtaggccagcaatcctgtagagagcggcatgataagtcctacgctgatgccgagcacagcccgcagcagaagcatcaggacaatgttgtcggcaaaaaagcatccggctccagccgtcacatacagcacaagtccggtggtggcaatagcacggatgtgcagcagtcggctgagcggaaggaaaaagaggttggtaacgatgatgaacagtgccggcaggcttacaataaattgcacgagcagtgccggtgcactggcaaagtgagccttgataattcccagtgcgggtgcaatggcggctccggccattacggtgagcagcgacatggagagaatggtggctgtcactcttcttgaaacggtgttgtttgtcataagttcaagtggagttttgaggatgcttgtcctccacagctctaccaggctgcttcaaataaatcggtgcaaaggtaagaaaaatttttgaaaagaacgcacttcctggaatatcctaggcttcccaaggcattcctaggcattcctagggtctcctatgcattcctaggctccctaggacttcctatagctctccagctggttctccagctcctcgatgcgctttctcagcagctggttctctttttccagcgcttcaatgcgtttgtcctgctcgttgcggtagccggtgcgtgcggcatacatccgttctttaatgccaccttcctttacaaagcgctcttccagtttctctatgtaggcacacatcatcttgtcagtctggtgacagagcgtgagcaacaggttggcaaactcctcatcgttcatcttttcggccaaatcggcatagtcgcagtagtcgttgtgggagtgacagaagtcgcgcaggcgtagcaggcgttcgttgtcgttgtcccaaatgggaaggctatgtgtattgaggtagtcgcaatagtcggcttgcagttcctgaaggctgccacgggcaacattcagcagcttgatttccatttccgaactgctctgtccgtcttcgctgccttccacaatgttctgcttgccggagcgtgccgcctggatcatctggttcaccgtgcggtcgccgtgggcagggaggaaacgccggcagaacgccacggtcagttggtagatggcatcgctcttgcggtagaaatacaagtctttccacacaacagccttcttcaatacacgcgctttcttcttctccatgggatgcaagctttagaaaacaaaaatagcggaaaagaaggaaaaacaaaaagattattgttttttttcttcaaaaagtcctaggtacccctaggaaaaaccgaggagcacctaggaccgcctaggctccttagaatatcctatcttccatttgagccccaaacgcactgcaactgccgcccaaacgcaagccgttttggcctcaaacgccctccgtttggggccaaaatggaaaacggttttcctccgcgcaagccggaatgtgtgttaacgattgataatcagcggcttgtgtaagttggttgaggtttctcttcatctctttccacgactttgtcattcgcaaaaaatcaattttgcagcggtaaatttttcagaatgaaagagtgaagagtttttgatgatacagataccaaggatttgtgtataataaaaaacctccaccgaggcggaggtataggttttacccttcggccactacggccttattgtgataagatgtagaaaatcttatgctgcaaatttaatggtttttattctttgcacaaattatttttgctaattttgaaagaaaattactactatggaaaaggtattaggtatagacactggtacgaacagtttgggttgggcaatagtagagcgaagtgaaaatggctgtcgtttgcttgaccgcggtacaaatatttttgaagaaggtgttaaaatcgagaaggggaatgaaagttcccgggcagcagagcgaacagaatatcgccaccagcggcggcattattggcggagaaaggttaggaagattcgattgcttaccgttctggctgaagttcatttatgcccgcctgtcagcaaggaagaactgcgtagatggcgcaatgaaaatcaatatcccgggcgcaaagactttatagactggcaaaggactgacgatgaccggaacatcaatccttaccgtttccggcatatttgcctgacgcagaagttagacttaaccgatttgactcagcgttatatcctgggacgggctttgtaccatctgaatcaacgccgtggattcttgagtaatcgtaaggaaacaaccaaggagtctgacggacaggtaatggagagcatccatgacctggatgtaaagatgaaagaggctggatgtgattatcttggtgagtatttcttccaactctacgagcgtggagagaaaatccgtaacaagtatacatctcggaaagaacattacctgaaagagtttcatgctatttgtgacaagcagggcttatccgaagatttgcgaagaaaacttgaacatgccattttcttccagcgtcccttgaaatcccagaagcatttggtcggttcatgtaaatttgagaaggggaaaccgcgttgtccggtgtcacatccgttgttcgaggatttccgaatgtatcagttcatcaacaacatcaagatacagactcctgccgatgaaatgctccgtcctttgaccgcagaagagcgtgcgcaaatcattccctgtttcatgcggaagtctgacttcgagttcaaagtcattgccaaggtcttgtctgggggaaagaaaaattctttcggttattataaggatggcgtagactacccctataaattcaattttcagatggacacaaccctcagtgcaagtcctgtgaacaatgccctgacggaaatcttcggtcaggattggctctcggcagtttgtgaggtttacaccttggcaggaaagaaaacgcgcagtcaggtaatgaacgacatttggcatgtgctgttttctttcgatgacgacgagaaattaaaggattttgcccgtgagcgcttgcaactggatgaggagaacgcagataagttcagtcaaatccgcatgaaatccgactatgccgcccttagcctaaaagccatcaggaagattctttattttctaaaaaactatggggtgatttatagcgatgctgttctgttagcaaacttatctgaggtcttgccaaaacaggactggaacctcaaggaaactcgtgaggccgccattgagaacatcattgagtatctggcagatttcaaccctggtctgggcaatgctaaaatagaagattacctgaaagattatctccagagtagataccacttagatgagaaaactgtaggcaagttgtggcatcattccgatttggaactttatcccaaagcaggggaaaatcagttgggctcaccacgcacagacagtgtgcgcaatcccatggccatgcattccctcttccgcattcgaaaggtggtcaaccttttgctgcagcaagggaagattgatgaagacactattgtgaacatagaattctcacgcgaccttaacgatgcaaaccgccgcaaggcaattcaagcgtggaatagggaaaatgagaaagcaaatactgccgcagaaaagaagatacaggagttctacaaggataaatatggagttgagcgtcagtctgtttcgaaggacgatatcctcaaatatcggttgtgggaagaacaaggccacaacaacctttatggtgaaggagaaaaaataggattggaagattttcttggtcctaatcctacttacgacatagagcataccattccgcgcagtcgtggtggtgataccacgatggagaacctcactctctgcaacagtgtgtacaatcgagatgtcaagaaggcaaaactgccgtcagagttgcccaatcacgagagcatattacagcgcatagagtcatggaaagaaaagtatttagcctttgaccagcaataccgaaaacttcgccggggagcagatgctacaaaagaagaccgcgaccgccgtatccagcgcaagcatttggcgatgatccagcgtgattattggaagcataaatacgagcgttttaccatgaccgaggttcccgatggctttgcacgacggcagggacacgacaattcggttattgcacggtatgcacgtatgtatttgaagtcattgttcaaacgcgtatatattgtaaaaggtatcgccacttccgacttccgtaaactgtggggcattcaggaagaatatgaaaagaagtcgcgcataaatcatgttcaccattgcatcgatgccatcaccattgcatgtatcggcaagacagaatacgacaaacttgcacaacagcgccataccgattcagacagggtatggctcaaggctatacaaaaggacataccaaagccttggccaacctttactgaagatatgaagcatctgcaaaatgaacttctgattgcccattacaccaaggataaacttccgaagcaaaccagaaagaagattcgcgacaaaaatggccgtgttgtctatcttaccggcgacactgcacgcggagccctgcacgagcaaacctattatggggcaatcgaacgtgagggaggaatacgatatgttgtccgtaagtctttggattcgttggaagagaaacagtgcgagaacattgtcgatgatgaagtgaaacgcattgtcaaggatgccatcttgaaccatgggagcctggcaaaggcagtggaagcaggcatttggatgaatgaggagaagcggattcccatcaggaaagttcgcatttacacccgattgacccgtccgttatccttcgacaagaagaaacctcgcgacaaatctgtgcatgaatacaagcggaattattatgtaaacaacgaccgtaactatctgatggccatctatcgtggcaaggatgcaaaaggcaaggagaaatcttcctttgaactggtaaatgctcttgcggcagccgaattctatcggaagagtaacgaccgtatcggcgttgggaaccaattagtaccaaacgagaaagatggattgcctctccagtatctcctaaaggtaggaacaatggtgctggtttatgagaattccccggaagaggtatgggacttaagtcctgaaaatctgcaaaaacgattgtataagataacagggttgtcgtcaatgatattacagaaaaaatatgaatacggaacgctcgaattgcttcatcatcaagatgctcggatgagtaaagacataaaatcaactaatggagtatttaaagaaacggatgagttcagggcaaaaatgacaatgttacatactcaattccatgcattggtagaaggagtggattttgaaatcaacgacctcggagaattaaaacgattgatatgataaaacagaccttgctttttcagactccagtgtcactttcgctgcattacaaccagttggtcattaccaatcgggagaatggtgcgaaaaccacacgccccatagaagatgttggggtagtggtggtggagcacccgcaagtacgcatgacggtacctttgctcaacatgctggctgacaacaatgtgagtgtagtgttctgcgatgaacggaagatgccaaagtctatgctgatgtcgttagaaggtaacacgactttgcaagaaagttataccagtcaggttgaagcatctgatgccatgaagcggcaagtatggaaacaacttgttgaaagtaaaatccgaaaccaaagttttttgcttgataatgtcggtaaggacggtcgtgtgcttcgcccgttctatcagaatgtgaaatcgggcgacagtgacaaccgcgagggtgcggcagcacggacatattggtctttgctgtttggggcagatttccggagaaaccgcgatggagccccaccaaacaatttgttgaactacggctattccattctccgggcggcagtagcccgtgcactcatttccagtggtctttatccggcattcggagtctttcatcgcaatcgctataatgcctttccacttgcggacgatgtcatggagccctatcgccctttcgtcgatgaaattgtttataggctatattatgacagtgcggaaaatgagttgaacgaatttaccaaaccttatctcttacgcctcttggtagcagatgtgcgcatggaccagattacacgccctttgcaggtcgcactctccatgacaaccgcatcgttggcaaaattctacaagaaacaaaccaacacgctctctttacccacatttctatgagtgaactccgatttaatgcctatcacattatgtggctgttcgtattgtttgatctccctgtcgagacaaagaaacagcgcaaggaagctgcactgtttcgtaaaaacctcattaaggacggattcgtgatgatgcagttctctgtctatatccgtcattgtgcttcgtacgaaagccagcaagtgcatattaaacgcataagatcgtttgtccctgtttcagggcatgtaagcatattgtctgtaacagataaacaatatggaaacatcataaatgtttggggggccgataaaaagaaaacgatatccgagcctttgcaattagaatttttttgatatatttgcgcaaggaaccaccaacataagccacttcctaggcaaaggcatcgctgtaacgcatttataaacagcaaaatacatctcttaggttgtggtttgatgtagaaacaatataagaaacaccaccattcatcatttcatagaccgtttgccagttgtggtttgatgtagaaacaatataagaaacacccattgtccagcgttaagacgtatgcagcggttgtggtttgatgtagaaacaatataagaaacacctcaacgcagcgcatgccgttcccgttggttgttgtggtttgatgtagaaacaatataagaaacaccacctctacgaccctgtcacaggagagatggttgtggtttgatgtagaaacaatataagaaacaccgcttgactataccgactattgatgttttcagttgtggtttgatgtagaaacaatataagaaacacctaaccacaggtcgaatgaaattgaggaagtgttgtggtttgatgtagaaacaatataagaaacacccggaatggccagtttctcgtcgtcgacaagttgtggtttgatgtagaaacaatataagaaacaccgtgtgtgggacaactatccgcagttgcatgttgtggtttgatgtagaaacaatataagaaacaccatgccgccagcctgctcgtgcccttgtagagttgtggtttgatgtagaaacaatataagaaacacctgggtcaatttctgcgcaaaactggttgaagttgtggtttgatgtagaaacaatataagaaacaccacggatgcaggttagaacagccatagcaagttgtggtttgatgtagaaacaatataagaaacaccatggatgaattggaatgggtgtctgcgaagttgtggtttgatgtagaaacaatataagaaacacctaaactgttttaatatgggaaaaatgacaagttgtggtttgatgtagaaacaatataagaaacaccagcggttcactaacaccgaaaacaggggggggtgtggtttgatgtagaaacaatataagaaacaccgctggcatccgcaaaggacaacggttgacggttgtggtttgatgtagaaacaatataagaaacaccctgctgtcagcatcgccgacaacaagacaagttgtggtttgatgtagaaacaatataagaaacaccaaaagactgggcggaaacgcccagcccaaagttgtggtttgatgtagaaacaatataagaaacacctctataacgaattacaaaatagcgacctagttgtggtttgatgtagaaacaatataagaaacacccttaaataacaaaacaaataacaaacaaaagttgtggtttgatgtagaaacaatataagaaacaccctgccttgcacccatccgtttgtctcgtaggttgtggtttgatgtagaaacaatataagaaacaccaagactccaacatctaacatcttcaggaaagttgtggtttgatgtagaaacaatataagaaacaccgcagagttattcagggataaacaatattcagttgtggtttgatgtagaaacaatataagaaacaccattgtttcaattcaaattcaaattattatgttgtggtttgatgtagaaacaatataagaaacacctggtggtgcaagactacatcgacaacattagttgtggtttgatgtagaaacaatataagaaacaccgcgattatggaagatcgcacgctggagcagttgtggtttgatgtagaagcaatataagaaagactaacgatattttgtattgaccacggatagaaaaacgaaaaaactgggttgatttctttgtgtagcggcggcttatttgtaacttcgtgcccatgaagaaattgacatacctctgtttgttggccgtgaccgtatcgatgatggcggcctgcggggcatcgtataaggaaaaacaggctgagcgtgactcgctgaacacggaaaagatgcgcaaggaaaagaaggcgctgaagattgccgtgctacccaccatggactgcctgcccgtatgggtggcggtggatgccggatatttcaaggacatccccgacagtttcttggtaaagccgttgaagtcgcagattgacattgaacatgcactgctggacaagtcggtggatgtcggtgccagcgataccatgcgcatcgacttcgtgaacagcaaggagccgctgttggctgccatgggaaacaccgaactgtactggttgcttatcacgaataagggcacgcgtgtatcggacccgaagaacctgggcgacaagttggtggcgatgacacgctattctgccaccgactggctgaccgaccaagtgctggcggcgcatccttcctctgcaacgaccttcaaaatacaggtgaacgatgtggagatacgcttgcagatgctccagaacaatgccatggacgccatgtggctgccagagccacaggccacgatggcactcatgggcggacacaagagcatcgccgacagcaggaagatgaaaacctatttgtcgacctttgccatgcggaccgccgataaggaagatgctcgcaggaatcgtcaggtgggtgtcttcgtgaaggggtataaccgggcgtgtgactccctgaacaaacacggtctgaaagcctatgctccgctgctcaaggagcacctcggcgtggacgagaagactttgccgcgcctgccgaagttcaagttcggaaaaattagtaattagttcttcgcaagcgaagcgcttagcgagcggacaagtatttccaccttcctccttcaccatgtttaacagcataaaatcatcggaactgtacaaggcccttgttgtggagaaacaattggggcagtcgcttgcgctattgaagcaataccttgacgcacatcacctgccgaacaggggagatgccattgccgccatagatgccaactacggacggatgaaggccttcatgctgaaaggctacgcagatgagaaacaggcggaaatatatgggcaaatgctgacccaggtgtactgggcggcctgcaatgccttcagggaggtggaacaaagccagactccatattacaaggtggtgtattcgcacatgcagttgcacgacttttccgacgagacggtcgtggcaacgctgcgccgatatgtggaggatatctccttgctgtcgttggagcaggggaacaccgatgaaaaagccaggcacatatctgcacggcatcatagttatatcaacgccctctttgaatgggtgaccctctcggaacaatggaccgacagcaaaagggtattctatacgcaactgttgttggacccgaccatcgatgtgaccgaccggctgctgctgataagtgccgtcacgctggggtgcctcaatgtgtttgacgccaacaaagagcaaacactcatgacggtgtacgaacagtcggttgatgccgactgccgtaagcgggccttcgtgggtatgattatagcaaccgacatggctgtggaactctatccgcagttggcagagcggctccatacacttgtggggaggaacaagaacgctttctacgaactgctgcgactcatggtgctggctgccaatgccgaccgggatatgcagaagataaagcaagacatactcccgacgctgcttgataaccaagccctgataaaggaaatgtttgccgacgacatggaggacaggtcggttgaggaagtgctccgccaagaggagaccgagcaggccatggacgaactggaggaacatctctcgcagatgcaggacatgatcagggagggagccgacatctatttcggcggaatggcacagactaagcggcatccgttcttcatggcatacgacaatacctgtaactggctgctgccgttcgatgccgaccattccgaactgaacagaaacaagacgccagagcggcaggcactgctgaaagcactggcacggacggatgccttctgcgactcggacaaatactcgctggcgctgaacctggatgcgctcatcagtcagttgccgcccaacatgttggatgccctttcggacgcttcggcctttgggccgcaggtgaactaccgtagtgatataaccgactatatgcagccgggctacattaaggatttataccgtttctacagattcggtcagttccagagtgcattctgcaatcctttcgatgtggcgcagccatcgtcggcattggacggtgtgtgccgtttctttgtgaaagatacagacgagggactgaaagaatgtctgaagttccttttcaagcatcagtacacagaataccttgaaatgatgttccgcaacttgccgcacggcgtggacacgggaacagccttgctccatgcccgccacctcctgctcaaaggggaataccttcaggcacagctcttgctggaaaacctctatgaggacaatcccatgcattggggagtgaccgtggcactggcacgctgctattatctcagcaggcagtatgggcgttcggcaaccttgtacagtgagttgtatcagcaaagacctttttcccagcgcgtggctcaggcacttgcttcggcactgctggcagacggccgggcaaaggaggcatcggacctgctgttcaaattatattatacccagccggaggaaatgaacatccagcgggatttggcacatgccctgttactccaaggaaaggcagatgcggcccggccgattgcagagaagctcatggcggttgccgaacctactgacacggacagactgctcatgtgctatgtgctggcggcagcccacgacatggaagcggctacggcgttgataaaggaatgtgaggggtctgtgatggcatccatccagaaggacaggccgctgttgatggccaacggactgacagagacggaaatacatatcctggcagattggaaaaacgaataaatggagatacgaaaaaaggagccctgcgaaggactcctttttgctgtttatgagttcatggatagtaggaactcatcgttgtcttttgtatggagaattcggtcgtgaatggtattcatggcttccacggctgtcatgtcggcaatgtgcttgcggagaatccacattcggtcgagtgtggtccggtcttgcagcagttcgtcccttcgtgtgctggaggcaactaagttgacagccgggaagatacgcttgttggaaagggtgcggtctagctgcagttccatgttgcccgttcccttgaattcttcgaagatgacctcgtccatcttggagccagtgtcgatgagtgccgtggcgatgatggtgagcgaacctccgttctcgatgtttcgtgctgctccgaagaagcgcttgggcttctgtagcgcgttggcatcgacaccaccggtgagcactttcccgctagccggcgacaccgtgttgtaggcacgggccagacgggtgatggaatcgaggaagatgactacatcgtgtccgcattcaaccaaccgctttgctttctcaaggacaataccggcaatcttcacatgtttgtcggccggctcgtcgaaagtcgatgctatgacttcggcattgacggtgcgtgccatgtcggtaacctcttcagggcgctcgtcgatgaggagcatcatgagataggcctcgggatggttagatgcaatggcgttggcaatgtctttcattagcagcgtcttaccagtcttgggttgggctacgataagtgcgcgctggcctttgccaatgggggagaagaggtctacaatccgagtggagaggttggtggtcgctggtgtggaacataggtcgaatttctcgtcagggaacagaggggtgagatgctcgaaggcaatacggtcgcggatggcttcaggtgcacggccattgattttctggatgctggtcagtgcaaaatacttttcaccttccattggcggacggacacggccttcaatgacatcgccgattttcagtccgtattgcctgatttgtgtgttggagacaaacacatcgtcgggtgaagacaggtagttgtagtcgctggaacggatgaaaccgaaactgttgttgccgtcggcagagatttccaacactccgttcacttccacgatgttgtcgaaattgaacctggacggtttcccatcgagggctgttttctcagttgtttcattggcttcgatgtcaacgggattatccagcatatcgtaattgggcagtgcctcaatgtcttcaatggcaatatcgacaacggggataaaatcagtcccgtcggctgggtcgtccgcccaaacttccggttgggcaacttcagcctgtgaatcggcaacatcgttctgtcggttcattttctcctgaagttgactaatcaggttaggtgcgtcagcagtctttggggacggtgacggttcggctgaaggtttatcggtttcgtaattggaagtttcggtaaagaggtctctgtcaagggccacttttttcgatgtcgtattgacagtgtcttcggatgttgtttgggctatatcgccagtttctttcatcttccttgttctacgcttgggctctttcggttcactcttagcaacttcttctgcaatcgcaacttcttcagtagtttccttggtggaatgctttattcttgttcttttcttaggggcagtctggggcttgttactttgatcaatggcttgttggtccagaatgtcgtaggcaatattctccttggtggagttgcttttgattttcagtcctaattcttttgccaattgtttcaactctgtcacggtcttggacatgagttcgtctttagtgtatatcatataatagtattgttttggcctgttcatgcagttgcatctgcacagcatcgcttatgaaagcgagtcaggccttagttattgtacttattgattgttagaaaagtttccttgtcggaaacataaacataaaaggaactattttcctttacgctggcaaaattaggtgttttctgtaaaataacaaaaaaaagctcgcaaaaaatgcgagcttttaatctgcttttatggttagggtattattctccttgttccatttttgccttgaggtcggccagaacatcaaggtcacccaacgatgtgctggctgcaacattgttcacttgtggtgcatcagccttctttgcaggagtcttctttgccggtttcggctcttccttgacatcctcgaaagtgcggctgtgggaaaggatgatgcgcttggtgtcctttacgaactcaataaccttgaacgggagttcttcaccttgctgtgcctgtgaaccgtcttccttaaccaggtgcttcggagtggcaaatccttcaccaccttcgttcagagcgatgacggctcccttgtccataagctcagcaaccttgccagtatgaatggttcctggaacatacagtgtttcataagcatcccaaggattttcttccaattgcttgtgaccgaggctgagacgacggttctccttgtcaatttcaagaacaacaacatcaatttcagcaccaacctgtgtgaattctgacggatgctttacgcgctgtgtccaagaaaggtcgctgatgtggatgagtccgtctacaccttcttcaagttctacgaagataccgaagttggtgaagttacgtactttggcagtatgcttgcttccaacgggatatttctcttcgatggtttcccatgggtcggccttgagttgcttgatgcccaggctcatcttgcggtcttcgcgttcgagagtgaggataacagcttcaacttcgtcgcctacattgaggaattcctgtgcactgcgcagatgctggctccaggacatttctgatacatgaatcagtccttctacgccaggggcaacctcaacaaatgcgccgtagtcggcaatgacaactacttttccttttacatggtcgcctaccttgagttccttgtccagtgcatcccatggatgcggtgtcagttgcttgtgacctaaggcgatgcgctgcttctcgttgtcgaagtcgagaatgacaacctgaatcttgtcgtcgagagcaacgacttcgtgtggatcacttacgcggccccaagaaaggtctgtgatatggatgagtccgtcaacgccaccgaggtcaacgaatacaccgtagctaacgatattcttaacggtaccttcaaggatctgacccttttcaaggcgaccgatgatttctttcttctgagcttccaactcagcttcgataagagccttgtgggaaacaacaacattgcgatactcctggttgatcttcacgatgcggaactccatggtctttcctacgaatacatcgtagtcgcggatggggtgtacatcaatctgactgccgggaaggaatgcctcgatgccaaacacatcgacaatcatgccacccttggtgcggcacttgatgaaaccttgtacaacctcttctttctccaaggctgcatttacgcgatcccaactcttgctcatgcgggctttcttgtgtgagaggatgagttggcctttcttgtcctcttggttttcaacataaacttctacaatgtcacctactttcaaatcgggattgtagcggaattctgaggcgggaattacaccgtcgctcttgtaaccgatgttgatgataacttctttcttgtcgactgaaataacttttccgtcaacaacctgatgctcactgaccttgttaagggtttcttcgtaagccttttcaacttcttctttagccacctctgatgtagtgccttgttcaaactgttcccagttgaattc

SEQ ID NO: 511 - DNA, 22883 bp, synthetic construct
  misc_feature 1..22883: note = Synthetic
  source 1..22883: mol_type = other DNA
gtgcgttacgtccggacggtggacaggcccgacggatacggcggtacccggaaatacaacctcgctgacgggatgtggacgacggccaccaacaccaacgtcagcccgaacgggaaatacatcgccggtacgttccggagggagagcatggacgaaaccggtcaggtgaacgaaacgaactacccggcctttttcaacaccgaaaccggtaagacggtgatattcgaggagctcgtcggaggcggaggcgtttcggcgacgagcgacggcctgggctttacggttgacagcacgttcgggccgaattccggcaaggtggtggatatcgagaacggcatcgtgctcgggagcgccctcgaatggatagagtccacgtacggtattctggttccggccggctacatcacctacatgcccgacagcaaggacaggttcctcggcgccatgctgtataccggcggtccggtggtcgagggcatcaactggtacgtcggaccggcgagataggacacgattgttttcataaaatttttcaggcgggtgcgccgggcggttttcgttcggtgcacctttttttgtgcgtgcgtttcgctgcgcaggtttcccggaggggcagcgacaaagtaggtatcgccggccgattcttttcacgtgttttaggtattgccggagccaggcggacaccctacttttgtcttcagataaaaagatttttagccatttctttaaagtcggtaaggccggcccccgcggccggccttttgtctattttgacggaatgttatctttgcagaaaacaacatacgccatgcagagaacaggaaaatataccaaggacgacccgatgagcgacctggtcagcgacaactacaggatattactgcttatgagccgcttcggtatcgggctcggtttcggggagagttccataggcgaagtgtgccgtgccaacggcgtggatacctccaccttcctcatcgtgaccaacatgatgctttacgatgagattccggccgatgcctacgacaaggtctcgatggagggtctcctctcctacctgcacaactcgcacgactactttctcggattccgcctgccggccatccgggagaaactcgctgcggcggtggggacgggcagcgacctttcgcgggccatcatgaaatatttcgacgactatacggccggtgtccatacccacatggcctacgaagaggaggtggtgttcccctacgtacgcgccctgctggaggggcgccgccagcaggattacagcatcgacatcttcagccggcaccacgaccaggtggagacgctgctcacggagttcaagaacatactgattaaatactacccgtcggccagtacgaacgaaatcaacaacgtgctgttcgacatcttcaactgcgagaacgacctcgcttcccacaatgccgtggaggacctgctgttcgtcccggcagtcggaagactggagaaaagagtggaggaggaaggatgagcgttacggtcaagataacggtggcggagccttcggtcatcatacgcagcggcatcatcgccgtgatagggagtgccgagaacctgaaggccgagatttacgaggtgagcgaaatcgaccagttgcggaacgtgctttcgtggcagcatccggatattctgctggtgaatcccgcatcgctcggcctctttccgctgcagcagctcaagaaggatacgggcaatcccgacatgaaatgcgtcgcactgcagtttgcatttaccgaccatgccgccctgaaaagttacgacgatgccatatcggtgtacgacagtgccgagacggtgaacgacaaactcgcccggctggtcagcgaaccggagcgcgacaagcggcacgaatcgctgagcggacgggaaaaggaggtcatcgcctgcgtggtgcagggtatgaccaacaagcagatagccgacaagctcttcatatcgacgcatacggtcatcacccaccggcgcaacatatccgccaaactcggcatccacagtccggccggtctgacgatttacgccatcgtaaacaagctggtggagctggacgacatcaaggactccgtagaggagcagctccccggagattaggattgcagccggaaccgcgggcctgccgctgagagtcagcgctggcggtaacgggctaccgtacccgcctccacgaactccgctttggctgctgtccatgcccggaaatggggcgaggcgttatgcgcggcgacggcctcttcgtctgcccaccgttcgatgaaacagaaggcgcggctgtcggccacatcctcgtaaaggtcgtaaaagacgttgccgcgttcggcacggctcgcttcgatgagaggctgtaccgctttcagaaaatcctcctgtttgccctcccttatcacatttctggctactatcgttatcatatcgttcgttgttggtgtcgtgtcggtaccatctctgtcgcgtgcggtcaggcgatgtcggcagtccagtaggagaaggtacggcgcgaaccatcctccatgccgacctcctgcgaccagcggtagggttctcccagccgaaaggcgacggactgccggaagaggggcccgccgtaacagagcgtatggtattcgccgttctcgccgcagaggtcgattccggcggggaagtccgccaccgtcgcgcagttcagtctgcggccgatatactccctgcccaatcgctctgcccaggtcgtggtgatgaccgcctccagtcccgaagcgaggaacgcttccatggcctcctgcggcgagagttcccaaagcggttccaccacctcgataccgtagggccgtagacgctcttcgcggtaggtgcggacgtcgtgcagaaagatgtcgccgaagatgaaacgggtgactccctgcgcccggaaccgttcggcagccagccgcatggcatgcgtatcgtgttccggctcccctcccggcgttacgttcaccgtgcagagcggaatgccgatggatgcggcctgtgcccggagcacccgttcgggaatggcgtgcattgtggagcggccgtcggcgccgctgaccgtcgtcagaagcgatacgacgtcgtatttctccgagcgcagggctgtcagcagtgcgagcgccgaatccttgcctccgctccagttgaagacggctttcatgcgtgcgtccattccgattcctccgtcttttcttttgtgaacagtccgccgaccagcgtgaagtaggggggcaatacggggccttcgctccagcgcagcgggagaccgagcagttctttcgccgtgcgggctacgtcgaacccgcaggcttccagcgaagtgcgggcccggtcgggataacggcacggtttcccctcggtacgcagacagccgccccggccgcacagcaaacagctgcccgcaaaaagggcccggctgccgtgatgacgcttttccgcttccagcaggcgggcatccatcggtcggcgggcatcctctacgatggcataggcggctgcggccgcttcggatacgtcggccggccggtgccgttccttggcgtccaatgttacgaccgccccgatgatgcggatgtggccgtagccggcaagccgttccagcgggtcagtatcgaaaggcggacaaccccatatccggccgtaattaccgcatgcccggcaatattcctcgatgcggcgtgcgtcgcagtagctgcggaggtaatctccggcgggcaggctggcggttatgtagcgggtacagggcatctcggtgcctgcaaagatagcgaacgcgcggcggattgccgcacttttttccgtcggcttcattccctgtggacatttctattttttgtaaagcggccgtaacgctttcgtaacgggctccgggtagttttgcggcgtcaaataattgttcgggataaagatatgagattgtacacaccgagaattctgtcgttttttcttgcgctgtgccccttccttgcggcggaggcggcgcagccgctttactccgtgtcgggaagggtgaccgatgccgccacgggcgaaccggtgacaggcgccgtagtcatggtcaaggatacctacaagggaaccgaaaccgatatggagggccgttggcgcctcgacaaccttgccgcgggggattatacgttcgccgtcagtttcatctcctacaagagcatcgaggtgtcgtgcagggtggccgccgatgtggagggggtggatgtccgcctcgaaagcgattcggaagaggtcgaagaggtggtcgtgaaggcccgtatgcggagcgacaccgagatagccatgctcggaacgataaaggccgttccgcaggtcacgagcggtgtttcggcggcccagatatcgaaaagccccgaccggaacgcttcggaagtcgtccgtcgcgtccccggcatcaccatcatagacgaccgtttcatcatcgtgcgcggcctgtcgcagcgctacaacaacgcatggataaacggactggccgtcccgagtaccgagacagacagccgtgccttctccttcgacatgattcccagcagtcagattgacaacctgctggtctataaatccccctcgccggagataccgggcgacttctccggcggttttgtcaagatagtgaccaaaggtatccccgaagaaaacagcatcgaagtcggttattcgaccgggttcaatgtcaggacgcaattcaggcagttccgcatgaaccccggaagctgtacggatttcctcggtttcgacctcggcaagaggccgctcggccgctcgtttccggcgcacatggacctcgtcacttcgcccgacgagataacgaggctgacgagagaagggttcaacaacgactggcgcatccggagttttatccccatgcccgaccagcggctctccttctcgatggcccgccgctgggatacgaagcacggccgtaccgtgggcaacatcaccgccgtcacatacagcaatacgtttaaaggagtcgaaggtatcaagaacgcccggtacggcatctactccgcggccgccgacacgcccatctatctcgacgattattatgacaaccaatattcgaacgatgtccggctcggagcgatgcacaactgggcgttcatcctcgacgcctctaaccgtatcgagttcaagaacctgctcaatatattggggcgtaaccgtctgaccgaacgccggggcatcaaggacatgagcagcatgtactatctcgaacagaccgagatgcagtactcttcgcgcctgacctatacggggcagttctccggcacgcaccacctggccggtaccgatgcgacggtgacgtgggatgccggttactcctatgccgaccggaacgaacccgaccgccgcatcgtctccaatatggccggtatcggaagtacggatgacctggcggatgtggtgacgggcaacgacaacatcaaacgctacttccagaccctcggcgaccacatcgcttcggcttccggcaactatgtgcagcagttggcctgggggggtatccgacccacgttgaaggccggcatctacggcgagtaccgttaccgcagctacgaccagcgcgagttcatctaccgttacgacaacctttccgccgaagagcggcaatattatctcaagctgcctttccaggaaatgctgtcgcccgaatggctgggagcggacaaggtctatatcgacgagataacccgcaagaccaatgcctacaccgccgacatctattacggagcggcttatgcggcgctcgacattccgctcggaaaattcgatatctatgccggggcacgtctcgaaagctacaccacgaagctgacgcgagaccgttcggatgcacccgaacttatcctgatgaccaccaagacgcaccacgacctcaatctgctgccttcggtcaatgtcacttaccggatagacgaccggcatcagttgcgggcggcttacgggcgttcgctcaaccgtccggagctgcgtgagctttcccctacggtctattacgatttcgacctcttcagcgagatagccggtaacgagaacctcaggacggccgtcatcgacaacgtggacctgcgttatgaattctatcccgcaccgggcgagacggtgagcctcggtgccttctacaaacacttccgcaatccgatagagtggacctatatcgacatgggcggttcgctccgctatatgtatgagaatgccgaccgggcccaaagctggggtgtggagctcgatgtgaggaaaaacctcggctttatcggtatgccgaacctttcgctggtgctcaatgcggcgtggatatacagcaacgtgacctttgtgcccggcgaggtggtgtccgaacccgaccggcccatgcagggacagtcgccctacgtgataaacgcgggactctattacagttccgaacgactcggactcgacgtggcgctgctctacaaccggattggcaagcggatagtggggctgggcaagtccaacagcgtcaatcccgaccccaatacgctgattcccgattcgtacgaaatgccgcgcaacgtgctcgatttctccgtatcgaaaaggatagggcgacgggtgacgctgagctgttcggtgaaggaccttctctcggaggacgtggtgtacaagcagttcccgaagttcgagaaggacggacagatgtaccggcgggaacaggtcacccggcgctacaatcccggtcagagcgtatcgctgactgtctcggtaaagctgtgaacgatattcgacaggacagacaatagagaaaacaccaatttttaatcgaacagaaaaagatgaaaaagaacatcaagatggccgccgtggcatgtatgctcctctcggcctttgctaccgtaagttgcgacaagaatacggacaacggcggcgagaatcctccgcagggcgaaacgttcgaactgggcgacggttcgaaggataatttcgaaatcgcttccgacatgacgctgacctatccgaacgtctatacgctcaaagggttcgtttatgtgcccgacggtgtgacgctgaccatcgagcccggtgtggtgataaagggcgacaaggctacgcagggtacgctcattatcgaacggggcggcaaaatcatggcacagggtacgccggaacgcccgattgtcttcacttctgcccaggctcccggcagccgcaagcccggtgactggggcggtatcatcctgctcggcaaggcgcccaacaacctcggcgaacagaccatcgagggcggtgtgcgttccaaacacggcggtaacgacccggcggacaattccggcgtgctgagctatgtacgtgtggaattccccggtatcgaatactctacggacaatgaaatcaacggaattaccttcggttcggtcgggagcggtaccaaaatcgaccacctgcaggtatcctattcgggggacgactcctatgagtggttcggcggtacggcgaatgcgaaatatctcgtcgcctattcgggttgggacgatgatttcgataccgacaacggcttcagcggcaaggtacagttcgccatgggcgtgcgcaatccgaggataggggacaagtcggcctccaacggtttcgaatcggacaacaacggcgacggtgcggctaccgaaccctacacctcatgcgtgttcgccaacgtcagcctgttcgggccggtgtccaatcccgcatcctatactgaacaggccggcgccgagggtagcccggtcgatgcgagattccaggccgcgcttcatctgcgccgcaatacccagctcagtatctataactccctcatagcggctttcccggtagggctgattatcgagaacgacaaagggtctaccacacaggattgggctgagcagggcaaactcaacgtaaccaactgcgtgatggccggcatggtgaagaattaccaggatgcacagtattggaaggatggttcccagttcgacgatgaggatgcgggtagtttcgccgacggttatttcaaccgtgcggagggtggaaacagggtgttcgcagccctctccgacctcggcctcagcggcaatccgctcagcctttccgctccggtggtcttccccggcagcgacagtccgcttgcttcgggtgctgcatggacggaggagaaggtggcttcgggcttcgataaagtggactatatcggtgctttcggtccgaatgagaccgctgtcgccaactggacgagcggctggtgcaatttcgacccccagaatacggtttactaaacgtcggcaggttggtcaatttgtcggtgggcgggctgctgcggcggtccgcccttttcccgttccgcggcggagcttccggtgtgccggcaatgcatgcggggattgcgttccgtgcaggaatattacagcccgaggtcttcgtcaatcaagaccaccgtaatcctccctttcggatggcatttgtgcagaatgagccgttcgttgcatatccgtcggggcgatgcacaatccatgcaccggcccgttttcacgcacggcgtgtcgaaatcctcatgacgtgccgcattgcgtggggcggccgtttcgcggatacgcctgaaggcggcatcgccgtcctccacgattttgttccgaccgacggtcaggatgacgtgccgcggtccgaaggctatcggagcgatgcggttgcctatcatgtccagccaatgcagctccccgtcgagggtgacggcattcgcgccggtcaggaacaggtcgcataacagcgcctgccggcgtctttctatcagttccctgaaaggaacgccctgttcgaaagtgtcgatgaacggataggtgcgctgcgtccgcagccactccaccgtccccgtcgcgtagagcgtcatcgagtcgccgaaggagatactcgccggcgcgagttcggcgatgcggctgcggatgtattcgccggcctcgtgtgcgtcggccgctgtcgccacctcaaaaccgttgcgcctcagcctgtcggcacatctctccgttgtctttgcctgttccatcatgtgtctccgttatgggcggttccggcagatgttttccggagaccgtaaaaaagtctccacggagtacgcggagacataggtattaaaacctgcggcccatggccttattgtggtaagatgtagaagttcttacattgcaaatataggaaaaataagtgcacaaatccaaaaattttccttatttttacgaaaaaccgccaatttatggagaaaagattgggtatagatgtaggaaccaattccctcggatgggctatcgtggaggtggacgacgaaggatgtacgctgctcgaccgaggggtggatatctttcaggagggggtagcacgtgagaagaatcaggagaaaccggccgtgcaggacaggaccgatgcccgtgccctacggcggcactatttccgtcgccgtttgcgcaagatagccctgttgcgggtgttggtacggcacgacctctgtcccgcattgtcggaggagcagttgaacgcctggcagagtaaggggatttatccgttggacgatgcgttcatccgttggcagcgtaccgacgacaatgcggacaggaacccgtaccgcgaccgcttccggtgtctgaccgaagaactcgatttggcctgccgcgaagaacgttacgtgctgggcagggcgctgtatcatctgtgtcagcgccgcggatttctgagcaatcgcaaggatgcgggaaacgaggccgaggagggtaaggtgaagcaggagattaaaaccctctctgccgacatggccgctgcggggtgcgaatatctgggcgaatatttctaccggctttaccagcggaaagagaagattcgcaaacactatacagcccggaacgagcactatctggccgagtttcgtgccatttgccggaaacagcggcttgatgaggagttgcgacaggcattggaaaaagccattttctattagaggcccctcaagtcgcaaaagggcttggtaggcaagtgtactttcgaaaaggacaagagccgctgtccggtgtcccatccgcgcttcgaggagttccggatgctccagttcatcaacaacgttcgggttacgggtcccggcgatgcggagccgcggcccctttcgccggaggaggtggagattgtccgtccgctgttcctgcgcaagagcaaaccgcatttcgatttcgaagacattgccaaaaagatagcgggcaaagggaactatgcctgccggggcgagttgctgcaggcgccgtaccgcttcaattgtgccggtaaatcgacggtgacggggtctcccgtatcggcccttttcgcttcggttttcggagatgattggcagcgtgagatttgcagcctgtatacgctcggtgccgggaaaaacgaggagcagatactcaacgacgtatggcatgtcctcttcgcctttgaggacgaggagcggttgcaggcctggttgcaggagaaactgcagctttcagccgacgatgcgaaaaccctggcggccttccgtctgccgcaggggtatgcgtcgctgagcctgaacgttatcaacaagatacttccctacctgcggcgcggataccgctacgacgaggcggtattctttgccaacctcggaaaggtgcttccggcggaggtgtatgccgacccggccaggcgccgcgaagtggagcaagggatttccgcccagatggatgatttgggcgacggagagaaaacacggaaggaggaacgtattcgcgattatctgcggcgttattggggcgtagaggagaagcggctggagcgcctttaccatccttcgatgattgaggcgtatccgtcggcgtctcccaacggacagggtctcctgcagctgggttcgccgcgcatcccggctgtccggaatccgatggccatgcgagccctgttccggctccgcgtactgctgaatgaactcctgcgcgaaggaaagattgaccgtggcacgaaaatcaatatcgagctcgcccgcgagctgaacgacgccaacaaacggaaggccatcgaacgttaccagcgggagcgggaggctgagaaccgcaaatatgccgaagagattcgccaacagtatgtcgaagcgacgggacattccatagagccctccgaagaggatattctcaaataccgtctgtgggtggagcaggggcattgttccctttatacggggaagacaatcgggatttccgagtttcttggcgacggccggcggtacgacattgagcataccgtcccccgttcgcgtgggggagaggatgcgcagtacaacaagacgctgtgcgaagaggaattcaaccgggatatcaaacgcgacaaactgccgtcggagctggccaaccataccgcgatattggcctgtgtcgagtcgtgcggatggttcgagcgcatcgaggggttggagcatcgggtctggggggcggaccgtcgcgcaaagagtgcgacgaccaaatcggcgaaggatttcgccattcaggaccggcactactggaggatgcacctcgattactggcgcaggaagtgcgaggcctttaccatgacggaggtgcccgaaggattcagcaatcggcagggtgtggatgttggcatcatcggccggtatgcgcggctctatttgcagacagtcttcgaccgggtttatacggtcaagggtgctacgacggctgcgttccgcaggatgtgggggctgcaggaggagtatgcggcgaaagagcgcgtgaatcatgttcaccactgtatagatgccattaccatcgcctgcatcggaagccgggagtacgccctgtgggcgcagtacgttcggcaggatgaactctatcggcggggggaagcggataaaccccgttgcggcaagccgtggccgaccttcaccgaggatgtccgggcgacggccgatgagctgctcatttcgcatcacacgcccgacaacatgcccaagcagagccggaaacggctgcgtgtgcggggaaaggtgcagcggaacgacaggggagaggtcaaatacatgcagggcgatactgcccggggtgctctccatcaacagacattttatggagccatcgaacgagacggcgagattcggtatgtcgtgcgcaagtcgctcgaccaactgctgcctgcggatgtggaaaaaatcgtggatgaggcggtcagacagaaagtaagggaggcggtcgaggcatacggttttaaagaggcgacagacccgacgaaacacaccgtctggatgaacgaggaaaaacagataccgattcggaaggtgcggatattgaccggtgtgaaaaatccgattctcctgaagcctcatcgcgatgtatccgttaaggagtataagcgatattaccatgtcgtcaacgacgggaattactgcatggcgatttacgaaggcagagacaggcagggcaggttgaaacggacgtttgaaatcgtcaataaactggaggcggcccgttatttcaaacggagtgcggaccgggaatcccggcccgatttggtaccgctgtcggatgtcaacggttattcgctcaagtatctcttgaaaacggggacgatggtgttgttttatgaaaattccccggacgagttgtatgaatgttcggtcggagagttggctaaaaggttgtacaaggtcgtgggaatggcgcaggatggtcgtgtccagtttctgtttcatcaggaggcacgggaccggaaagccgttacggcggagtgtggaatgggaatttcggttttcgatgcacgccatcctgctccgaagttgaggataagagtttccaattttaaaatgttcgtcgaaggctatgacttcgaactgacggttacgggggaagtaaaattcaaacggtaattgcttcatggtgaaacgcgcgctgttcttttcgacgccttatagcctgagtcttcgggacaatcagatgattatccgtacgaaggaggcccccgacatgcagcggaccgttccggtcgaggatatcggggtggtggtgctggaggaccgacagacgtccgtgacgctgccgctgctgaatgcgctctcggataacaatgcggccgtcatcttctgcggcgacgaccggatgccgaacgccatgctgatgaatctcgattccaaccggacacagggtgagaactaccggatgcaaatcgaggcgagcgagccgttgaaaaaggggatatggcggcaaatcgtcgaggcgaaaatccgaaaccaggccgccttgctgcagaagttgggcaaagacggggagcggttgaagccctattaccggaatgtccgcagcggcgatgcggacaaccgggaggggactgccgccagaatttactgggcagagctgttcggccgggatttcgttcgtatgcgggagggagatgttcccaataacttgctgaattacggatatacggttctgcgggcggccgtcgcacggtcgctgatggggtcggggctgtttccggcgttcggcattttccaccgtaaccggtacaatgcctttccgttggccgacgatgtgatggaaccttatcgtccttttgtggacgaattggtgtacgggctccgtatgcagggcgagtcgcaactgacgcaggaggtcaaggggaccctgctgcggatactgttcgccgatacgcgtttcgagaaggtgatgcgtccgctggatgtcggcctgacgtttacggcggcatcgctggcgaaatgtttcgctggaacgcaaaagaagattgtttaccctttgttggagtgacaggatgtcggaagtccgtttgaatgcatatcgtatcatgtggctgttcgtgtttttcgatttgccgaccaataccaaaaccgagcgtcgtcatgcgactcagtttcgcaaggccctggagaaggatggcttttcgatgatgcagtattcggtgtacgtgcgtcactgcccctcgaaagagaatatggaagtacatctccgtcgggtgcagaagtcgatgccgcctgccggatataccagtatcctgagcgttacggacaaacagtacagtgagattcggaactattgggggaaaagcgaacgggcccggcccgagatgcctcagcagctggaatttttttgatatattgctctttgaaatacgaaattacatccgaccaacttccccggtgtgcggcaggacgttttatgcatcggtgtcatatgtgtaacgtgcagaatatgaattactgccatgcgcgaggttgtggtttgatgtagaattggaatgaggaacaacgccgtcaacttccataagcgggcgaccatgttgtggtttgatgtagaattggaatgaggaacaaccaggaggaaactccggaagcgccggagaacgttgtggtttgatgtagaattggaatgaggaacaacaaaaagctttccgcggaattgcaggtgaaagttgtggtttgatgtagaattggaatgaggaacaaccggaatgaagagagaggacgcggttatcggttgtggtttgatgtagaattggaatgaggaacaactgaggagaccgcaaagtagtctcttcaacgttgtggtttgatgtagaattggaatgaggaacaacgaaacacgacgggacacactcgtaaagaggttgtggtttgatgtagaattggaatgaggaacaacgctgtttgttgttatttttcagcccaaagagttgtggtttgatgtagaattggaatgaggaacaaccataccggcgtacgcattcccgattttactgttgtggtttgatgtagaattggaatgaggaacaacaagttgactgattcgctaatcaccaacgcagttgtggtttgatgtagaattggaatgaggaacaacgcactgcgaacggatttaattttgtctatagttgtggtttgatgtagaattggaatgaggaacaacctctccacgtatctccaggcaaagtatcctgttgtggtttgatgtagaattggaatgaggaacaacaaccggcgttcggctgtttttaggaagaattgacagaccgggcgtgcccggatgtcatgggggacggttgaggctgcggtctgccattgctgttcaggttggcgggagcatgttgcctgcggaaggaaaatgtgtgccggatatctgtgtacaagatgtatcggaatataccggtaccttcggattttgcggataatcaattaatctttatatttgcacaccctaacgacgcccggatggcggaatcggtagacgcgctggtctcaaacaccagtggagcaatccgtgccggttcgaccccggctccgggtactttttcaaaataccaaatagctgattatcaactatttggtatttttattttgacctccatgtccgcaatttgtccgcattttctatgaagtcggaaattttatcaaaaattgcacaaaatcaaattttcgagattgggggcttctgttattgtcaattaaaataaagaaaaaaggattaagacatcaatcttaacccttctctgccatattgtcggtagcattctgcgctatgtcagctatttctgccaaaaacaagtcgttttatcgttggcatacctattgatgtggaagtttttgcgtattattctcaatcggataggaggtggttatgacataacagattacaatttagcatggtgaattgctaaccctgaacaacgatggctatgggtaatgaagaatcatattctctcattaaaacggctgcaaatatagcgattcacctacaattttgcaaaaacgcagaacaatatctatgccgaaccgccatcatataaaaaccatttttatatggggaaaaatttacattttagaagaattcccgactatgtcgaacagggaattgagagaatagaatctccatacatccttgttgcaactacattggtagttaaagaagaacaaattaagacaggtgaatttgagcatcttgggattcaattcattgataataagttaaatatttcgaaggtaataagtcctgaaaatttgaaaggacggtacgctaaacgaaatctaaacggatatgatattgtgcacagagacctcccgaaaattcacaaaacatattcttgggaagtgcctaacttcggagatccggataaaggttatcacgaaatctgtgttacacggctggtatatcaaaggaaacatatcgcacctagggaatggtgtattcgagtagaacttttaaaagaagaacatcttgatgatggtgtccgattgtttacttttaagataaccgtcgatacgattctttgtaaaacggaatcattgttccgagacgatcttttctttgctcttaatttattgcaagaaaatactttctcatgcaatgttttcgatgcgaaaacaacaaaagaggattttttaaaaactcgttcagtcggatgggaaatctttcctgccggtagtttagagcgagctatttgttatgcgacttctcaaatagagaagactgacgaagtcaaaaaaagaattgaacatcgagctgaatttcttcaatcattaaaaccaacagaatatattgttggtttcggcatgaaccgccgatattttggtgctaaatttaaagataatttggttgtgtttgaaaatatagaatatggtaatgccatctatattttattcgataactggatggaaataagcaaaatgagccgtatagaaatcttgcaacgaaaagaaaaagatttcattcgtttgccacatcgcaagaactgggaacaagtgttaaggcacaatttagataaattacgttaagaagtattgaaaaggcagcctttacaataagtgtgttccctatttccgtactataaaaaaatagatttcaccccatccgaagtcggtatggggtgattttaacttaatacaataatatcatatttattatagtatcgctaaaataatattggagcgcggcttttatagtcaattttaatgcttacctttgtaaggcaaacggcttttaaatataatgggaattagtaaacttcttgaggaatattaaacaaaaccaagaaagtagctctatggccccgatgaatccgaccccggataattatcctgcagagtatgctagaactatggcctttaacaaggcattcaaagatttgctgtcccaagacaaattcatagcccgaagcgactatgagaacctcgttgaacaatatcgtgatttatcgcaatcttatgtaacgctcgtacaatcgaatatactaaacgagtatgttgccaagtataatctcgatattgacgtcataaactattttcgtgcgaagttcgatgaaatggccgatcttgcaacggaatcgccgactattcgaaaacataacgacgcttatatttcgcgacatattgaatctgagaagtcctatctcgacaacatactcaaagcctgtgatccggccatatcgctcgatagagagcaacgcgaagtggtgctttcggaagaggatcatacactggtaatcgcaggagcaggagccggtaaaacgaccacgatcgcggccaaagtgcggtatctcgtagaaaaacaagggatcgatccggatcagatattggttatctcctttaccaataaggccgtcgaggaactccgaggacgcataaacggcaatttgggaatatcttgtcccataagcacatttcactccatcggctatacgattttacgtcaaggggaagaggaacgtaaaaagattgttgagggcggatatatgtacacggttatcaataattatctaaaatcgtctgtgctgcgtaatcccgaggtggtagacaaattgattctcttcttcggctcctatttcactgctccttatgagggagagaagctcaacgaatattttcagttcgtcgccaacgcggactgctcgaccctgaaaggcaatctgcacgaatacattcaacgtatcattgatcgtaaaacgctgaaaacgcagacattgaataacgaggttttacggtcgatggaagaagtgcgtatcgccaactttctatatatgtatcagatagaatatgaatacgaaccgatataccagtatcctatccttgatgcaaacaaaccctacacgcccgattttcgtatcaagcaaggcgataaggtttcgtatatcgaacatttcgggataaccgaagaccacaaaagcaatcgttatacggaggaggagttggagcgatatgtctcccgaatcgacgacaaaaaggaagtgcatcggaaacataaaaccgatttgatatatacttactcgcaatacgccgatggacgggactatcttcttcatttacgggagctgcttgtcgcgcatgggtacgagttgaacaaacgtccgacggaagaagtctacaaaaaattggtcgagacagaagagagcaaatacatcacacgcttgacttttctgctctgtacctttatcaacaacttcaagacgcaaggctacggattcgagaagttcgcagagttcaaggctgcgaataaaaacgtccgaaccaaattatttctcgacatttgcaaagtttgctactatgaataccaaaaagtattggaggagcagcattgcatcgattttcaggacatgattaacgagtcggccgagttaattcgccaaaagcgtatcgacaaggagcagctcgattacaaatatatcatcgtagacgagtatcaggatatttcgcggcaacgttataatcttatcaaagaattgtcgcagttgtgtaatgccaaaatcatggcagtaggtgacgactggcagtcgatctatgctttcagcggctcaattctaccgctgttcacccgattttgcaaagccgtcggttatgggcaggagttgaaaatcacacgcacctaccgcaatgcacaggagataatcgacattgccggaacattcgtacagaaaaattcggcacaaatcaaaaaggagcttgtctccccgaaacgaatcaccaatccggttatcatctatccgtatgtcgaaactttcgataaaagaaaagagcggccggaaggcggcaaatatcactatctgggaaccgctgtaaacaaagctattgaagaaatattggagtataatgcggccgaaaaaaaatcccgaatcgcatccatcctgttgatcggtcgctatgggttcgacgcgaggaatctctgctattccaaacaattcaactacgatgagaaaacggggaaagtttactcggtaaaatacggaaacaaaatcaaactccagttcttgacggcccacagctcgaaaggtttgagtgccgataacgtaattatcattaacgcaaaggatgaaatctacggctttccgtcgaaagtagacgatgatccagtgctgaacttggtcgtatcgaacgatacctcgtataactacgccgaagagcgacggttgttttatgtggcacttacccgaaccaaaaaccgggtgttcattgttactcccgaaaaacgcccctcggaatttatcaaggagttgttgagcgatccgaaaagctatcccaatgttacgctgcaaggagagttgaaaaccgacctctccatctcgaacatcgtgaaagatcgttgcccaatctgcggctatccgatgcaactgcggtggaataagaattatggactgcgactatggatttgtaccaacgatcaggaaatctgcggctttatgactaacgacaaacgcggcggtgaactctccattcaaaaatgcgattggtgcaaagacgggtatttggtcgtaaagaaagggcgaacggaatatattttagggtgtacgaattataaaccggataagtcaggatgcggtcggctgctcagtcaggaacattatcgtgcatggagaaaggatgacttcggcgtggaagatctgtcgaaagataaacctgcttatttccgtatacctgaatcttccacagcgaatccgcaagcccccgaaatgattccagtgaaaacgaacaccacgagaaaaagtgctgcggtacacacgatcggttattcggaacggatgatcgagaaagacgggttcaaagtgattgtagatgcaaatggcgacatacttactgacatgcaactgctcgccaagttgcgaactctaagacaaacaatcgcacaagagaacggagtggcagcgtctcgcatcatgtacgattcagtattggtccttttggcgacggacagaccgctgacccgcgaagagtttatcgatataaaaggaatcactatcagtacatacatgcgattcggcgaacgattcattgctgaaatcaagaaacacgtcgaatcctaattacagaaaaagcgatgcgtataacgcatcgctttttctacatgaataaaatgctacaaatcatccattgccgcagaacgaaccgtatccgtatttattttgtcatagtatttgagtaaaacgaaacactgcccgaagtctcctttctgcaaagataattggatgtcgcctttagtcgtctcaaaggttgtgtaccaagtacagcgatccatcatcagttcatgcaatttttcattgttcgtattcgggttggttctcccttgaaactgctccacaacctcagtcggttcgctgtatttttgagttaacatggatttaagatggtcataatctctttccagcgagctccaatcatcgtgcgagggaaatattacaccgattgtgctgactacatttacagctttcagcgtggaaacgcctaccgtacaactcttgaagcctgcgaaatcgccttgcagaatagctgtaccgtcctgcgtcccaagatacgaaaacccggcagctttcattttcgacacatattcattaagagttccgtcaataggtactcctttgaaagatagatgttccgatttgtcttgcgccaatgaaataagaattgtatttgcaaaaagcaataaaaagattaaccgtttcataataagatagtttgaattatttttattttgcgaataaaccatctaatgcgcgcattatcgcttgacgaatatcgtccgcttcggtagaaccctggccctctgcggtacaggagcaaattatttcgtgtgtatacgccgatatgaattggatcgttacttctattgtgtaacctaatcctcggtttcgtctgccgctttcaccatagtttacaattaacgtttcctttgttaattcggaattcagttcgggtaatattacatatcctttttgaatcagtatgcctgcaatgacatcgcagggattgacgcttttggtcgtcgatgatccgtagattccatattgtcctccgtaggtgcttcccgtgctggacgttaattccttagtcggtgaaatgtaaacatatttgaacatttcaatcggagaattttttacaattactggagttctgagtggagcacaagcattcatcgataagatgatgcaaatcaccaaagccaattttttaagagtgtacatatgcaatctgttttgttctccagctaccacaagaacctttataaaacacgaagtgtggaactgcaatatatgatatcaggtaagtcgaataaaggccaaaatgaaaaaaagagctaaacaagtgcaaatataaccgttgatatactgcattttatgtggtatcagattcgggaacgactttttaatttgtcttaatccgttgcaagtttcttcgggatatatgggaacatttacgggaatttattatacctttgccgcataaccgaaaaagcaacgcagatgaaagttaccgtctatctgaaaaagtgttccaccgaggcctcgagcatctgcttccgggtcagggagaagagtgtggacataaaggtggtctcacctcttgaggtgcaggacagctactgggattccgatactctcagttacagacgcacgacggctgttccagccgtagagcagaaacgactgccggaacagatcgccgccatcatcgaacgggcggagaagaccttctcggacaaggcggacagcaggtggatgaggcaggtcatcgaggatgtgctgtacccaacccgtgccttcgagcggaaccacccaaacctgctcgcccgtgtccacgagtatctggaaaagttcgacggtgcggaaaggaccaaggaacatatcatacgcttcgagcgcaagatgtcgcgctaccatgactaccgtcgggaaatactgggcgagacggacttcacccttttcgtggagaccgtcacgctggagcaaatgaacggtttcagggattatgtcgtgaacgagtacaagctgcggcaggaacaccccgacttctatgctccccgtatgctcatcaaccacaggccgaggccgctttccggcacgaccgtcatcaacatcatgaacctgttctgcactttcctgcactggtgcaagaagatgaagtattccgacaacgaggtctatgccctctacggctgcaaggaacccacctacggcgacccgttctacctcacatcggaagagcggaacatcctgtatgacgctgatctgagcgactgcccgaaactagccgtcatccgggacatcttcgtgttccactgctatgtcggctgccgcgtgggtgacctctacaggctcacgagagccaacatcaaggacggcttcctggaatacatgccgcagaagacgaagaagtgccaggcgaagaccgtcagagtgccgttgcacgagaaggctttgaagatactggaacgctacgatgccaatgccgacagactgttcccgttcaagcagatacacacctacaacctcggcatacgggagctgctgaagcgctgcggcatagacaggatggtgaccatcctcgacacacacggctacaacaccgtgcagaagcccctgtacgaggtggccaccagcca

SEQ ID NO: 512 - DNA, 21473 bp, synthetic construct
  misc_feature 1..21473: note = Synthetic
  source 1..21473: mol_type = other DNA
ggcgggcatggccgtgatggccgcgagcctcatcctgctggcttgacggaaacgacgagcggcacgcgcatccccgcgaaccatcggacgacgccacgaccggcacaacgaacaaaaaaacgacacgacgaaatgaatctgctcttcctcctgctcggcctcgcgatgatcctcggcggcgcccattttctcacggacggcgctgcggccgtggcacagcgtttccgcgttccggagttcgtcatcggcctcacgatcgtggccatcggcacctcgacgcccgaactggtggtctcgctgctctcggccgccggcgggcagagcgacatggccatcggcaacgtggtgggctcgaacctgttcaacgtcttcgtcatcgtcggcatctgcgccctgatccgccccctgcccctcacggcgggcaacatccgccgcgacatccccttcggtttagcggccgccgtgctgctcttcgccatgacctccgaccggctgctgcaccccggcgccgccgaccggctcggccggggcgacggcatcgcgatgctcgtgctctacgtcggtctgatgctctatacgatccgttcggcgggccgcaccgcgccccccgaagccgcccccgcacgctccggaccgaagccgtggatcgccgtcgcgatgatcgtcggcggtctggccgcactggtaggcggcggcgagctctttctcaagcacgccacggccatcgcccgccatctgggcgtcagcgagtcggtgatcgccatcacgctcgtcgcgggcggcacctcgctgcccgaactggcggcctcggcggtctcggtcgtgaagggaaaaacggaactggcgctgggaaacgtcgtcggctcgaacatcgccaacatcctgctgattctgggcacctcggcgacgatccgtccgctgacgatgggcggcatcaccccggtcgacacgggcatggtggtcttgagcgccctcctgctgttcgtcgcggcgttcaccttccggcggcggacgatcgaccgctgggaaggggcgatctttctggcgatctacgccgcctacatggtctacctgctccgctgatcggccgacgcgccatcgtccgcacgctccagatagcgttcgacgagccgcggcacggcatagtcgcccagatgcccgacaggcacggccccgcagcgtgccgcaggagcgaacgcagcggtctcgatccggtggaatacggcatgcagcgcctgatgcgaaagccggtgcggcggcatgacgacgctgcgcacgaggcgccactcccccgccccggtccacgcacggaacgcctccgtgcggctcaaggcggcgaagtcggccgccccgtcggtctcgatcatcgggaactcccacaacccctgccagatatcgcgcccctcgcggcggcagagcaccgtgcggtcgccgcagacgatgtgcaggtagtggaaccagcggtcgcggaccttcgtgcggccctgcttcacggggcgctcccccaccgttccggcaccgagcgcgaggcaccgcgccgccagcggacacgtgtcgcaccgcggctgcgcgggcgtgcactgcagcgcgccgaaatccatgatcgcctgattgtagcgccccggatgccggagatcgagctgcgcctgcgccagttcggcgtagaggcgccggccggccgtggtatcgatcggtgcgtccagatcgaacagccgtgcgaggacgcggtagacattgccgtcgaccacggcgcagggaaggtcgtaggcgatcgagcagacggccgccgcggtgtagtcgcccacgccgcgcagcgagcgcacctcgtcgaacgtccgcgggaaaacgccgccgaaccgctccgcgacctgcttcgccgccgcatgaaggttgcgcgcccggctgtagtagccgagtccctgccagagtttcagcacctcgtcctccgaggccgcagccaacgcccccgcatcgggaaaacgagccgtaaagcggaggtagtagtcgagcccctgcgccacgcgggtctgctggagaatcacctccgaaagccagatgcggtaggggtcgtgtgtgcggcgccacggcagatcgcggccttcgcggtcgtaccagtcgagcaatatgggagcgatgcggtccatgcggatgcaaaaatacgatttttcccggtttcgcgttctatcggaagaaactatccctttcggccccgttcttgcgtccggaacgggcgaacgatacatacacctaaaaatggaacacgacaccccgctgcaacatgtcgacacgcccgacggcggtcgctacgaatggccgatcgacggcgatacggcactgctcgaatacgcccgtcgcggcgatatcgtccacctcgaccacacctacgtgccgccccggcacgagggcaagggctacggcgcgcggctggtcggcgcagcgctcgccgacctcgaagcgcgcggcctgcggatcgtgccgggctgctcgttcgtcgcggcctacatccgccgccaccccgaatgggaacggatcgtcgcgcagcaggcaccgaaggcgacggagcgctgacagtccggggccccacccggcaccgcatcgcgccgaacctccacgccggacgcaccgcacgcaccgcaaaaatgcacggggcgcaggaatgatccctgcgccccgcaccgtttcgctccccgacggcagcatcactcggcctccgtcgccgcgagtttcccgatctgccgctcggcctccgtcgccagcttgtcggcctgcttgcgcgcctccgacacgagcttgtcgcccgccttctcggcggcgatcttcgccagcgcgcccttcgcggccgcagcctccacgagcttggtacgctgctcctcggccgccgcgacgagcttctcgcccgcacgtcgggcttcggcacgcagccgctcggcctgcttctccacctcggcggcgagcgactcgctgccggtgagtttctcgatctcgcggtcgacgatgttcttcaccgcctcctcggcgacctccctcactccgagcgtgatcttcggcgcgacgaaggttccgccgatgcggaccccgatgcgctgcagcacgccgcccgtcgctgcggccggaagcgacaccttcgcctgatagtcgatcgtgccgtcgaggcccgtcgacccggcgaggttcatcgcgacggcgcccatcttcaggtcgaaaggctgcgtggcgagacgtccctcgcggacagtgaagcggatcgcgacatccttcgcctcgatgcggcgcagcgcatcgtcgccgagcgctttggccagcgcatcgagcgccgcgatgcgctccacgcggatgttcgccgagcggatctcgcccgaagcgtcgagcgtccgcaggtcgggagccatcgttgcgtcgagccgcgtgcgcagatcgagcgaaagggagtagtcgccgcccgtctcggcgaagatcggcacgagtttgcgcaccatgtcgagctcctcgaaggtcctgcggaacgaggcgcccgcgaattcggccttcagatcgagtgccggccgctgcggatcggcagccgtggcgtaacgccccgaagcggcgaccttgccgccgaagagccccatcgcgaggcgctgcagagtcagcgcgccgtcggcggcgcggatctcgcccgtgaaatcgtcgatggtcatcccctgcagcagcaccttgtgcagatcggccttgaaggcgaggtcgaggttgcgcggaatctccggcgccgcggcctcgccggcaggcgacggcgcagccttctgctcagggtcggcccctgaatccgcatcctccgaagcgggaagcatggccagcagctcattcagatcgagcagatcggacttcacgtagaggcgccccgagagcggcgcgccgcgcagcaggtagccgaggtagccggtcagccggccggtggccgaaaggtcgctgcgacccgccgtggcaccgaactcgccgagcgtcagcgccgccggcgtgacggtcgccgccatgcggcggatccgcagatcgggcagccccgcgacggagagtccgaccccttcgacgatgcaggtgcccgaggccttcatccgctcgtaacggcccttgtcgatatccgacatgcgcccctcggccttcagatcggccgtgaccagaccgcccagctcgacccccttctccagcggatatacctcgcgcacggagcccagatcgacccgtcccgcgaccgaagcgcggaaggcggggtcggagacgagattggcggcacggaacgtcgccgaaaccgcattgccggccatcttcatcccgaagcgcgaaaggtcgacgaccgtcgcgtcgagcgacccgccggggttcgtcaccgagagagcgacttcgatgtcggtcaccgatttgggcaacgacgcatagcggaacccgccatccgtcacggccacgtcgatcccgaacgcgggcaccgtcgcgtcgcgcagctcgccccgcgcccagagcgacatcgccagttcgcccgtggcggtgaggttgcggaattcgcgcgtatagaaggccggcacgagcgagagcagttcgcggaacttcacggcgtcgcatccggccgtgaggtccatcttcacgacgccgtcgtccgtttcgatccagccgtcgagccccacctcgacggcattcaggcgcagcgtgttctcggcgaaggcataccggccgcgctccggatcggcctcgatcgaggccttcagctccgcctcgacgtcgcgcagcatcggaatgccgcccgagacgaaacgcacgccctcggcttcgaggtgcagatcgaggtcgctgcgcccggccgagagatcgccccgcagacgcagcgagagaggcgccgtggcgaaggcgaccttcgtcgagtcgtcctcatagcggatcgaggcgtcgacgatgcggaagtcgcgcacggccagccggaacgacgacggaccgtcgtcctgcgactcctcctcgggcgactcctccggctcctgcgaaggcttcacgacatcccagttcacggcaccgtcggccgttttgcgggcatgcacggccggggcgtcgagcaggattttcttcacgacgagcccctcgtcgcccagcagcgacagcggagcgaccaccaccgagatgcgtcgggcggccacgatcgtgtcgccggcgaaggcgtcggcacccgtcagggtcagtcccttgagttcgagcgacgcattggggaaatggcgcagcaggctgatgtcgagccgtgcgaagtcgagcttcgcgaccagcgcggcgtcggcctcgcgacgtacgatccgttcgatttttccgcgcagcagcgtcggtgccgcgagcagcacggcgatcaagacgaccacgacgatcgtcgcgatccttacggttttcttcattacttatcgattttccggacgaaaagcgtcgtccccgcctcttcgaatcccatcttgcggtagagcgcccgcgccgccgtacgcgacggattggaggtgagcgccacgcgatcggcacccacccgcgcggcatgcccgagagcggcccgcacgagctcctcgccgatgccccggccgcgcacggccccatcgacggcgacatcctccacccacgccttgcggcccgagggggcatcgtaccacgccaacgtaagcatcccgaccggcacgcccgccgcacgagctaccagcaacgccgtgcggtcgcacgccgcgatcgcctgcagccgctcccggtcgggcggcagcagcgcgggcgaaagctgcggcacgagccgaccgatcgcctcggcgatttcgtcggtcacccgttcgaccgcacacacctctatgttcatatgagtccgatttgcggcaaagttaatcttttttcgatgcgaacatgctacctttgtaccataaaaaacgcacccatgacccttcgcgaacgtttggaggcgctcgcagagcccggataccggctcttcgccgcctcgctgctgcccggcgtcgacgacctgataggcgtccgcctgccgctgctgcgccgcatggcgcgcgagatcgcccgcggcgactggcgggcctacctcgccgaggccggaagcggctcgttcgaggagcgcatgctgcaggggatggtgatccgctgcgcacgctgcgacgccgaggagcggctgcgctacgtggggcgcttcctgccgcttatcgacaactggtcgctgtgcgacagcttctgcagccgcctgcgccccgaagagcgcgagccgatgcggcgcttcatcgccccgctgttcggctcggaacgggagttcgaggtgcgcttcgccgcggtgacgacgctcgtcgacttcgtcgatgaggagcacctcgacgaaacactgcgccgcctcggctcggtgcgccacgaaggctactacgcccgcatgggcgtggcgtgggccgtgtcggtctgcttcgcgcgttttcccgagcggacccgcgcatggctcgcggacggctgcccgctcgatgcgtggaccttcggccgcgcgctgcgcaagatcgcggagtcggaccgcgtgagcgccgagctcaagcgcggcatccgcaccctgaagcggcattgaaggagctcttcggagcacaggatgcgacgcggaggcggaaatcggtccccaagctgcgggacaggcgcacgaatccgcgaaattatcgctatcttcgcacgacggaacccccaaaaccaccgactctatgcgcacgctggtaatcatacccacctacaacgaacgggagaacatcgacgcgatgatcgaaaaggtcttctcgctccccgaaccgttcgagctgctcgtcatcgacgacggctcgcccgacggcacggccgcgatcgtgcgcacacggcaacacgactaccccgggcgcctgcacctgatcgaacggagcggcaagcaggggctcggcacggcctacctcgcaggattccgctgggggctggaacgcggcttcgaccgcatctgcgagatggactgcgacttctcgcacaaccccgacgatctggtgcgcctcgtccatgcggccgccgaggggtacgacgtcgtggtcggctcgcgctacgtgcagggggtgaacgtcgtcaactggcccatgtcgcggctgctgctctcctacttcgcctcgatgtacgtgcgtctggtcacccgcatgccgctgcgcgacgccacggccggattcgtctgctacacgcgccgggtgctggagacgatcgacctcgacgccgtgcgcatgaagggctacggattccagatcgagatgaaatacgccgcatggcggctcggcatgcggctcaaggaggtccccatcatattcgtggaacggcgcgaaggggcctcgaagatgtcgggcggtatcttcggcgaagcgctcttcggagtcctcggcctccgattccggcgcatccgcggccgcaaagcgactgccggacgatgctccgaccgctgaccggcctctccgaacgtcagaactcgccttcggtcgcgacggacccgttccgatcgcgtttccgtattgcgctccgctcttccgccggcagagaccccggcggcccgattcaccccacaaaaaaatgtctccacggagtacgcggagacgtaggtcatcgaccttcggcatgtagccttattgtggtaagatgtagtcttacgccacaaatataggataaaaagttgtagtttcaaaatttttcatttaattttgaagcaaacgggagcggaaaaacgcttcgcgcggtccggctccggtcgttccgcataccctccgggcccgaaccgcaacgaacgacgacaatggaaaaggtattgggcgtagatctgggcaccgactcgatcggttgggcgatcgtgcagcggcacgacacgcgttacgaactgctcgaccggggtgtcgacatctttcaggagggcgtggcgcgcggcgacacgggacaggagcagccggccgtccaacaacgcaccgccgcccgcgccctgcggaggcactacgcccgccgccggctgcgcaagatcgagctgctgaaggtgctcgtccgccacgaactctgtccgccgctgaccgaggagcagctcgaggagtggaagcgcaggaaggtctatccgctgaccgacgaattcctgcgctggcagcgcaccgacgaccgcacggaccgcaacccctaccgcgaccgctaccgggccctcaccgaaacgctcgacctcgcgacgcagcacgaccgctacgccctcgggcgggcattctaccacctcgcgcagcggcgcggcttccggagcaaccgcaaggaggcgggcgccgaccgcgaagagggcaaggtgaagggggccatccgggagctctcggccgagatcgccgacgccggatgcgcctatgcaggcatctatttctacgagctctatcgccgcggagagcggatccgcacgcgctacacttcgcgcacggagcaccagctcgccgaattcgaggccatatgcgcgcgtcagcggctgcccgacgagctgtgcggagcgctgcggcgggcgatcttcttccaacggccgctcaaatcgcagaaagggctcgtcggacggtgtacgttcgagaagcgcaagagccgctgcgcggcgtcgcatccgcgcttcgaagagttccgcatgcggtcgtacgtcaacaacatccgcatcgaaacgcctgccgacccggcaccgcgaccgctctaccccgaggagatcgaggccatcgtaccgctctttcagcgcaaaagccgtccgcatttcgacttcgaggatatcgccaagaagctggcgggcaaaggccgctacgcctgcaaaggcgaccgcatcgaggcgccctaccggttcaacttcgcacggaaggccaccgtcagcggctcgccggtgacggcggccctcgccggcctgttcggcgacgactggctgcgggagctttgccgccgctacgcgctcggtgcgggaaagagcgaggagcggatactcgacgacgtctggcacgcgctcttttcgttcgacgacgacgaacggctccgcgcatgggcgaaagagcggctcggcctcgacgacgacgaggccgcacgcttcgcggccatacgcctgccgcagggatacgccgcattgagtctgaacgccatccgcaagatcctgcccgccctgcgcgccggataccgttacgacgatgcggtcttcatcgccaacctcaaggcggtgctgccgcccgcaatccgcgccgacgaggcacagcggagcgccatcgaggccgacatcgcagccctgctcgacgactaccgcagcaatccgctgaaccgtgcgacgaaggaggagtacatccgcgactacctgcgcgaccggatcggcagcgacgagagccgcctgcgccgtctctaccacccctcgatgatcgaaacctacccggccgcacggcccgacgcacagggaggcatccggctgggatcgccccgcacgccggccgtgcgcaatccgatggcgatgcgggcgctgcaccgcctccgcgccctcgtcaacgcgctgctccgcgacggaaagatcgatccccgcacgaagatccgcatcgagtgcgcccgggagctcaacgacgccaaccggcgcaaggcgctcgaaagctaccagcgccagcgcgaagccgaacaccggaaatacgccgacgagatccgcgcccagttcgccgaagcgacgggccgcgccgtcgaacccacgcaggaggatgtgctcaaataccgcctgtgggaggagcagaagcatatctgtctctacacggggcggcagatcggcatcgccgacttcatcggcgacgctccccggttcgacatcgaacacacggtgccccgctcacgcggcggcgacgacgcacaggagaacaagaccctgtgcgaaagccggttcaaccgcgaaaccaaacgggccaaactccctgcggagctcgccgaccatgcggcgatcgcggcacggatcgaggcgctcggctggcccgagcggatcgagcggctccgcacgcagctcgaattccaataccgaaagagcagacaggcgacgaccaagcaggagaaggatgcggccatccagcggcgccactgcctgcggatggagctcgactactggcaatcgaagctcgaacgcttccggatgaccgagctccccgaagggttcacaaaccggcagggcgtggacatcggcatcatcggcaagtacgcccgggcgtacctcggaacggtgttcgaacgcatctacacggtgaagggcacgacgaccgccgcattccgccggatgtgggggctgcagcaggagcggacgccgaaggcgcggaccaaccacgcccaccactgcatcgacgccatcgtcatcgcctgcatcggtccccgcgaatacgacctctgggcccggtatgcgggcgacacggagcgctacgaacgcggcgaggcggggcggccccgctgcgagaagccgtggccgaccttcacggaggatgtgcggaccctgaccgacgaactcctcatcgcccaccacacggccgacaacatggtcaagcagagtcgcaaacgactctacaagcacggcaaggcgctgtgcgacgaagcgggcaatccccgctacgcacagggcgacacggcccgcggagcgctgcacaaacagacgttctacggcgcgatcctgcgcgacgacgaggtacagtacgtcgtgcgcaaaccgctcgaccagttgcagaaggacgatgtggagaagatcgtcgacgaggccgtcaagcagcgggtgaaggaggcgatcgccgaagcgggcttcaagacggcgacggatccggcgcaatacaccgtgtggatgaaccgcgagaaaggtatacccatccgcaaggtgcggatcttcgctacgtcggtaaaacgcccgctccggctcaaagagcagcgcgatgcgtccgttcatccgcacaagcggcactactacgcagtcaacgacgccaactactgcatggccctctacgaaggcacgaacgaacgcggccggacggaacgctcgttcgaggttgtcaaccggctggaggcggccgccttcttcaaggcgagcgccgaccgggcgtcgcgtcccgacctcgtgccgtgccgcgatgcgaaaggttatccgctgaagtacatcctgaagcccggcacgatggtgctgttctacgaaaaaacgcccgaagagctcggcgaatgcacgccggccgagctggcgaaacggctctataaggtgacgggcataagcacctccctcatcgagcagaaatacgcctacggagtcctcaccctgaaacaccatcaggaggcccgtccgtccggcgaactgaagatcaagaaggggagctggaaaatcggcgaagagtatcgccccctgatcggcatgaatcatacccagctgaacgcctgtgtcgaaggctacgatttcgaactgaccgtcacgggaaagatccgtttcaaacactgatgccccatgctcaagcgcgccctctttttcgccacaccctgcagcctgaagctgcgcgacggacagctggttttccacacgaaggaagcgcccgatatcgaacggcaggtaccggtcgaggacatcggggtcgtcgtgctggaacatccgcagacgaacgtcaccctaccgctgctcaacgccttgtcggacaacaacgtcgcggtggttttctgcggcgacgaccggatgcccaacgccatgctgctcaacctcgactccaaccgcacgcagggcgaaaaataccggtcgcagatcgaggcgagcgagccgctcaagaaaaacctctggcggcagatcgtcgaagccaagatccgcaatcaggccgccctgctgcgcaaactgggcaaggacggcgacctgctgaagccctactacatgaacgtccggagcggcgatgcggacaaccgcgaagggatcgccgccaaagtctactggtcggagcttttcggacgcacgttcgtacgggcgcgcgaaggcgacgtaccgaacaatctgctcaactacggctacacgatactgcgcgccgcggtggcccgcgccctgatgggatcggggctgtttcccgccttcgggctcttccaccgcaaccggtacaacgcattcccgctggccgacgacctgatggagccctaccgtccctatgtcgacgaaacggtctacaggctttatgccgagggccgcaccgaactcacgcgggaggtgaagggcgaactgctgcacctgctgttcgtcgacacccgcttcggcgatctgctgcgcccgctcgacgtggggctgaccttcacggcggcctcgctggccaaatgccttgccgggacgcagaaaaagatcgcctgtcccgcattggaatagccgccgcgaattgtcggaggctacggaatgctcccgtgtgcggaggcgggcgctccggccctccgaaggacctgcaccccgtcggtgataaccaaccgttccgcacctgcggaagcgaaaaaaactacacgatgtcggaactacgtctgaatgcttatcggatcatgtggctgttcgtatttttcgatttgccgaccaataccaaagccgagcggcgtcatgcgacgcagttccgcaaagcactggagaaggacggcttcacgatgatgcaattctcggtctacgtacgccactgtccctcgaaggagaatctggaggtgcatctgcggcgggtccgcaggtcgatgccgccggcaggcttcaccactcttttgagcgtgaccgaccgacagtacgccgaaatccgcaatttctggggcaagaccgagcgctcccgccccgaaacaccgcagcaactcgaatttttttgatacatttgtaagcggcatccgttctttgacattcggaattctcacacgtaaaaatcgcatcgaaaccgctttgccggagtgcgcagcatcggattttatccggtgtcggacaccgcaaaacacagaaaatcaaagacaatatcgaccggcgttgtggtttgatgtagtgaagcaataagatacaattccagatcaaccgcctgcgactgttgcttgttgtggtttgatgtagtgaagcaataagatacaatcggaacgagctgctcgcggtcgcgcgaaggttgtggtttgatgtagtgaagcaataagatacaatctgatttgtttttattcttgcatacaatttgttgtggttcgatgtagtaaagcaataagatacaatctcgaccgaaacgcatttgcccgccgggttgttgtggttcgatgtagtaaagcaataagatacaatattacgcgtatcgcctgttcgcaaacggcggttgtggtttgatgtagtaaagcaataaaattcaatcaggggctggaaaaagaggatgcacagcccgttgtggtttgatgtagataatcaatagggatacaataacacctcgtcgaaaggcggtatggagttgttgtggttcaatgtagacaaataataataaaatggcgtctgcagatcgttcgaaggattcgccggaaggcaccggaaacctcccactatagtcggaaaagtctgtcggcaacgaaaaaatcgcacaccaacacaccggcaggccggaacaccgctgcccggtgatttttcggtgtccgcagccgcatcggcgcagagcggacccttacgaacgaagaaagagaccggcgccaatcaggagttaaaaacgctgttagacaagcagataagcgcacccgaacttttcgccggcacgattcggagagaacgttcgtcggccgaagcggagcaattgcagagaatttttgctatttttgttccgtgcggttttcaaccgctccgtcgttcatgaaaaaagtcacgcataccaatcggcgtccgtctccgatcatcggaaagatagcggtcgcgctgctcaaaaccctgatcgcgctgatcctgatcgcccttctggcgatcttcgcgaccagcgtaagccccatatacgacttcgccgaaccgaaaccgttcagcggccccgacatcttcgatccgtacgagggggggggtcgatgcgactcgccctaccgctggaaaagggccaacttccacacccatacgcgcgtaaaggggcttctgaacgagtgcgcgtactggccggccgagaccgatgcagcctacaggaagttggggtacgacatcgtcaccttctcgaaccacaacgaactgacccgccatccctacgacgcctcgctgcaggtcgatgtctacgaacacggcatcaacctcttcaaataccacaagctggttttcggatgcgacgaggtgaaccgcttcgaccacctgatcccgctcttcgcctcccagaagcaattccagctggatctgctcggcagggagtcggacttcatccagctcaaccaccccttgcggacgacgggcacctcgaaaaaactcatgcagcgcctctgcggctacagaatcatggagctcgacagcggcaagagcaccgaaaacgagtattgggactgggcgctctccgccggacactacagcttcggactggccaacgacgacctgcactatcccgaccggtcgagtcgcatcgccgtgaggtgcaatttcctgtgctgtgcatcggcctcgtacgaagatatcaagaagaccctgctcggaggatgctactatgcgatgcgcgttcccgactacggacgcggggattgggaggtgaagtacgcccgcaacagggagctgccgtcgatcgaacggatcggtctcgacggcgagacgatccgcatcgccctgtcgcaccgggccgacagcatcaaggtgacggggcagcatcacaccaccctgtcgctgatcccgaacgcctccgaagcaagctatacgatgaagcccgacgacccgtacgcacgcatcacggcctacttccccgacggcgaggtgatctacaccaatccgttcgcaagatacgacgcctccgcggcggagacgccctacgccgagccgacgcacaaggtaaacgtacccttgacgatcctcttcaacctcacgctcctcgcgctgtgcgcaggaacgatcctcgcattccgtaagacagtcatcaaatggtgaagttcctgcaagaaaagagcgaccttacccgcgtatgcgcggcactcagcctctttacgctcgtcgcgttccacggaccgtttttccggttcgttatcggaaacatcgaagggggggggtacaacggagtccggatcaccgcaagtctggcgatcctgatgctcgcgctcaacttcttcgtctattacctcgtgctcttcctcgggcgcatcgtcggaaagtgcatcctcgccttcacattcataggcaatgccttaagtctctacttcatcgatacctatcaggtgctcatcaccgacaagatgatgggcaacgtgttcaacacgcggtattcggaggcctcggggttcttctcgtggtccgccgtatggtacctcctcctgctgggaatcgtcccgtgcgtctacctcttcgcgaggcggttcgattacggaagccgcaagcggttcttcgcccgcacgggcatagcgctggccgtctccctgaccgttgccctgatcaacatgccgaactggccgtggatcgaccgcaatgcgcccaagctcggcagcctgatcatgccgtggtcctatacggtcaactccgtacgctactacaactccgtacagaaacgcaaccggaaggagattccgctgcccgacgcgcggatcgcgaccgaaagcaaggacctctgcgtgctggtcatcggcgagtccgcaagaagggcgaatttctcgctgtacggatacggcaagccgaccaatccgctgctcgaaaaagacggtgcggtcgcactgatcgccgatgccgccgcgacctataccacggcgggcgtcaaagccatcctcgatcacaagcccaccaacaaactctacgagattcttccgaactacctctaccgcaacggcgtggacgtagtatggcgcagcaccaactggggagagccgccgctgcacatcgacaaataccgcaaaacgaaggatatcaaagcgtcgcacccggaggccgacgaccgatacgacggcatcctgctcgcgggtctcgaggaggagatacgctcgagcgacaaggacaagctgctggtcgtgctccacaccagcacgagccacggacccacctattacaagaaatacccgaccgagttcgaggcgttcacgcccgtatgcacgaccgtggagatggcgaaggcggacccggaagagctgatgaacgcctacgacaacaccatcgtctacacggactatctgctgcactccgtaatcgagatgctccgcggaatccccgaaaggcgcagctgcatgatcttcgtctccgaccacggcgagtcgctcggggagggaaatctctatatgcacggcgtaccgatgctcgtcgccccgaaggaacagatcgagatcccgttcatcgtgtggacctcggacgaggagctgcaaaccgatccgacggaaaaagcgggccaatatcatgtcttccacagcatcctgtcgttcctcgggatcgaaagtcccgtctacgacgcatcccgggatatcttccggcagccctgaaaagcacccgtactacgaagcgtcccgcatgcggggacgccccgaaacgaaaaatcgctcgatccgccagccggcgaatcgagcgatttttcaagtacccggagccggggtcgaaccggcacgacattgctgtcattggtgtttgagaccaacgcgtctaccgattccgccatccgggcaaagcatatttcgatgtggatcggggcagcaaagatagacaaaaatttcgaaatccgatgtgcgccgtccgaattatttacggacaaagcaccgaaacgcacccctacgccatgcgccgcaccggatctccccggaccggaacgaagcgcatgcggcccaagcgggaaacgggctcggacggtgcgcaatccgggcgataaagcctcgacgcacgaccggccgcgccccaagagggaggctcctactcctcgccgtggaaataggccctgatcttcgcggccttcgccgtacccaccagcgccgcgagctcctcggtcggcgccgccttgaccttcgctacggtacggaaatgctgcaacaaagcctcgatcgtcttgcgaccgattccgtcaatacgctccagttcgctatggatgaaggccttgctccgtttctgccggtgaaacgacacggcgaagcggtgaacctcctcctgtatgtgggagaggaagtggaacagaggcgacgtggggcggatgccgaccagcagcggcggaaatccgtagagcagctcggccgtgcggtgccggtcgttcttggccagacccgcgatcggaatatccagcccgagcgcctccagtacctcgcggatcgcccccatctgcgccttgccgccatcggcgacgatcagatcgggcagttcggccccttcggccataaggcgcgtatagcggcggaagacgatctcgcgcatcgaggcgaagtcgtcggcaccgaccaccgtcttcacgttgtaatgacggtactccttgcgcgccggttttccgtcgcggaacacgacgcacgacgccacgggatcggctccctgcaggttggagttgtcgaagcactcgatgtggcgcggctgccggtcgagtcgcaaggcctcctgcagggcgttcatcaaccgttcggtatgtcgctcgggattcttgatttcgaggttcttgagctgctccgcgcggtagatccgggcgccgcgctgcgagaattcgagcagttcgagcttctcgccccgcttgggcacggtgaaggtcaccccgtcgaacagcagcgtcgtggagggcaggaagggcacgatcacctcgcgggccagctcgcccccggcgacgtgctcgacgatgtgctgcatggccagcgtcagcatgtcgcgctcgtcgccgcccacgccggcggtcagctccacggtctgcacgccgacgaccgacccgtggcggatgcgcacgaagttgcaataggccgtgtcgtcgtccggcagcagcgagaagacatccacgtcgacgatccgggcgctgacgatcaccgaacggctcgagtagttgtccagcgcgtcgagccgctgcttgaaccgctgcgccgcctcgaacttcagcgcggccgccgcacgctccatctccgcctcgaggtagcggcgcacgggacgcagatcgcccttcagcaccgcctcgaccatcgcgacgagctccccgtacgcttcctcgtcctgcaaccccgcacagggcccccggcagttgccgaggtggtactgcaggcacacgccgtagcgcccctgcgcgatccgttcgggcgcgaggttgagccggcaggtgcgcagcggcaccacctcgcggatgaagtcgagcacgctgcgctgcatggccagcgagccgtagggaccgtagtagcgcgacccgtcgcgcacgagctgccgcgtcgactccacgcgcgggaaatgttcgcgccgcacgacgatccacggataggtcttgtcgtccttgagcaggatgttgtagcgcggctgcagggtcttgatgagcgagttctccaacagcagggcgtcggtttcgctccccacgacgatatggcggatctcgacgatctgcttgacgagcacgcgcactttggccgagtggtcgcggttttcgacgaaataggaggagacgcgcttgcgcaggctcttcgcctttccgacatagatgatcgtgccgttgcggtctacgaactggtagacgcccggcgacagcggcagcagcgcgacctgctccttgatacgctccttctgcgattcggccataacgagtacaaagataacgaatattcggttacgcaccacaaaccgggctccgcacccggcccggaacgccatccgcagcggaacggatgcacggccctgcgctcgcggcccggcgaacggcgtcgttttccgcgattaaaaaatacagtcggcttgtattattgagctgaaccgtatacttttgtgcccgaaaacaggaacccgatccgccccctatgaaaaacctccttctgctgctcgcacccgctttgctcgccgcctcgtgcgtcgacaaaagctacgacctgaacggaatcgacaccgacgagatcgccatcggcggcgacgactccgaattccgcatcccgctgaccaccgtcacggtcgccctgcacgaaatcgcccgtgcaggcaccgacatccggacgctcttcgacgacgtcgacacatggctcccctcgacgctgcccggcaacgccgaccatgtcgacattccccggctccggcaggccgcttacgtctcctcgctgttcgacgccctctatgccgagatgggcacaagtacagcgaagcgcgaggcgatggccgacctcctctggcgcaagcatcgcaacgaattcctaccgctgctcacgctcgcaggctcggacgaaacggccttcaagaacgccttcgtggcccagtacgccaacgctgcgatccgctcggaagtcgaacggcagttcggcctctacctccgcgacctcgacacgatcgagccgctgcactacgacctcggggcgctcgacatcgacgactcggtggtggacatgctggccgacaacctcgatccggagaataccgccgccccgaagaacacgctccacctctacggcacgatcggcaacggactgcccctcgccgtcgcgctgcatcccgcactccggaacacgggcatcgacttcgccaccgcggccgaaccgggcgagaacgccatcgccgaacagcgtctcttcgccgaggatctgcgcacgctcgccgcggggaccgatctcacgatccccgtcgcactgcagaaatactacccgggccgcggcttcgacgacagccacccgatccgcatccgcttgagccccgtcaaacggggcccactcaaactcgaactctaacccgctaccggacatgaaaaagatactcctcctgctgacggtctcgctcgtggcgacgggcgtcgcggcgcagaaccccacgacctatttcatggagggctcgaccttccgcatgcagttcaaccccgccttcgcgccccatcgcggctacttcaacattcccgtactgggcggtatcgacctctccgtcggcggcaacctcgcgctgggcgacctgttctttccccgcaacgggaagctggtgacgctgctcgacgcctcggtctcgagcgccgacgccctcgccggactgcggacgaaaaacggactgaacgtcgactcgcgcatcaacatcctcggcttcggagcatatacgcgctaccgcaagcatttctggtcgttcgaactcaacatgcgcaccgcggaagacaccgacctgccctactcgctcttcgagttcctcaaaacgggacgcagcggacgcatctcgaacatcggcgtctcggcgagcgcctacctcgaggccgccttctcctactcgttcccgctgctctgcgaacggctctacatcggcgtgcggggcaagttcctcgccggcgccgcccgcgcccggctgacctacgaccgcttcgacgtctcgctcgaagaggatcgctggaacatcgacgcacggggtacgatcgacttcaccgcgggcggcgccgacgtctccgccgaggagccttacttcaagatcggcgacctcgacatgaagccgaccaaaccggccggctacggcttcgccgtcgatctgggagccacctacgacatcctgcccgacctgcaggcctcgctggccgtcaccgatctgggcttcatgagctggagcaagaagaacaccgtctcgggcgtctcggccaaaagcctcgaattcacgggcacgacgatccccgacgacggcacgccgcagcccgatttcgacctcgacgtactggagttcgaacgcgtcggcgccggaagcagcgcgcaaatgctccgcacggcgatcaacgccgggctcgaatacaagctctggcgccgcaagatcggcatcggcctgctctactcggcccgtttccgcaccggccgcaccttgcacgacctgaccggctcggtcaatttccaaccgatcgactggtttacggtgacgggcagctactcggtcctcgccggccggggaggagccttcggcatcggcctgaatctctgcccgagctggatcaacttcttcgtcgccaccgacctgctgacggcccgccgcacaccccaatgggtgccgatcagacaatcctcggtgcacgtcaccttcggtctgggcgtgcccatcggacgccacggccaacgggccacgaaacgatacatctatccgcccgccatgctctgactgcggacagaggcggtacgacgactgcgggcggcgattccgaccccataatacgacgacagccccggaaccgatcggattccggggctgttccgcctcgcaggca

SEQ ID NO: 513 - DNA, 21166 bp, synthetic construct
  misc_feature 1..21166: note = Synthetic
  source 1..21166: mol_type = other DNA
cgcagcggcctgcccgcgctggtggtcatcaacaagatcgacctcacgacccccgaggcgcttgaggcgctggtggaaaaatggcatgccgagctgcccgaggccgtgatcgtgcccgtgtcggcccgcgaacggttcaacatcgaggggctcttcggcaagatcctggaggtgctgcccgaaggcccggccttctaccccaaggacacgctaacggacaagagcctgcgcttcttcgcctcggagatcgtgcgcgagaagatcctgcggttctacgacaaggagatcccctactgctgcgagatcgaaatcgaaagctacaaggaggagcccgcgatcgaccgcatcgccgccacgatccatgtggcacgcgaatcgcagaagggcatcctgatcggccacaagggcgagaaactcaaacgcgtgggcgaggccgcacgcaaggacatggagcagttcctcggcaagaaggtcttcctccagctcttcgtgaaggtcagcgccgactggcgcgacaacgaacgtcagctgcgccgcttcggctacgaacaggagtaaaaccgcccgcggtccggacccccgacgcgacggaccgcggcggaccggcatcaaggaaaaagacatcaaggcatcagatcccgaacatgcgcagcatagtcaccgccctgctctgtacgttcgcactgctcacgtgcggagaggcggcgcgcgcccagtacaacaaggagtacttctaccacatggggcgcacgttcatgatgaacgacgactaccgcgaagccatccgcacgctcaacacgctgctgcgcttcgatgccgacgcctacgagggttacttcctgcgcggcatcgccaaatacaacctcgacgacctgctgggcgccgaggccgacttcagtctcgcactgagcaagaatcccgtattcacccaggcctacacctaccgggccatcacccgctcgcagctgggcagctacgacgacgcactgggcgacttcgccgccgccatcgagctgcggcccgacctgccctacccctactactaccgcggcgtcacgcgcctcatgaaccagcagtttgccgaggcggtggaggatttcgaccgcttcctgcggcaggagaacaaggtgcccgacgcctacatcaaccgcggcgcggcctacctctgcatgagcgacacgctccgcgcctacgagaactacgacgcggcgatccgcaccaaccgcgaaaaccccgagggttacaaccgccggggcgggctctacctggcgcaaaagcgctatgccgaggccgaggcagacttcgaccgggcgatcggctgcgactcgacctatctgctgccctacttcaaccgggccctggtctactcccacaccaaccgcccgctgaaggcgctggccgacttcgatgcggcggtccgcatcgactcgacccacgcgctgacctacttcaaccgcgccatcctgcgcacgcggatcggcgactacaaccgggcgctcgaagactacgaccgcgtggcccgctactcgcccgacaacgtgctggtctactacaaccgggcgctgctcaacaccgagctgggcaatctgaccgacgccgcggccgactgcacgcgggccatcgagctctatcccgacttcgccaacgcctacctccaccgcagcatgctccgcgagctgctgcgcgaccgtgcgggcgcacgccgcgaccgcgacacggcgcagcgcaagatcgccgaataccgcgcacgccttacggacagcacctactcgatcttcgccgacaccacgcagcgcttcgaccgcctgctctcgttcgacaactcgctctccggccggggcttcggcagcgctgcggcccgcacgggcgaaagcgacgagctgcacctgctgcccctgttccgcttcacgttcatgcggcccgacacggtgccggcaccgccgcgcagctacgtgcagcgcgtggaggacttcaaacgccgcatcggcaacgagcacctggtgctgaccaatgccgacagcaacctgtcggccgacacgctgctgctgctcgaccgcagctacgcccggcggatgcgggacgacgacgcgtcgtggaccacgcactttgagcggggcgtgtcgcagtcgctcgtgcgccagtacacgggcgccgtgaactcgctcacggcggccatcgaactgaacccggccaacccgttcctctacctcaaccgggccgtcacgcgggccgaaatgatcggcttcatctcgtcgatcgaccactcatacggccgcctcacgctcgacgacgcccccgcgggccgcggaccggccgagcgcaagcggacctacagctacgacgaggcgatcgccgacctgaacaaggccctcctgctcttccccgacctggcctgcgcctactacgaccgggccggactgcacgccctctcgggcaaccttcccgaggcgtgcgaggactacacgcgggccatcgagctcgaccccgcattcgccgaggcctacttcaaccgcggcctggtgcagctctacatgaaagacacgcgcaagggatggctcgacatctcgaaggcgggcgagctgggcatcgaccgcgcctacgaggtgctgaagcgccgcgcgccgcaaaacgactgacaaaccaactcaaacaacgaaaaatgacacgaaacctccaaagaatgctgaacgattcggccgtcgcacgatggacggccctcggactcatcgcgctgatgatgttcttcggctacatgttcgtcgatgtgatgtcgccgctcaagtcgctgatcgaaacctcccgcggctgggacagcggcaccttcggcacctacgccgcctcggaatacttcctcaacgtattctgcttcttcctgatcttcgcgggcatcatcctcgacaagacgggcatccgcttcacgggtctgctctcggcatcgctcatggtgggcggcgccgtcatcaagtacgtcggcatcaccgactggttccagaccacgggtatgtgtcagtggctcgacagctggtggaccgcatttccgggcagcgccaagatggcgtcgctgggcttcatgatcttcggctgcggttgcgagatggccggcaccacggtgtcgaaggccattgcgaagtggttcaagggcaaggagatggccctggcgatgggcctcgaaatggccattgcgcgcctgggtgtcttcgccgtgatgtggatcgcgcccctcgtgtcggcacgcttcgaccagtcgatcgtggctccggtggcgctctgcacggtgctgctgatcgtgggtctgctctgctacctgatcttcaccttcatggaccgcaagctcgacacacagctgatcgctgcgggtcagatgtctgccgagaagtcggcggacgaggagttccacatctccgacctgggcaagatattctccagccgcatgttctggctgatcgccctgctgtgcgtgctctactacagcgccatcttccccttccagcgctatgcgcccaacttcctcgaggtgacgctcggcgtggacgccgccacggcgtcgcagctcttcagctgcttccccatcctggccatgatcctcacgccgctgctcggcggcatgctcgactaccgcggcaagagcgccacgatgctcatgctcggcgccgtgatcatgatcgcctgccacctgagcttcgcgttcctgctgccgctcttcccgtcgaaggcgctggccgtgctgatcgtcgtcgtgctgggcgtgtcgttctcgctcgtacccgcggccctgtggccctcggtgcccaagatcatcgacgaaaagatcctcggctcggcctactgcctgatcttctggattcagaacatcggtctgttcctggtgccgctgctcatcggcctcgtgctcgacgccacgggcggctacaccgtgccgatggtcatcttctcgtcgttcggcgtgctggccttcctgttcagcctctgcctcaaggtcgaggacaagcgcaaggggtacggcctggaagagcccaacatcaagaaataaccgttcgacccgttacaccggggagggcagcctgtgcaaggctgccctccttttgcgtttgcgccccggacggcggagctgcggttcctatatataatatgttgccgtgcggccgccccctccgggttctgccgcggatcgtgccggcacccgaacgattcccggacgcaccgcccgccgccctacgccttcacccggtcgtagagctccagaatccggctgcacatctcctcccacgagaagcgacgccgctcgacgaccatgttttcgcggaacccggcgccggcgcccgggacccacatgcgctcgatgccggcggccacggcggccgcatcgggcttcacgacgcagcccacgcgtccgtcgggcacgatttcgggcagtccgcccacgtcggtgaccagcatcggcacgcagaactggtaggcgatctgcgtcacgccgctctgcgtggccgtgcggtagggctgcaccacgaagtcggccgccgagaagtagtacttcacctcgtcgtcgggcacgaaacggtcgtgcagcaccacctcgtgctccattccggcccgggcgatgcggtcgaggtagggctgcgcggaggtgtagaactcgcctgcgacgatcagacgccgccccccggtgcgccccgcacgccggagctgcgcccaggcgtcgagcaggatgtcgaggcccttgtagtcgcggatcagcccgaagaagagcgcatagcgcatcgcggggtcgaggtccaggtgcgcgcacgccgcgtcgcggggcaccggatcgccgaaattctcgaagagcggatggggcgaaaagagcgccggagcgtcggtataggcccggagttcgccatgcacctgctccgacatgtagacaaagccgtccaccgaacgcaggaagtagcggttgaacggacgatcgacgaagtggtgttcgtgcggctccacattgtcgatctggcagagtacgcgcgtgtggccgttgcgccgcgccaggcgtgcgatcgtgccgaagcagggcgccatgaaaggcgtccagtacttgagcagcacgaagtcggggcgctcacgccgcaggcgccgccccacgcgccaccagttgaagggattgaccgtattcacgcaccgctcgatcctcaggtcggagggcggcggggtcgccacccgctggctgcgccccgggaagagcagcgacggatattgcaccgtgaaggtcatgatccgggcgtcgcagccccgtttcgcaaaggtccgcgccagcatctccatgatcgaggccaggccgccgcgaaacggatgggcgggtcccagcacgacgatctctcgctttttgtcgttcatgcagacaaagataagacaaacgcgccgacatccgtcgcaaggcctccgtttttcgaccggattttttccgatcccggcctctgcccccgccggccggcgctccggcgacgcagccggccgcccccctcgcacccggaaagaccgcacgacccggcacatcatcgcccccggcaagccccggtttacggaccggaccgcccgcataccgcctgccactgcggcacacggactgccccgagggattgtcggccgtggcgccgccacaccccctcccctgccgcgaccgacaccccgcatccgccccctgcacccgataaaacacttccgatgccgaaaattttatcgaaaaacgataaatttcatttgtttttcgaaaatatattcctatatttgcagtggaaaccttgcaaacacacaggatatgcagaacaaaaaaccgatgttgcagcgcatgctcgcgatctacgtcatctttttcgccgtattggcgacggggctggcgcacagcgtatggcccaacttctcgaagggatacgacgagggggcggtcatcggccgcgacatcgcccgcaactgggcttcgggcgctccgcgttcgatcttcacgctcttcgaggtgcccctgagcgcaaagactcccgtgcggctcgacggcgccgactcgctcgccggcatccgcctcgtgcccacgacccgacggatcgacctcgcggcggacctgccggccgacgccggcagcagcccgctccacctggccctaagctcgatcggcggcaacccgtggttctacctcatcacggtattccgggccctcgcgttcgtggcgatcgtcgtgctgatgttcctcatcatccactcgatccgccgttcgatccgcgaggagcacacgctcgaccgccgcaacgtgtggtacctgcgcgccatcggctcgctgaccatactgaccgaactgctcaacgacgtgatgacctggcgcatgagcgtgcgtgcggccgaactgctcgccccgtacggcgaggcgatcgacaccgcattccacgtctcctatgcgaacatcatcctgggcatcctcgtgctcttcacggccgaggtgtgcgccatcggtcagaacctgagcgaggaacagaaattcaccatctgaaaaacgaaggaaacaatgcgttgcacaaccgtagagagggggggggaaacatggctataatcatcaacatagacgtcatgatggccaagcgcaagatgtcgctgggcgagctctccgagcgcgtggagatcacgcccgcgaacctctcgatcctcaagaacggcaaagccaaggcgatccgattctcgacgctcgaagccatctgccgcgaactcgactgccagccgggcgacatcatcgagtaccgtccggacgccccggccgaatgacccgaaacgaccaaacgaaacaaaccaacaaaaacttcattccaatgaaaagattactgacagcggtcgccgccctcttcctcatcgcaggagcccgggcgcagatcaaccccatggagccgatgccggccgacccggccgtgcgccacggcaagctcgccaacggcatgaactactacatccgccacaacgagaaacccaagggacaggccgatttctacatcgagcactacgtgggcgccattcaggagaacgacgcccagcagggtctggcccacttcctggagcacatggccttcaacggcacgaagaacctgcgcggcaaggagatgatcgactacttcgagcgcatcggcgtgaagttcggcagcaacctcaacgcctacaccacgcaggacaacacccagtactcgatcaccgacgtgcccaccacgcgccagggcatcatcgacacggcactgctcgtgctgcacgactggtcgcacttcatcgcactcgaaccggcagagatcgattcggagcgcggcgtaatcatggaggagctccgcacccgcgacggcgcgcgcttccgctcgcagcaggccatgatcaaggcgctggccaaaggcacgaagtacgaacaccgcaacgtcatcggctacctcgacggtctgaagagcttctcgcacgacaacctcgcggacttctaccacacgtggtaccgtcccgactaccaggtgatcgtcatcgtgggcgacatcgacgtggacaaggtcgaggccgacctggtgcgcctgatggccgacatcccggcccccgcggccgacgctccgcagaaggagacgatcgtcgtgcccgacaacgacacgcccatcgtgtcgatctacaccgacccggagatgaaccagaccaacgcgtcgatcttcatcaagcgcccggccatgccgcgcgaagccaacggactggtgctgcgcgagatgcagaacatcctgatcctctacggcgtgcagatgctcaacgcccgtctgggcgacatcgccatgcagcccgacgctcccttcctcagcgccagcgtctacgacggcaacatcggcatcatccccacgctgaccaccaccgtattcagcctgaccacgcaggacggcaagctgcccggaggtttcgacgccctgctgaccgagatggagaagtcgcgccgcttcggcttcaccgagggtgagttcgagcgcacgaagaacgagctgatgcgctacatcgagaaccagtacgcagcacgcaacgaccgccgcaacggctcctacgtcacgcccctgatcgacaacttcaagttcggcaccgcctactgcgacgccgagtacgaataccgtctcgacagcacgctgctcgaagccatctcgctcgccgacatcaacatggcatggccccagctcctgcaaccccgcaactgggtcgtagtggtcaatgcgcccgagaaggagggcctgacgaaccccaccgaaagcgacctgctggccgcgatcgagcgttcgcgcaacgccgagctcgaagcctatgaagacaccgcggtgaaggagccgctgatccccgcagacacccgtctgaaaggctcggccgtgaagaaagaacagcacaacgaggcctacggcacgacggagtggacgctcaagaacggcgcacgcatcatcgtgaaacccacgaaattcaaggccgacgaggtatatctggcagtcaagagccgcggcggtctgtcgctgctgcccgacgaggagtactacgcagccaagctgcttccgggcatcatgcagatgtcgggtctgggcaaattcacggccaccgacctgcgcaagcagctcgccggcaagcaggcgcagaccgcgctcacggtgaacggctacaaccacggcatgtacggcgaagcgtcgccccgcgacctggagacgctgctccagctggtttacctgagcttcacctcgccccgtttcgacgagacggactacaacacctacatgacgcagatgcgcgcccaggttgcgaacatgctcgccaaccccgactacatcgtgcaggacgcgttcaaggagaccgtatacggcaacaactaccgcgagcagatgctctcgcccgaaatcctggacgacgtgcgcttcgagcagctgcgcaccgtgtacgacaagctctatacgggcgccaacaacttcaccttcacgttcgtgggcgatgtcgatccggccgtgctgaagcccctcgcagaacgttatatcggctcgctgcccgccacgaagaagaccctcgactgggccgatgacggcgtggctcccgtgaagggcgtgacgaccaacgacttccgcgccgccatgttgcagcccaaagtctcggtatggtacaactactcgggcgacctcgacttcacgatcgagaaccgtctggcgatgagcttcctcgaacaggtgctcacttcgcgctaccgcgtgtcggtccgcgaggagaagggcggcacgtacggcgtgggcgtgggctccctcaccgagtacgctccgaagaacagctaccgcctgatcattcagttcgacaccaacgagcagatggccgacgaactgatggagatcatcgtcgccgacttccgccgcctggcagcggagggcccgaaggccgaggagatggagaacatccgcgagtatatgctcaaggagtggaccaactcgctcgaagagaacggcagctggctgaccaacctcgaccgctactactcgctcggtctggactacgtgaacgactacgaggaggccctgcgcaatctcacggccgaggacgtgcgcctcatggccggcaaggtgctcaaggacaacaacctcgcaaacgtaatcatgcgtccggcagccgacgcggaatagacacccggccgtcgtgacggccgcacaggcagcgggccccttccgaacgttcggaaggggcccgttctgttttccgcaccgaggctccgctcccgcacgacggaagccggtgcaagaccgcgcccgcggaagcaccggcagctcctctgtccgccttgcacacaaccactcgaacagttacctattgtaaagaaaaaagtccccacggagtacgcggggacacaggtgtcaaaaccttcggcctatagccttattgtggtaagatgtagtttgtaattcttacgatacaaatatagactaaaattcggatttttacaactttttatttaattttacgaaaaattgaagcgtatatgacgaaaacattgggattggacctcggcactaactcgatcggctgggcgatcgtggagcgagacgacaacgacggccgctgccggctgctcgatcggggcgtagacatcttccaggagggcgtggcacgcgaaaagaacaacgagaagccggccgtgcaggaccggacggaggcgcgtgcattgcgacgccactacttccgccgcagaatccgaaagatcgaactgctcgggctgctcgtgaaatacgacctctgtccgccgctgagccgcgaccagctgcacgcatggcgcagccgcaaacgctacccgctggacgaggagttcctgcgctggcagcgcacggacgacgccgcgggccgcaatccctaccacgaccgcaaccgggcgctgagcgaaacgctcgacctcaacgaccgcgccgaccgtcatgcgctcggccgtgcgctctaccacctggcccagcgccgcggcttcctgagcaaccgcaagcaggccggcgccgagagcgaggacggcacggtcaagcaggggatcagcaacctgtcggaggccatgcgcaaggccggatgcgagtacctcgggcagtacttccacacgctctacctgcgcaaggagaagatccgcacgcactacacggcacgcaacgaacattttctggccgaattccgggccatttgcgaaaagcagcagctgcccggggagtggcgcgaagcgctgcaccgcgccatcttctaccagcggccgctcaaatcgcagaagggacaggtgggcaggtgcacgttcgagaagaagaagtcgcgatgtccggcatcgcatccgcgcttcgaggagttccgcatgcgctcgttcatcaacaacatccgcatcacgggccctggcgacgaggagccgcggccgctgcggaccgacgaaatcgaacgcatccgtccgctctttctgcgcaagagcaagccccacttcgacttcgcggagcttgcggccaaactcgccggcaagggcaacttcgcctgcaagggcgaccgcagcgaggcaccctaccgattcaacttcccgcgcacgacgaccgtgtcgggctgtccggtcacggcggcgctcatcgcgcttttcggcgacgactggcaggccgcgctccgcagccgctacacgctcgctgcggacaaaagcgacgaccgcatcgtgaatgacatctggcatgcgctcttctcgttcgacgacgaggagcgcctgcgcgactgggcgcgcacgaaactcggcctgagcgacgacgaggcgcagcacttcgccgccatccggatgccgcaggactatgcctcgctcagcctcaacgccatagacaagatcctgcccggactgcgggcgggactccgctacgacgaggcggtcttcatggccaacatgcaggccgtagtgcccgacgacgtgcgcgacgacgcggcgaagctggagcggatcggcaccgacatcgcggtgctgctcgaagatttcggccgcaacccgctcaatgcccgcacgaccaaagaacagtgcgtccgcgactacctgcgcaactgctgcggcatcgacgacaaacacctggaccgcatgtaccatccctcgatgatcgagacctaccgcgcggcgctgcccgacgccgcgggcatcctgcgcctggggtcgccgcgcaccgactcgatccgcaatccgatggccatgcgggccctcttccgcctgcgcatcctgctcaacaccctgctgcgccagggcaagatcgaccgcacgacgaagatcaacatcgaattctcgcgcaacctgcacgacgccaaccatcgcaaggcattcgaacaataccggcgcgaccgcgaagcggaaaaccgcaagtatgccgacgagctgcgcgcgcagtacgcggacgccacgggccgcacgatcgaaccgaccgagacggacatcctgaaattccgcctgtggaaggagcagcagcaccgctgcatctacacgggaaagcaaatcggaatcgccgacttcatcggatcgaatccccgtttcgacatcgagcacaccgtgccccggtcgcgcggcggcgacgactcgcagaagaacaagacgctgtgcgactgccgctacaaccgcgaggtcaaacgcgccaagttgccgtcggaactcgccgacgcacaggccatcggggcgcgcatcgaagaactcggatggcggaagcgcatcgacgaactggaaaaacagatcggcaaccaaatccgcaagagcaaaaacgcctcgcccaaacaggaaaaggacttcgccatccaacggcgccactacctgaaaatgcagctcgactactggaaaggaaagtacgagcgcttcacgatgaccgaggtgcccgacggtttcagcaaccgccagggcgtggacataggcatcatcgggcgctatgcgcggctctacctcaagagcgttttcgagcggatctacaccgtcaagggtgccacgaccgacgccttccgcaaaatgtggggattgcaggaggagtatgcaaagaaagaacgcgtgaaccacgtccaccactgcatcgacgccatcaccatcgcctgcatcggtcgcacggagtacgaccgatgggcgcaatacaaggcagaagacgagaactaccgattcggtcgtggcgaccggccgttattcgtgaagccgtggccgaccttcaccgaggatgtcctggccgttgccgacgagctgctcgtagcccaccacacgcccgacaacatgggcaagcagagccgccgcaagctgcgcgtgcgcggcagaatccgccgcggcaccgacggcaagcccctctacgcccagggcgacacggcgcgcggcgtgctgcaccagcagaccttctacggagccatccgccgggaggacgaggtgaaatacgtagtgcgcaagtcgctcgaccagttgcaggagagcgacgtggcgaaaatcgtggacgacgcggtgcgcaagcgcgtagagaaggccgttgccgacgtagggttcaagacggcgaccaacaccgcggagcacacgatctggatgaacgaggagaagggggtgccgatccgcaaggtgcgcatctacacgccgagcgtcacgcagcccatccacctcaaacggcaccgcgacctctcggacaaggagtacaagcaggagtaccacgtggccaacgacggcaactactgcatggcgatctacgagggcaccgaccgccgcggcaagaccaaacgttcgttcgaactggtcagcaacctggaggccgcccgctacttccggcgcagcgccgaccgtgcggcccggcccgacctggtgccgcagtccgatgcggacggctatccgctcaagtgcatcctccggcccggaacgatggtgctcttctacgaagcttcgcccgcagagctctacgaatgcacacagcaggaactgacgagaaggttgtacaaagttacaggattaagcattttgagaattcaaaagaaatgggagtacggtgcaattaccctcaaacaccatcaggaagcccgtcccgccggcgaactgaaggcgaaaaacggcgaatggaaaacgggagaagcataccggcccgtaatcgcgataaaccacacccaactcagagcctatgtcgaaggctacgacttcacgctctccgtcacgggtgaaatcgaattcaaacaccgaccgtcatgctgaaacgtgcgctctttttctccacacccttctgcctgagcctaaaggacaatcagatgatcgtccacacgaaggaggcgcccggccagcagaaacgcatcccgatcgaggacatcggcttcgtggtgctcgaacaccagcagacctcccttaccctgccgctgctgaacgcactgtcggaccacaacgtcgcggtgatcctctgcggcggcgaccgcatgcccaacgccatgctcctcaacctcgattcgaaccggacgcagggcgagaactatcgggcgcagatcgaggcgagcgaaccgctgaaaaaggggctctggcggcagatcgtagaagccaaaatacgcaaccaggccgccctgctgcacaaactgggcaaggacggcaacctgctcaaaccttgctacatgaacgtcaaaagcggcgatgcggacaaccgcgaaggcgtggcggcgaagctctattgggccgagcttttcggcagcggcttcgtgcgtgcacgcgaaggcgccgcaccgaacggcctgctcaactacggctacacgattctgcgcgccgccgtggcacgctccctcatgggctcggggctctttcctgcattcggagtgtttcaccgcaaccgctacaacgcctttccgctggccgacgacctgatggagccgtacaggccctacgtggacgaacgggtctacggactccacgccgcaggacattcggagctgacgcgcgaagcgaaaggcgagctgctgcggctgctcttcgccgacacccggttcgacaaggtggtgcggccgctcgacgtgggtctgaccctcacttcggcatcgctcgcgaggtgcttcgcgggcacggcgaaaaaactcgcgttccccctgttggaatagaaccatgtcggaattacgtctgaatgcttatcggatcatgtggctgttcgtttttttcgatctgccgaccaacaccaaaaccgagcggcgccacgcggcgcagtttcgcaaggcactggagaaggacggcttcacgatgatgcagtactcggtttacgtgcgccactgcccctcgaaagagaccctggaggtgcacatgaaacgggtgcgcaggtcgatgcctccgtcggggttcaccagcctgctggccgttacggacaaacaatacggcgacatgaagaatttctggggtccggtcgagcgcgcacggcccgaaacgccgcaacaattggaatttttttgatatatttgtaacggtacgaacgaaaaaaacgcacgaatcgacttccgcggagtgcgcgacacatggttttcggacggcaaaacagctgcaaacaatcgaaaatcaatagagtaagcgcccgtggttgtggtttgatgtagtttttaaataagatacaactggtcaaaagtcaaacaatttgtagttttagttgtggtttgatgtagtttttaaataagatacaacatgttcaaataatctgtttcacctcaaaatgttgtggtttgatgtagtttttaaataagatacaacactcgatgcccggaggcccagacgactattgttgtggtttgatgtagtttttaaataagatacaacagcggggcggcagccctgttcggccgtcgcgttgtggtttgatgtagtttttaaataagatacaacagatcgcgcgtctggagtccaacatcgcggttgtggtttgatgtagtttttaaataagatacaacccgccatgacagcccccgacctgcgagcctgttgtggtttgatgtagtttttaaataagatacaactcttgatcgtgtccgcggagttcacgagctgttgtggtttgatgtagtttttaaataagatacaacttacggtgtcggcgctgctgctccgcaccggttgtggtttgatgtagtttttaaataagatacaacccatgataggttggaacgaaggttcgacagttgtggtttgatgtagtttttaaataagatacaaccctgaacccggagatacattcgttcttaccgttgtggtttgatgtagtttttaaataagatacaaccgtgacgctcgacaaccgcgagagccgcagttgtggtttgatgtagtttttaaataagatacaaccgcccggaacggcggccacagcttcggcaagttgtggtttgatgtagtttttaaataagatacaacgtaacagcgacgaggagatcctcggacgccgttgtggtttgatgtagtttttaaataagatacaactgtcccggaagtcgcccgttgcctccgccagttgtggtttgatgtagtttttaaataagatacaacttaagattgaaaaacagagcatggtcaatagttgtggtttgatgtagtatttagaagcgtagaacaaccaaaaacaatcagaaatatcaaagtataaacctttaactatcaacgcattataaaaattaacacttttcggctgctttttgatgctttccaaatttccacatatttttgagacgtatttctgacgtggagaatttgcggggcttgtttttgtcacaccgtgcagacagttgacaagggtttacaaccgtttacgacaagcgacaatatccgccccaacattcagtgacggtcacatcgtgtagaaaggcgacaaccgttgactgccgtttacatccgttcaccacttcaggaatacaggattgaagaaatgaaccagtaaacgataaagcagtatgaaagcaacccgaaaatgcagtttttgcggcaaatcctttgtaacccgcagcggaatgcaaaggtattgcagtgaggcttgtcaggcggaagcccggcgagccagaatgacacagaagaacaacctcttcaaggccgtccggccaatcatggagatacagcatcaggagtatctcaccttttccaaagcagccatactcatgggctgttcccgacagtacatctataaacttgtagccatgggcaagctgaaagcctcacgcatcagcaaccgcatggcattcatccgcagagccgacatcgagcggatgctggagggcaatccctaccaccgcatcctgcccggcagcacttccacaccgaaaaaaaccgcttcatcttccttcccggcgaaaaaagaaaaaagggaaaaggtaaccgatgaagtgccggacttctattccggtgaagaggtgatgtccctttataaagtcaagcagtcatggctctataccactgccaaacgcaactgcatccccatctgccgtatcgctggaaagaactattacagcaagaagcatgttgacgagttcttcggtacggctgttgatatggaaagtatcaccgactggctcctgactaaagaagcggaagagcagttcggcatgaagcctgccgcactccgggcatacgcctacggcacaggataccgaccaaaagagaatacggccgcacctattactccaagtcccatctggacgaactccgcagaaccgaccttgtgaacgacgagcgttattacaccgtggaacaggtccggcagatttacgggctttcctccgccaatatctgccatatcgtcaaggttaagcacatcgaaaagataaaggtcggcgtgaagaacctgcttctgcgctccgacgtggagcgtgtcatggctgaaaggaacaaataaccgcaagcaaccgccattacccgaaaattatttcaaaatgattgtcgtggagattttccaactccaataaagtcaaaatccgcatagagcaaaacaactatatatcaacaagttaattgatttgtcgggtaacggattacctctgttaccacccgaatacggtggatagttctattcttatgtaggctcccatgtagggaactgacaggaatacatgagccactaaaaaattaacgatatgtattgttcgatcacattcaaaggtcgcaaagacccccaggaccccaagatggtcaaactggaaatgattttctacaagaccggttacacccgcattccccgggtcgtcagcatcaccggagcttacaaatactggaacaacgaaacccaaagttttgaatccgcctccagcgagtacctcaagaaaaatcaactattgcttgaactcaaagagaagtacatgtccgtcgccgagcaatgggaaaaggacgggcgcaacttctccgttctccagtgggccgactgcttcaagctcaaagaagaagagaaagcgaaaacagagtcgaaagtattgaccatccttcaactcatcaacgccagaatcgaatacttcgagaaccacgagaaattcaagaacggcaagctcgtcaagagtgtcggcaccgccggcatgtacaagcagttccgcacttcactatcggccttcacccaaaagcagtacaacaaagacctgtcccgcttttacttcaccgacattacccagaaattccttttggaatacatcgtctatctggaacggcgcggcatcgaaaacggaaaccgcgccggcttgcgccagctccttcgcatcttccgtgctttggtgaactacgccaaagacgaactccacatgtacggagccaaccccacaatcttcgaggcggctacggaaaagatggcgtgggggcagttcgagtccaaagccgtcaatccgaacatcatccgccggatggagttcatggaccgcagcctcttttccgagcaggagcaactctgtcttgaccttttcctcttcagcttttacagcggcggcatggccaacgtcgatgtcgtcaacctaacatgggacatgattaacgaaaaggaaggcatgattgtctatgaacgtaccaaattccctaagctggccaagcccctgctcatcgaccgcctcatcgtaattctggaaaaatacagaggcaaaggcatcggcaactatgtcttcccagtctataccgagaaacacataaccgacaaacagaagatgggacgccgtaacagcttttcaaccctcgtcagtgagactctggacaaagtttgcgagattctgggcatcgacgagaaaatgacttggtacacggcacgaggcacgtttatctccagcgaacttgatgcgggtactccgattacccacgtcgctgaaatggccggcaacagcgcccgaaccatcgagaaacactactacaagaataccaagcaggaagaactccgccaacgcatgaacgcccgctacggtagttgggggcaacaggctatgtaacaggcgttgaagaattaaccaaacaaagaaagctatcggaattttaccgatagcttttttatacagaatccctctttcgctgcgatcatcatataaatgaaaaacggactcgcgttgaaagatttacaaacgtgaattactccggcacgtaaatgatttctccgttttccagttcgtaggcgatgccgacctttttgcctttctttccactcttgggatcctgattttcggacggggtgtagcggttgatcttttcgccctccttggtgatgatctccatgtcctccttgcccgggttcttgaccatcgtaaaatcttccttgctgaacatctccgtcatgttgtagcggctcacgagggcgaccatgagcgcgacggcgaagaccatcgccacgtcgaacagattgctcacgacactcatcgggtcgctgccgtcctccttgttcaaaagtctgcgtttcatcgttctgccggggtttcgttcaacaattccgctacgaattcgaggtcggtcatctcctgcaagtaccagcgctgtttcacctgacctgtaacgaatccgatggctgcggcaaaaagtcccacgaccgtcgttgcgaaggccacctgcatgttgtacgccattgaggcgatgtcgcccgtcgaaagccccacgagtgcgggtcccatcgggataagggttcccatcagtccgagcatgggccccatcttgccgagcgtcttcgagacggcgaggtccttgtccgcctcgatctcgaaatcggaaagcaggcgctgccgcatcgccgcgctgtcggctccgagcaggcggttcatgtagacaaccaccagtgacgggttcttcctgggcagacgctccgggagcgacgatacgttgtccctgttcagcccgtccagttccttgcgcagaagtgcagccgtgcggcgggtcgccatatactgcccgaagaaactgccgacgagcagcaaagcccgaccgaaaaagaatatcaacaatatgattacgggaacgagcagccccgtcgagatccaatagagaatatccgaaatgtaattcatgatgttatttgtttttaattatatgtttcaatcttattctataaatcgcagtacctccgaccaaaccgatgacgaggaggacgcatactcccgccagtgccggccattccactttgctgataccggcgacggcagtgcggccgtttaccgtggcgatgactcccaggacggcaatcagggcattggagagaaagagcaattcgaggcgtatctccttttcgggcagcaaccgtttcatgccgtatatcccacctgtcagcacaacgagcaccgcgcccgccagagaccatgacaccgtcggaaacggcacgcccggaagggcgaagataaccgttaccagcagactgaacagcacgggaaagatgagtactccggggaaccaccgcaggatgcggtatgcccatatcgtccggggtttgacctttcccgaggtctggatatgcgccgccaggatgcagaaagccatctgcactgccacttccaacgtcaggacgaccgccgcgtcgagcatcagtgcggaatccgacagccagaccgaaacttgcgacttcgactgctcgatggcacaacgccacatcgaacccgtgaagagggcgcacaccgcagcggaaaatacgaccgcatagggcttgcggtaggtctgcttcaaaatgtaattgaagcagaccagcatcatcatgaccaatacgacggtttccattactcctccatctttttacggtgccgacgcaccgtccagaccagcgcggttatcgccacgagcaccagaacggccaccgccgtgttgctgactatcgtccttgtcttgtcggacgcgttcatctcttcctttttcagcaccgttcccttgttctctgtgagcgaagcctcgcgcacgtcgcggatctgccgctcgtagcgtcgggctgcgtcgggcgcggttttcgaggcgatgaactcgcgcagtttggcattgttgcagacggcacccgagcaagagggtttgtacttatccaccagtttggtatggagttcggcgatggccttcagctgctccgccgaggcattccacatccctttgcgtgccgtctccatcatgacggccgtcatctcttccagagcggcgggattctgccgttcgaaataatcctgcacacccaatccgaacttgtcctgcacatatacattgtatatctcgtcccacagttcgttgtctatggcatcgggtttcatcacgttccag

SEQ ID NO: 514 - DNA, 20844 bp, synthetic construct
  source 1..20844: mol_type = other DNA
  misc_feature 1..20844: note = Synthetic
actgctctccgcccggcagccggaacgtcagcgtccgggtctccggcggcaggcactgctggtcgttgcaagccatgtaggtaacttcggcctggatttgtgccaacggctcgcccgtgatctcgatctgctgcgagaaaaccggctggccgtcgtgccagaggatgtccatgcggaaattttcatcgtaggatttcaggggcgttggttcctgcattttcccttggagggagtagccctgttgcgggaaaacgaattccgtcgggatgggcccgtccgccggcagggtcaaggcgtagatgtgccacgaaggcagcatgtccgcccgggcatcgagccgatagacgccgtccgagaccttttcggccgaagtgttccaggaaacaggatccagtatttgcgcccgaacgcccaaggtcgatagcgtcagggcgaggaatacgaaccattttttcatcttcgttcagtcagtctgttttatgtttttccttctttttttgtttacaccctgtcgggccgttccgtttgcggccttgcggccgcagcgccgcttgcgcggcgcatgcctgggggcatcactcgcccgacttgtcggccaaaggcacccagcgcaccgtcagcacccggcgggtatcgtcggttacgcggaaagcctcgctggagcgcaagcccaccgcccaagccacctgcccgtcggccgaacacagcagccaggcatcccgcttgtcgaacaaggacagcttgcaatccttgaacagtttggccacttttttcttccgcccacccattcccaagggctgcatcgtatcgcccggccggggacgccgcagccgcaaagggaacgccaagcggtccgcatcgaaacacgccgtggaagccccccggtcgaacgtctcgcccgcgctccgttccgaccactccaggtgcaagcgcaaagggaagtccaccccttgcacccccgcctcgatgtcgaatacctcatcctcctggccggaagcacccgttttttcgacgaacaggaaatcccgatcgcgcagcaaacggaagtcctcccccgcgaataccgccccgctatgcccccgtacgacgctgcgcatcacatcgcccgtacgcgactccagcccgtagcctttgaggatctcgtaaagcgccgcccccgcctcgcgccccagcgatcgcagcgccggaatgcttatccggtcccgcgacccgcgccgggaaaccatccaggccgttttttcctgcaccagatgcgcgtaaagccccgccgcctcctgcaggtaagccgtgttctctcccaccgaatgcaccagggaagggttgatgcgcttcaggagagggatcacctcgatccgcagcaggtttcgcacatagtcggtcgaagcattggtcgaatcctccacccattcccagccgttctgccgggcaaaccgctcgatctcctcgcgcgagaaaggcagcatcggccgcaggaccatcccgttgcgggggcgcatccccgccagaccctcccacgaggaaccccgtgtgaagttgagcagcaccgtctccacctggtcgtcgccatgatgggccgtgatcactcccgccagacggaattcccgcaccaagcgggcaaaccacccgtaacgcaaatcccgcgccgccatctcgaccgagcacttttcccgcagggcgtattcccgggtatcgaaggactcccgaagcagttccaccccccaccgttcggcctgctgcaccgcaaagcgctcatcccgcagggattcctccccccgcaggtgaaagttgcaatgcgccgccatgaagggcacctttgtctttttgagcaagtatcccaatacggtcgagtccaccccgccgctgaaagccaaaagaaaacgccccccggagaaaaactccgggaaatgctccctcacgtgttccaaaaaccgtctgtccaggctgttttccatccgttggctcttatggatgcaaagatacgaaaagccgccgtttccgacggcttgaagtctcgaaccctcttatgagccaccgcaagtcaatgtgcctcgagccagttggcacccgtacccacttcgaccaccagcggcaccctcccctgccaggcagcctccatcttttcttttaccagcgcccccacttcctccagttcggccacaggaacatccaataccaactcgtcgtgtacctgcaggagcatctttgtcgcgtagcccccggagttgagcgccgcgaatacctcgatcatcgcgcgtttgacgatgtcggccgccgaaccctggatcggggcgttgatcgcgttgcgttcggccgctgcgcggacattggcattgcgggagaggatgtccggcaagtaacgccgacggcccagaatggtctccacatagccatgcgtgcgggcgaactccttgaccgattcgatgtagtcccgcagtttgggatacgtccggtagtacgaatcgatcactgccgctgcctcggcccgcgagagggtcgtctggcgggaaagaccgtgcggcgacaccccgtagatgatgccgaaattcacgcttttggcgtggctgcgctgctcccgggttacctcctccaacggcacgccgaatacccgcgaagcagtcgaacggtggatgtcctgcccttgggcgaaggcttcgatcatcgcatcttcccccgccagggaagcaatgatgcgcagttcgatctgcgaatagtccgccgaaaggatccgatgattgtccgacgaagcgacgaaagcccgccggatcatctgcccccggggggtgcgcaccggaatgttctgcaggttgggattggacgaggacagacgtccggtagccgtaagggtctggttgaacgaagtatggatgcgtcccgtgtggggattgatctcctggggcagcgcttcgatgtaggtggagagcagttttccgatggaacggtattccaggatgtccgccacgatgggatgttcgggggccaggtcggaaagcacctcctccgaagtggaccattgtcccgttttggtctttttcggcttgtcgatcagcgcgaggcggccgaagagcacctcgcccagttgtttgggcgagttgaggttgaaccgctcgcccgcctgttcgaagatccgggcctccaccccctcgagctccgtttggaattcctgccgcagtcgcgccagttcagccgtgtcgatgcgcaccccggtgcgttccatgtcggccagcacagggatcagcggcgtctccagacgaaggaacaactcccgggcgcctttttcgtccagcatcgggtcgagcacctggcgcagttgcccggtgatgtccgcatcttcgcacgcgtattccttgagccgctccggatcgaccctccggatgtctttctcgcgccccatcatttccgtgtagctcatcggacggtagcggaggtattgctcggaaaggatgtccatcccgtggcgggattcggggttgatcaggtaatgcgccaccatcgtgtcgaacagcggcccctgtacccggatgccgtacccggccagtacctcgatgtcgaatttgaggttttgtccggttttcccgatcgaggggtcttcgaacacctcccgaaagcgttccaaggtttctttcgtctgctgcggctcgccgtccagacgtacccagtagccctcccccttttccagcgagaaggacatcccgacgatccgggtgtcgaaagccttgagcgaagtagtttccgtatcgaaagtaaactctttcgccttcttgagccgtccgatcagtgcctcgagttcggccggatcgcggacctccacgtatcggtgcggcgtctcggccagcccgggaagagtagcgaacaagtctccggttgccccttgcggatcggcgaacatgtcgagctgtccggcgggcgaagtccccgggtcggacggggagttttccttcgctgccgatgaggtctgcggggcttcttccggcacgtttccgccgaaatcccgatagacggtctccatcatccgccggagttccaaccgctggaaaatgtcccgaacggccgacaaatcgggacggtccaaatggaaggccttggggtcgaaagcgaccggaacgtccgtttcgatggtggccagccgtttggacagcaggccgagttccttgttttcctcgatctttttgcccaaggctccgccgatctctcccgcgtgcgccagcaggttttccatcgtgccgtactcggcgaggaatttcttggccgttttttcccctactcccggcagcccgggaatgttgtccgaagcatcgcccatcatacccaggtaatcccgcacctgcgaggggtcctgcaccccgaaacgctcctgcacccggggaatgtcccatatctcgatgccgttgcccatccgcgccggacggtacatgaaggttcgggcggtaaccagctgggcgtagtccttgtcgggggtaaccatgtaggtggtaaaaccctgttgttcggctttgcgggccagggtgccgatcacgtcgtccgcttcgaagccttcgcaggcgagctgggggatgtgaaaagcctccaggatgtccttgatcaccggcacggcaaactgtatcgcttcgggcgtcgcctcccgttgggctttgtaggcttcgaacagctcgtggcggaaggtgggtttggcggtgtcgaatacggccgcaatatggctgggacgctccttgcgcaacaggtcgagcagggtattgacaaaccccattacggccgaggtgtcttcgccgtggctgttggggcgcacggtcttcatgaaggcgaagtaaccccggtagatcagtgcgtaggagtcgagcaggaaaagtcgtttgtcttcttcggtttccatgggtaaaaatatggtctttataggtatgggctgcacgtccggccttgcgttggttgaaaacttcgttttcccccacgtccgctgcgctcgcctttccctgtattttcataatacaggatgcgccctcggcctcggcacggggcgaaaacttcgttttcccccacgtccgctgcgctcgcctttccctgtattttcataatacaggatgcgccctcggcctcggcacggggcgaaaacttcgttttcccccttgccgctgcgctcgcctttcactatatttgtgcggtctttgtcgtctttttcgagcggcgatcggggcgggatgcactccggtgggtaaaggtactaattttgcgcctctcctgctttggccggaaaagaaaacaaggaaaagaatcgcttgggtagctcagttggatagagcagcagtttcctaaactgttggtcgcgggttcgactcccgcctcgagcacggaaaagcctctgcacgggtagtgtggaggtttttttatttgccggtgttcaatgcaaagatagggcaatagatgtaactcgaaagggaaaggacaggaaaaaggaaagttggcggtaggggtttgggttcgcttggcatgatgtgaagctccccagaggagaaaacttcgtttcctccttgccgctgcgcatgtctttgcctatctttggcttttccaaacaggatgcgatcccgtgtgtccttgagaaaaagacgagtcccttcgaggggagatattacggatcgctgcagtgtctttaatttcaaaagcagttcaatggaaaaagcgcccattacccccggagcttgtcgcccgggaaaatacctgtctcgattgaaggggaaaagagtggctttcgtaggcaatcagacttcgtccgtaaatgggcgtcatacgctcgacttcctgttggaaaacggcgtggaggtcgtccggatcttcggccccgaacacgggttccgcgagatggccgacgatgccaccccggtaaaagaccggatggacaccgttacgggcttgcccgtggtgtcgcttttcggcgatatcgaaaaaccgactccggaacatctgaaagacatcgaggtgttcgtgtacgacattcaggatgtgggcgtacggttttacacctacatttcgaccttgagttttatcatggaagcggccggggaagccgggatcccggtgatggtgctcgaccggccgaatcccaacgggcactatgtggacgggaatatcctcgacccggcgttttcctcgttcgtggggcggcattgcgtgccgatcgtctatgggatgacggtgggcgaatatgcccggatgatgaaccgggaaggttggctgggaggcggggtgcagtgcgagctcgaagtggtgccggtggagcattacgaccacagtatgccgtacagtctgcccatcaagccttcgcccaacatgccggacgacaaggcgatcaacctttaccccagtacttgtttctttgaagggacggcgctgaacgaaggtcgggggacggaccgtccgtttaaggttttcgggtcgccgttgttgcccgaaacgggattttcgtacattccgatgccgacaccgggggcgtccgagccgcgtttcaagggacaggtgtgccatggaatgaacctttcggactatccggagcgtctctcgcgggtgaatttcgagtggatcatctgggcctatgaccggtatccggacaagcggagattctttatcccgttcttcaacaacctggcggggggcacgacgatcaaaagtcagatcgtctcgggctggtccgccgggcagatccgcgattcgtggcgcgaggggatactgcgcttcaaggagataaggtcccggtatttgctgtaccccgatttcgaataaatgtctcccgatagcggaaaagcatagaagaagtaaaagaagaaaagaaggccggagggaaaaatgggcgtgatcatccgtcagtcgttttggaacatggtcgttacctatgccgggtttgtcctgggggcggtaaataccttgtttttgtacacccattttttttccaccgagaattatggcctggtcatgtcgctggtgtccgtttcggtcattgtgatgccctttattgcgatggggatgaacaatgccctggtgcgttttctgccgcgggaggcggacaaagaccgcttgctgtcgtttactttgctggtgcccacggtcattttcctggtgctgggagcggtggtgtacgggaaaggagatgtcttggccgagtttttcccccaaggggagctgatccgcgactttgtctcgctggccttctggatcgcggtcttttcggcctttttcgaagtgtttttcggctacgcgcaggcgcacatgcactctacggaaggggttttcctgcgggagatgttctaccgcatcgctaccaccgtcctgttgttcgccgttcatttcgggtggatcggagagatccagttttgctattggatcacggcttcgtttgccttgcggatgctgctgatggcatgggtggcctaccgctgccggccgttccgcctgcgctggccttcggtgaggaaataccggaagatcgtttcctacggtttgttctcgtcgatggggatggctatttgggcggctttgctggagttcgacaagtccatcctgccgttttatgagagcctgacgaccgaggcgtactataccattgcggtgttcatcggcatgacggtggcggttccctaccgttcgttgtaccagatagccaatccggtattggccaaggcgatcgccgaaaaggatacggcgcgtcaggaagacttgtcctgcaagtcgtcgatgaattcgctcatcctttgcggggggctgttcctgctgatcaactgcaacattcacgatatttaccgtttgttgccctcggggtacgaggctggagtgagcgtagtgttgatcatcagcctggccaagctgttcgattcgatctcgggtttggcgggttcgttcatcgtctattcccggtatttccgttgggacctggtcttttccttttgcctgatggcttcggtgatcggttccaacctttattttatccctcgctgggggatgaacggggcggcggtgtcgaccttgatctcgctgttggtggtcaattcgctgcgggtggggttcgtctacctgaaaacggggcatttccctttccggtggaattcccttgtgctggccggtgtgctggcggtcttttacggggtgttttcctggtgggatttctccttcgggccaggggcggtggcgacggtcggggtgatcgtggtcaagtctttgctgatcgtgctgtcgttcggtgcggtggtgctcaagggaggtttttcgcccgaactggcttcgctgtggcgttcggtgctcgggaagtttttcccgggtagggggcgtgcataaagcaagcggtgcgttcaagcgggagcgggcgggccgaaaggcccgcccgctcccgcttgaacgcaccgcaggatgaggttagtcggccagtacgttgtcgtagaggtaagtcaattcttttcgcagcagggtcttttttgcagaagacaaggggaggttgtccaacaagtggggggttttgtaaatcgtccggcaggataccagccctttggccaccaggagatttttgtcggctcgtgagagacacgaaaggcaagtgatgggatacgcaccgtagagttggatccagtcccgcaggctttcccccttcgggtagtcccaactgagaatgcgcagaccatagacttcggcgaaggcgatcgcgtcgtccgtaaagcgggtgttggtggccacccactgctggtaatgccgatctttgaaatcgtcgcggccttcccagcgattccgaatgtcggtatatcgggaaaggatgtacatcgggacttttacgtcgctcttggaggaagggttgacgtggtatttgcattcgatggtgaatatccggtcggggttcatggccaggacatccacttcgtgcgagatggcatgtccgggcaggacgatgcccacctttacttgatagcctttctcgacaaacaggtcgcctacgaaacgctcgaacggatagcccgtgttccccaattggctgatggcgtctttcaggcgataccgtacgctggctccccgggagtatttgcgcagcagggcgaaagtcttgttgtagatttccttggtaggaatcccctcgtaagcctccaaggcgactgcccgaatgatgatctcggccgtttcgtcgtttacgcccacgttctggagcgagcggtatatcttcatcgggtcgaacgggacgctgtctcccgattttttgaccacgttgagccggtatgcggtaggttgcagcagcatggcgttcgttttttagatacaggttttgcttattccacttcttcgtagtccacggtttctcccactccgtcgcggatgatggggcgggtgttcctctgggttcgatccaccgttacttcgccttcgcgtcgctctgtccgggaagcgttcccggaagaaccttgccgggaaaacagatccctttgtgccttgttcaaggcgcgtacctggcggatgaccggccaaagcatctggaaaaagaaccgcaggaaggccagcagtaacagaagaccgatgacggtgaaaaatattccgagaaagtccatttgtttccttctttttctgcaaagctaaactatttgaatggctttgaacggttttttataacaaaattaacggccggggatgccgggttgtaatcccttgaggggaaggattccttgcgcaatgcacattttggggggtaagacaggatcagggctctatttttccgaaaaataaggacgatatctacacacaaggtggaataggaggaagcgatctgcgaacggatgtcccgtctgcccctccaaagaggaagggcacggtttctacaaaaaagtctccacggagtacgcggagacataggtcgtaaaaccttcggcatatagccttattgtggtaagatgtagaaatttttaccaagacaaatataatgccgaagaatgtcatttccaaataaatttttattaattttatccgggaacattttcaacaactatcaactatgaaaaaggtattgggcttggacctgggcaccaactccatcgggtgggccttggtaaaacaggacgaagagggatttgcgctgctcgaaaaaggcgtcgatatttttcaggaaggcgttgcccgcgaaaagaacaacgaaaaaccggctgtggaggaccgtacggcggctcgtgcagccaggcgccactattttcgccggagattgcgcaagatcgagttgctcaaagtactgatccgttatggcttgtgcccgcccttgagctgtgaacaactcgacgaatggcgtcggaagaaggtctatcccctcgatgccagtttcctgcagtggcagcgcacgaatgatgccctgaacaaaaatccttactacgatcggtatcgggcgttgaaccagacactggatttgagggaacaagcggatcgctacacacttggccgcgcgctctatcatttggtgcaacgccgcggttttatcagcaaccgaaaggacgccgagaagcaaagcgaggaaggaaaagtcaagagcagtatcaaggaactgaaccaggagatggaacagtgcggttgccgttacttgggcgagtatttctaccgcctctacgagcagaagaagcccatccgcaagaagtacacttcgcgcaacgaacactgtctggcagaactgaaagccatttgtcggcaacagcatctgccccaggagtgggaaaaagacctggaacgcgccattttctaccagcgtcccttgaaatcgcaaaaagggctggtaggcaagtgcacttttgaaaagtcgaaaaaccgttgtccggcttcgcatcccctgttcgaggagttccggatgcttgcttttatccgcaacatccgtatggccgctccgggcgaaacggatctccatccgctctcctgtgaacaggtggaggctattcgcccgctttttttgcggaaaagcaagccctatttcaacttcgaagacattgcaaaaaaactcgccggaaaagcacctttcgcctgcaagggagaagaagggacgggagagtcctttcggttcaattatccccgcacgaccaatgtaagcggctgtccaacgagtgctgggttggtctatgcctttggggatcagtggctctccgacctgtgcagcctgtacactttgggcgagggaaaagaccaggagcagatactcgacgacatttggcatgcgctgttctggtttccggatgaagaccacctgcgcaaatgggcgaaagaaaggttccaactctccgacgaacaagccgaacgctttgctgcgatccgcctgtcttcggaatatgcggctttgagcctgaaggcgatccggaaaatactcccgtaccttcggaaaggtttccgatacgatcaggcggtgttcctggccaatctgaaaaccgcactgccttcctgcagcgagcagcaatatgaaaagatcgaaaacgatattgcagccttattggaagatttccaccgcaatccgctcaacgaagggaagacacaatccgattgcatccgcgaatacctcttggacgagtgtccggaagccagccccgaacaattggatcgcttgtaccatccttcgatgatcgagaccttcccgcaggctcgtccggatcgggccggacttttcctgttgggctcgcctcgcacctcgtcgctgcgcaatccgatggccatgcgtgcattgtttcggttgcgcatcttgataaatacgctgttgcgaaaaggatggatcgatccgcaaaccatcatccggatcgaatacgcccgggaattgaacacggccaacatgcgcaaggccatcgagttctaccaacgcgaaagagagaaagaaaacaacgaatacagaaaggaaatatcagacctctaccgcaaggaaaccggtcgagagatcgaacctacggaagacgaattgctgaaataccgtttgtggaaagaacaaaaaggccaatgtctgtacacgggaaagaggataggcttgtgcgattttatcggaggggcgcctcaattcgataccgaacacactgttcctcgttcgcggggaggagaagatgaacaggcgaacaagactttgtgcgagagtgagttcaatcggaaggtaaagcaatccaaactcccttcggaattggacaatcattcggaaatcctggcccggatcgatgctttgggttggaaaaaggagatcgacgaactcaggaagcagatcggacggctcaaaaaccacggagacgccaaggaagagcgggatcgtgcggtgatccgtcgccactatctgacgatgaaaaagaactatttggaaaaaaaatacaatagttttgtccgttcggctcccccggccgactttgccaatcgccagaaagtcgatgtcggtatcatcagccggtacgcctcgcaatatctcaaaaccgtctttccgaaagtattttcggtcaagggagcaaccacggccgatttccgcctgttgtggggcttgcaggaggagggcttgagtcccaagaatcgggacaaccatgtacatcattgtatcgatgccatcaccatcgcctgtatcgatccgaccatgtacaaactttgggcacagtatcaacaacaatgggagtactaccaaaaaggcaaaggagaacgcccgcaggttaaaaagccttggcccacctttaccgaggatgtcaaatccattgccgaagcactgctggtgtctcaccacacccccgacaatatgtccaagaatagtcggaagaaattgcgcaaacggggccgtatcctgcgcaacaaagccggagagatcctttacgcccagggggatacggcgcggggagcactgcatctgcagactttttacggagccatctgccaccaggacgagatcaaatacgtggtgcgcaaaccggtcgaacaactaaagcaggaggaagtcggtaagatcgtcgatccggcggtgcgggaaaaagtggagagtgccatccgggaggtgggtttcaaaaaagccgtcaatccgcaggaatacaccatctggatgaactgcgaaaagaatatcccgattcgcaaggtgcgcgtctttgttccttccgtcacccagcctattcgcctgaagaaacaccgcgacctctcggacaaggagtacaaacaagactactacgtgaccaacgacaataactattgcatggctctttatcgcgggaaggataacaaaggcaagacaaaacagacgttccgtctggtgagtgccctggaggcggctcagtatttcaagtcgaaagccggaaaggctgcccgaggtcaattgcttcctccgttcgacgaaaatggttacgctctggcctgtctgctcaggaaagggacgatggtcctgttttacgaaaactctccggaagagttgtacacttgttcgcagaaggaactggcaaggcgtttgtacaaggtaaccggcttgagttccatgatcctgcaacaaaaatacacctatgggacggtcgttctcaaacaccaccaggaagcccgtccttccggagagttaaaagcaaaaaatggtgcgtggaaaataaatgaaggataccgcccgattattacacttcttcacacccaattcaaagcctacgtacaaggctacgacttcgacctgtccgttacgggagaaatcactttcaaacacgaaccgccatgttgaaacgcatcctgttttttgccaatccgtatcatctgaccctgcgcaacgaacaggtgatccttcaggaacgggggacgaccgatgcgccgaaaagcgtgccgatcgaagacctgggggtgttgatcctggagcaccctcaaagtaccattaccctgccgttgctcagcgctctttctgcacacaatgtcgcggtgatattctgtgccggcaatcggatgccccaagcgatgctgatgaacctggactccaaccaaactcaggcagaaagttaccgtgcccaaatcgaggcgagcgaaccgttgaagaaaaacctctggaaacaaatcgtcgaagcgaaaatccgcaaccaagctgccctgctgcaaaaaataggccggaacggggacaaactcaaaccgtactacacgaatgtgaaaagcggcgatgcggacaatcgggaaggcctcgcggccaaggtctattggggggagttgttcggacctggctttgtccgcgcgcgagagggaccctctccgaatactctgttgaattacggttactcgatcctccgagcggctgtcgcccgggcggtgatgggatcgggattgttccccgccttcggcattttccatcgcaaccgctacaatgccttcccactggccgacgatgtcatggaaccttatcgtccgtatgtggatcagaccgtgtaccggatatgccaggaagggggcgaagccttgttgaccaaggaagtgaaaggagaattgctgcgagttctatttacggacacccggttcgggaaaatccttcgcccgttggggacgggattgagttttactaccgcttcgctgtcgaagtgttttgccggtgagcggaaaaagatcgcctatcctctcttggaatgagctatggaggaaatacgactaaatgcctatcgagtaatgtggctgtttgttttcttcgaccttccgaccgaaaccaagttgcaacggcgtcatgccgcccaattccgtaaagcgttggagaaggacggcttttcgatgatgcaatattcggtttacatccggcattgtccttcgaaagaaaacttgcaggtgcacattcaaagggtgcgccgatcgatgcctcccgaaggattcacgtgcctgttgagcatcacggacaaacagtatagcaacatcctgaacttttgggggaaaatagagcatgccaaacgcgagccccctcaacaattggaacttttttagtaccttcgttctttgacatacgaaaaaggcatcatacccacttcgtcagcatgtggacggcggttttttcttgcggcaaaaacgctgtaatccgcagagaatcaaagattgtcgctactgacgttgtggtttgatgtagaatttctatgagatacaacaacaagcctctgaaccggcagggcaaagagttgtggtttgatgtagaatttctatgagatacaaccctgatacatcgttattgcctgggcggccagttgtggtttgatgtagaatttctatgagatacaacatacctccaccgatcgcagcggttctgcgagttgtggtttgatgtagaatttctatgagatacaaccggaaccaagtccagggcgccgagacatggttgtggtttgatgtagaatttctatgagatacaacaaaccgagacataaaggtttctcgctccgcgttgtggtttgatgtagaatttctatgagatacaacttcgaccagatgtttggccagatatttcagttgtggtttgatgtagaatttctatgagatacaacgatgaaatcagtgaaccattaaccaaaatgttgtggtttgatgtagaatttctatgagatacaacggaacagagtaacacctctgtgttcagtagttgtggtttgatgtagaatttctatgagatacaacctcggggtttaatgtatgagctaatgatggttgtggtttgatgtagaatttctatgagatacaacaataaagtatgttaataatgttcatgtgctgttgtggtttgatgtagaatttctatgagatacaacgatctgcttgatgaccttggcaaaggcatcgttgtggtttgatgtagaatttctatgagatacaactctaatatgcaaaataattaacgttattaagttgtggtttgatgtagaatttctatgagatacaacttcaaagaagtagaagaaacgccagaatcagttgtggtttgatgtagaatttctatgagatacaaccgacatccgacgaaggctctgcatcctgaagttgtggtttgatgtagaatttctatgagatacaacagtacctgcacgaagtctcgcgaaaaggatgttgtggtttgatgtagaatttctatgagatacaacaccaagaaaaaaacattaaagcaaggcccggttgtggtttgatgtagaatttctatgagatacaacccgaattggaaaatgttttggcagatactgttgtggtttgatgtagaatttctatgagatacaacaaattcgggctggaaatgatccaacacatcgttgtggtttgatgtagaatttctatgagatacaacgcattatgcctcaaaagtaaggaaaaaaacgttgtggtttgatgtagaatttctatgagatacaacaaaaggcattgattatattttctattatggttgtggtttgatgtagaatttctatgagatacaacatgtgtttgtgtatgattttgaactgattgttgtggtttgatgtagaatttctatgagatacaactcatccgtgccgaaggcgaatacctccaggttgtggtttgatgtagaatttctatgagatacaaccaagccaacaaacaggacacccaggagtacgttgtggtttgatgtagaatttctatgagatagatggtttaaggttgcacatgcaatcaaataaaacacaatcgtgtagttttgtttgtgcggccatcgtgcgagtgtttcggatgctttgtgaaaacgggaggaggctaccaacccatcgtcgggaagcccccccaggatggaaccccgatgggggtaaaaccgttgtagtatccgtatccgaacgggtaaggatagccgccatcgatgtacgaagcgtggaaactgatcatggtccggcgcgagaggcggtaatcggctccgaacgagaagcctttgcggggaacaaacggattgccgctgtcggtcaggttgacaaaaccggctgcatggagcgtaaggcgggaggtggggtagtacgacccggctacgtaaacgatcgcgtcggtcgtgcggccgctgcgcgaaggcagtccgttggtgatgatgctccaagggataaagtcggcgccgttgtagtaggactgcatcacggttaccccggcggtgatgtccgctttcttccctacgggggcggttacttcggcattggcgttgaatccccaggcggtgttgtttttccgtcctccgacgtatccttccatgtttacccgggtggtggcggcgcggcgggacatcttttcgtaatgctcggctgcttttccggtatcggggtcgaaataggctgtggtgtcggcgtcggatgtttgtgcggcgaggacgcccgggcataggccgagcagcaccatcgcaagggcgcaaagcattcgagaactcgatgaagcgttcggtttcatggcctgtgtcgggagggaagaagccccggtctgtgcaaaaatagcattttgcggcggaaatatccccgtgtggtgtattaaagtattctaaaaacgagcgcttttgtgcgtgcggagtgtttgccggggaggaatgtcctgttggagggcggtgtttcccgttaggggatcaaccttttatatataggtgcgatgtgtcgtggaaaggttcggcggaggcgggagtgtgggtattctctttgagagagggcaaacttgcctctggaatccgggcgggaaaggagggacgatgtgaaaggggtgaaggggcggtcagagttcgctgaccaattcgtccactacctgggggtagtatttgtattcgagggcatggaccctttcggccaattcctccggggtgtcgtcttcgaggacttcagtgcgggcctggaagatgatctggccgctgtcgtactgctcgtttacgtagtggatggtgatgcccgattcctgttcgccggcttcgatcacggcgcggtgtacgttcatgccgtacatgcctttccccccgtaggatggcagcagggcggggtggatgttgacgatacggttttcgtaccggcgggtgatctctgccgggaccaggccgagaaatccggccaggacgatgaaatcgatcttgtttttcaccagtttgtccagcactttcccgctgcgcagttcttcccgggagaagaccgcggtcggcacggaatatttggcggcgcgttccagcacgcgggcgcgggggttgtccgaaaggaccagggcgatgtctgccgagtcggattggcggaaatactggatgaggttttctgcgttggtgcccgaacccgaggcgaaaacggcgatacgtttcatttttcttgtggaatcgacaaattgacgggacaaaaaaacagaaaaagcgcgggattaacaagcggtgggttaagattttttagaaaatattttttcgtataatatgctaatgtacagaagattggcgatgtgataaatcgaaaaggcgttaaattttgtacgcattgttgcatggatagcaaaagttttgagtaaatttgcctgctgaaacattaaaacatttaaccaccatgtctgacattgcatcaagagtaaaagctattatcgtggacaaactcggcgttgatgaaaacgaagtaacccctgaggccagcttcacgaacgacctgggagcagattcgctcgacacggttgaactcatcatggagtttgaaaaggaattcgacattcagattcctgatgatcaggccgaaaacatcacgaccgtaggtcaggtaatcacttatatcgaagagcagcagaagaaataatccctcgtcgagagtagattatggagcttaaaagagttgttgtaacgggtcttggtgcgcttacaccgcttggaaacgatgtctcccagacatggaagggactcgtggatggcgtgagcggagcaggacccattacgcatttcgatgcgtcgaatttcaagacccattttgcgtgcgaattgaaggacttcgatgtaacgcgttacatcgaccgcaaggaagctcgcaagatggacccttatgcccagtatgctttgatagcgagcgaggagggtgtaaaggattccggattggatcttgaaaaggaagacctttcccgtatcggtgtgatatggggttcggggatcggcggtcttctcactttccatcaggaagtgatgggctttgccaatggcggaggcaatccgcgtttcaacccgttctttatcccgaaaatgatcgccgatatggcatcgggacatatttccatcaaatacggtttcagagggccaaacttcactaccgtagcggcttgcgcttcttcggcagtcgctttggtcgatgcgttcaactacatccgtttgggtaagtcggacgtgatcgtaacgggcggatcggaggctcctatcgccgaacccggtgtgggcggattcaactccttgcaggctatttccacgcgcaacgacgatcccaaaacggcttcccgtcctttcgacaaggatcgcgacggcttcgtgatgggcgaaggtgcaggctgcatcgtcctggaggagttggagcatgccaaagcgcgcggagccaagatctatgccgaattcatcggcggcggtctttcggccgatgcgtatcacatgacggctccccacccggaaggaataggtgcggccttggtgatgaaccattgcctggaagatgccggagtgcgtcccgaggaggtcgatgcgatcaatacgcacggtacgtcgacccatttgggcgatttggccgaactcaaggccatcaaggaagtcttcggcgaacatgcctatgacatgaatatcaactcgaccaaatccatgaccggtcacctgctcggtgcggccggtgcggtggaggccttgtcggtgatattgtctatcaaggaaggtatcgttcctccgaccatcaaccacttcaccgatgacccggagatcgacaaccgcttgaactttactttctggaaagcgcagaaacgcgatgtgaagatcgccatgtcgaatacgttcgggtttggcggccacaacgcttgcgtgctgttcaagaagtacgaaggctaatccgggaatccgtaaaagacggttcgatggatcttttatcgaaaatatttcattcccgcgggcaatctgcccgcgggaattttgtttataaaaacatcctgggattcgttccgaaaaacccggaacatttcgacgccgcctttacgcatcgttccttgggccggaaggacaagtttggccacaaggtaaactatgaacgtttggaatacctcggcgacgcgatcctgggagctgtgatcgccgattatctttatcggcatgctccacagggcgacgagggttacctcactcagatgcgctccaagatcgtcagccgcgcgcaactcaatgccatcggcaagaacctgcatctggagcaggtgatccgttgtgcctttccgaaaggcaagatgccggatatggttttcggcgatacgatggaggcgctcatcggggcgatttatttggaccggggttacgctcgctgccagaagttcatcgagcgtcggatcatccaaccctatgtcgatatcgaatcgctcgaacacaaggtatccagctacaagggtttgctgatcgaatgggcgcaaaagaccagacgcaaacttcgcttcgaagtgtgcgatacacgggagtccgacttgcagcatcaattcggggtgaaactgtacatcggcgagaagtgcgtagccaaagggcgggcgaactccaaaaagaaggccgaggagcaggcgtgcaaacgtgcttattatcagcttcgttggaaaatcgacaaaaaaaagtaaatttttttgtcgattttttttggaaacgcggagaaaaagtccgtatctttgcccccgcaaacggagcgggacccgcgagagaggagagatgaggagagaggggtcgtccgggagcaagagagt

SEQ ID NO: 515 - DNA, 18250 bp, synthetic construct
  misc_feature 1..18250: note = Synthetic
  source 1..18250: mol_type = other DNA
ataggccatttcactgcatccgtcaacatcctcaagatactcggaggcagactgcggctcagcgacgcttccgcttcaggagtgacgctgttcgcccacaaatatgacagcacctccgccaactggaaacttctgaccaaggatacccctgaagataccaccaagacaccggaggatctcccttggatatcggtcggggaacttgttctggacggagacccgactctgtactataccagcgcctgggacgctgtggaggccaggctgtcattccggcgcttcagcctgaagggtgcggccaagcttgagttcgacagcggtgatttcaaggtaaggggactggatatgtctatggacagccttgttctggcttgttcccttcctgaagattccatcaatgcgtcaatagatctgctgtccctgaagagtagagggaaaaatgtgtttgacaccaggctggaagcttatgctcgggccggaatcggcggcatcggtactttcgatgtgcctgtaagtcttgcaggaccattgtcctgtgacaacaaaaagggtatgatgacactttccaccgaaggcttcggaggcagtctggcatatatccccgtattcctcgacgggtcggcctgcttctgtcacgacggtacgcaggtggatatgaatatgaaggttgaggattgcgaccttgccgttgtcctggataaatacgtttccctgttggcacggtcggtatcggatatctccacggacgcgcaccttttcctggacgtagacgcgaagggtaccttcaccgattcggaaatacctgcgctgggactgagactgcgcatacccgaggcgggactggagtatataccgaaggaattcagcaccaggtgtgcagcggagttgtccgcgtccgtatctccgaaaaagagacttgatgcggtggttcatactctgaacctgaccggtgatgccctgacgatgaaattgacgggggatgtgtcagatgtcctgggcgcctggaaagcgaacgccgatgtcgatgcttctgcggagctcagcgctttgaacggattcctgccggattcactggatataaatgccgtcggtaaactgcttctcaatgcgcaggcttctttgaccgagaatgaattgaagactctcaagtttgagaactcaagcttaagcggagtcatatattccgactgtatcggagtggatatgccgacggacactctcagtgcggttgcctattctcctgagatcaggctcggcgtcaaggacaagaacatcgaggcgacggtcaatatggactcgatcaatgttgaaaagggggatttgagcgcaaagatacgcactatgcgcaacagcctgctctgttatggagttgaaagccgcggcaagactgtccctcatctggatttcaacagttcgggaaggattgtatccgtgcgtactgaggctaccagaatcaggctccgtaacgttgacgtacagacaagctttcagagaagggacttgactggagcatccggaaggcctcgtcgggacagcgtcaggagacgccacgtggtcagcgaaagcgatttggatgacaatatagatatctccatcgacagttctgtcacaaaaaagatccgtagctggagcccttcgggcaaaatttccatcgggggtggaacggcagtcacgccgtcattgcctttgcgcacgcgcctcacggacttcaggggtgaattcagtgaaagacgcgtcagcatcgatacggtggccgtcaggttgggatcctcggatttcggtcttgagggagacgtgaaagggttaatgggcatgctctccggcagaggtgtcctgtccgccgatatgaaagtaaattctgaacgcgtgaacgtcaatgagttgctcgtggcattcacgaaaggacgtaagatcgacgtccgggaggcccttgacagtgagagggaggattttgtggtggattcaatacctgacgccgacatcatgaccgccgaaataactgtagtcaaaatacctgggaacattgatttcaggcttggtctgcaggcggacagagtggactattcagatttgaatatcactccttttgtcgctgacgtggcgctcaaggacagggtggcgcggatcactgatgtcagcatgcgctctgatatcggagatatctcgctcgaggcttattatgcagcgaagagcaggaatgacgtttctttcggcgcggatgtccacctgagcaatgtttcgtccaaggaaatcatccatatgatgccgaacgttgacagttttatgccggcgttgaggcattttgaagggaagctgagcgcagatctttccgtatcctcaaaactggaccctcagatgaatgtgatatggccgtcctttgagtcgatactcaggatcaaggggcgtgacctgatgatcagcgatgccggcaatttgaggaatatgaccacacttcttatgttcaagaacaaggacataggacacatagacgatatgagtgtggatgccgtcgttcataacggggaacttgaaatattcccgttcaaacttggcgtggaccgctatcgctgcatccttgccggagttcagaacatggatcagcagctgaactatcatatttcagtcatacagtctccgtttataatcccgttcggaatcaacatttacggtttcactgacaattggaaatattccctgggcatcgccagatacaacaacggtaatatgccggtctatactgagcagctcgatgccatccagttcaatctcgttgaatccatcaggaacatctacaacataggcgttgaagaagcgcgcgggaatgcgctcctcggagggcgtttcatgagggaaatgtcaggttacaacaaccgcaaggcatctgcagaggcttctcggacaggggatgaagcattgatagattctcttgccttcgagcttgcgatgaatgatgaagaaatgcagcaggaaatcgatgcagccgttgatgcggcaatggaatcctgccgcagtgatttcgatgccctaatcgccggttatcacgagaagagcgagaacaaaggcatcctgcgcaagctcaaacggcttgaaaaggaaagaaaagccaagaaggaataacccttcgggcctatttaccctggcttgcgtcagccttggccctcattctcctggcgcgttccgcgctgtcgggatgagatgaaaacatcttctgtacgagtgaggcctgagaacttccggacagtctcaccagtttctcaagagcgttgcacatgctgtacgggctgtatccgtgctccgtggagaacttgtaaccgtattcgtcggctgcaaactcctgcttctgtgaatactgggaactgatgaaggattcacctatatctccgagagcggattttgacaatgtgccgacagttcctcccgctgcattgaggacacctcttgccgctgaagccagataagcgctgcgcatggcgttcttggagtcctgatgtacgacgtggccgcattcgtgtccgatgatggccatcagttcggcgtcatccataatgtccataagtccgctgtaaactctgatggaaccgtctccgcaggcaaaggcgttgacctcgtcggtcttgtaaaccttgtagttcagtttgagtccctcgacgttatctattccggcaagtaccctgcccagtctgtcctgataggattggtcggccaaagagttctgtgcgtcaagctgggataccgtctgctggctgagtgccactacctgagcatctgtgatggatgccgcagtaagggcggacatggccgcctgctcgagctgtgcctgatcccagttgatgcttttcattacgctgcatcctgaaaccactgtgaccagagctgcgaaaaggaagatctttttcataaaattgccatttgtgtagtaaagatagtcaatacattgaatacttctaacttaactttgtatatttgagtgtttattggtcaaagatatggatgaaaagcttatttccagaagggaggccatgaaggtgatggggacagctgcagtggcaactgccgccgtcgtatccggcgcgggggcgctggcttcgtgtactccgggaaaatcaaaagaaaaaaaggatatgaaagtattgcttcttaacggcagtccgcgccatgacggaaatactgccacacttctcgaagaggtggcgcagcagttgtctaaacacgggataggcagcgaggtgttcaatatcggcagcgcccccgttcggggttgcatagcctgcgggcagtgtcatacgcagggactgggcaagtgcgtgttcgacgatgacgtgtgcaatgaattgatctcaaagatggatgaatgcgatgccattatcgtcggatcgcccgtgtattacggaactcctgccggacaggtgatttcggtgctccagaggatggcttacgcggcgggcaggactatgcaggggaagcctgcatcagccattaccgtatgccgcagaggtggtgcttcagccgctttccagaccttgcagatgccgttccagatgctcaatatgcctatcgtgacctcacagtactggaacatagcatacggttcggggaagggagaggtttctcaggatgccgaagggctccagaccgtccgcacccttgccgacaatatggcctatatgctcaagcagttcgcaacaggtgaagaggagtctccgaagagggagccttggattacgaccaattttatcagataacaggctatggcatacaagatagatttcaggttgccggagggatggacgtcttttcttgagaattatgacgacgagtccggcgtggagatatcacatctcgaggcaaggaaggttgaaggaggacgtgacgtcatcctggttgatgtgtatgccggccctatgccggaaggtgaaacggccgaagaccaggctttcgccaactatgcggacaccatcggattcgatgatgacgatgagcagaccccgattgtcaaatataaattcaacaacaggaatgcttggggctatgacggcgtcaccgaggaggaatgcccgatgagattcctcgcgcaggaagtgcgcaagggcgttcttgccataatagtgttctacgcagacaccgaagatattctcaacgagactttctctcttctcgaaagaagcctcaggatatccttatagggtatcctgctttagcttctcaaggtagtcgttgatgcgcctcagctggcgtgggatgaatatgtgctgaggacagcgctgtacacatttcccgcaggatatgcaatggtcggcctgacgtatggtcgggatggccttgttgtaggcggccagatatttacggcgggcgcgtgcatagttctcctgctcctgacttgtgacatatgtgccggcattgacttcattgttgtagaacttgaagatgcccgggatgtctattccgtaagggcaaggcatacagtactggcagcttgtgcactcgatgataggatatttcattatcttctccccgatgcccttgaggaattccagctcctcatccgtgcaaggcttgaagttgctgaaggtcctgatgttgtcggttaggtgctcaagctcggacatgccgctcagcaccactgcgattctcgggtatgtagccaggaaccggaagccccaggatgctatcgtagcttccgggtcacgtgatttcaactcgtctgaaatggctgcaggcacgttggcgaggcggcctccgagaataggctccattatgactatcgggatctcgcgcttgtcaagctcctcataaaggaactctccgtcgcggttccagtcaacgtagttcagctgtatctgcacgaagtcccaatgatatttctcgtgcagttccataaggctcatgaacccgtcgcggcttccgtggaaagaaaatccgagattgcggatgcgaccttgctcacgtgcctccaggtatgtatctatcatgccggaaaaacggttctcgaaatcggctctcgagctcagaccgtgcatcaggtaataatcgatatagtccgtccggaagttgatgaaagagttcttgaacatctcgcgggcagctttttccgccacttcgccggacattccctgtgttgaagccttggtggctatcttgtaactctcacgcgggaattttgcaagagcattggcggtaagagtctcgctctggccctcgagatatgcaggagccgtgtcgaaatagtttatgccgtgagccatcgctatctcgatcatggaagtcatcttctcctggttgaacacgtctttgccgttttcgtccttgtaagagtcgagtctcattgacccgtaccccagaagtccgatgccgtccagatgctggactacattgccgcaggatgatatgtcagtattgtaggcattgcctgtttcagttgttccttttcctgcctttggcgcgcaggctgcaagtccgagggctgctgagcccattccggccttctttatgaaatctcttctattcatggtgtacagcaagtccgttaactgttattgcactgatcgggcggctcgggcagaggaattcgcaggcgccgcagccgatgcatatttcttccgaaacggccggaaccttgcgtccggtctcaggatcattgatcatacggatggcacctacaggacaacgtgtgctgcagtttccgcaggaatcctgccccagagcggagatgcagaggtcgaggttgaccgtggcgcgtccgatatgggtggccgctttctgctcgcgggtcacaggcaggatagcgcctgacgggcagatctccgagcagaccgtacattcaggacggcagaacccgtttttatatcccatctccggctggagaaggtgcttgaggtcggtggaagggcgcagcacatggtttggacagttgcttacgcaaagctggcaggctgtgcactttgaatagaaattctcaacgcttccggctccgaacggcaccaggcgtgacgtgcgggcagggttggacttagggacgatatcggccagaccgccgtctagatgagcttcctgggctttggcggtaagcgctgagcctccaataagggcggcagtcatcatgaactgcctgcggcctttgtcggaaaccccatcgggggcagcctcagcctttgctttcgccttgccgaaaccgaaggagattgctttcaccttgcagttgtcgatacagtcgaaacagtcgacgcagcggctgttgtccacactgtgggtattcatatctatgcaggatgacttgcaggagtgaccgcattttccgcaggatacgcacttgctctcatcgattttgatatgcatcagggagtgcctgctgaacagacccaggaatgttcctacagggcatactgtattgcagtaagcacgtccccacaaccaggcgcagagtacgataaccacgaaagtgactgcggcagtgaccagaagggccggtgcgagtgattctcctctgccgacaccgaccgcggtgtgaaccatccttccataggcactgtatggcgcgatcagggctactgcaacctgcagaccagcaaagatggctgcgatggtaagcacaagcacagggtagcgcacccacttgcgctctttgttgaactgaaatttcttcttcggtgcgagtttcctgcgtatccggatcacaatgtcctggaatacacccataggacagatgaccgagcaatagatccttccgaagaggaaagtgaggaggagaatgccgatgatgacggcaaagttgagagccaggcaggaaggaaggaactgcagttcagccatccatccccaccactggctgccgatgcctgcaaacaggagagttatccccacggtaaacagtacggcaaggatgatgcggaatttcctaagcatattatgtaaattgattttggccttcgactcaaatatagccaataattcgaataagtgattgaagttcaaattgaaacttttcatatttttgtgatacgtatgaaagggctggatatgagaaaactattattgattatggcggtgctctgtctttgcacggaggctgcattcgcggacgattgtccacagatcgtgaatatagccggaagacggactgtctcactggacgggcagtggaagactattgttgaccagtatgagaccggttattatgattaccgccggaatccgataaatgagcgtgcctccttctttgcggatgccagcttcgatgccgaccgcaccaggctggtggagtatgagtttgatgcagcccgtgaactcagggttcctggcgattggaacacccagagggcggacctttaccgctacgaagggactgtctggtacaggacaaaatttgacgctccggacatcgaaggacgtgctttcgtctatttcggtgcatcgaattatgagaccgtggtcggcatcaacggccacgtgctcggaacgcatctgggtggcttcactccgttcaactatgaggttaccggacttctccgggaaggagacaactcattgatagccaaagtggacaacaagcgtatgctcgatgcggtcccgacggtcaactctgattggtggaactacggagggattacgcgcagcgtgtacctggtgtgtgtgccggagacttttatccgtgattactgcgtgcagttgaagcgtggaacgaccgataccctggaaggatggatacagctggatggaagccgggcggaacaggatgtaaaggtggagatacctgaagccgggattgtgatacctgcccgcacggatgcttccgggagggcttcatttgaattcaaggcagtgaagaggaagaagtcccttctttcactgtggtccccggaatctccgaaactctatgatgtggtcatctcctccgagacggattccgtgagtgacaggattggtttccgttccgtcgagacacgcgggactcagattctcctgaacggtgagtccgtattctgcaaaggcatctcgatacacgaggaatccctgggaactccggggggccgtggctgtggagaggagaacgccagggaaatactgggacttgccaaggaactgggctgcaatttcgtcaggcttgcacattatcctcacgatgaggcaatggtgcgcgttgccgacgaacttggcataatggtatgggatgaaatacccgtctattggacgattcagttcgagaacccttcgacttacgccaatgctgagcgccagctgaccgacatgatttcccgtgaccgcaacagggccagcgtcatcatctggtcggtggccaatgaaactcctcagggccctgccagacttgatttccttacccgtctgatatcgaaagcccgtgaacttgattctacaagacttgtcagctccgcaatggaaaaggactatattgacgccacacattgcacattgaaagacgatcttatgggtgtggcggacctcctgagcttcaatcagtatgtcggctggtatgacggtgacagcgacaagtgcgaccgggtggagtggattttctcagttcagaagcctgtattcatctccgaatggggcgggggagccctctatggccgtcacggcgacaggaccgaaaggttcacagaggagtatcaagcctacctttatgagaagaatgtccggatgcttgaccgtattccgggtcttgccggcaccactccttgggtgctgaaggatttccgttctccgaaaaggatgctcgacggaatccaggatgactacaaccggaaaggcgtagtcagccctctcggtgagaagaagcaggccttcttcgtcctccagcgctggtaccgttcaaaatagatcgaaaggtttttggagattcctaatattatcacaaaaagccccaccgaagcggggctataggactatgtccttcggcatatagccttattgtggtaagatgtagcttacaatacaaatataacataatttcgaatatattatgtatatttctaaaaaatagccatatatgtcgaaggtattaggaatagatctgggaaccaactctatcggttgggcaatagtagaacgggatggcacatctacctctctcgtagataaaggagtccacatctttcaagaaggtgttaatagggtaaaaggcaatgaagaaccgacggtaaagacaagaactgaagcaagggcaagccgcagacattattttagaaggagactgagaaagattgaactcctgaaaattcttgtcgagcagaaatggtgcccttacctcagttctgatgctctgaaagcatggaaggagacgaaacgtttccctcttgacccggatttccttaaatggctgaggacggacgattttacgaacatcaatccgtatcatgatagacataggtgcctaaacgagaaactcgaccttacaaaaagggaagatagatatactcttggccgtgcattatatcatctcaatcagaggaggggattcctaagcaacagaaaagaccagggctctgaggatgcaacaggcaaggtggctaaggatatattagacctgaatgcggaaatgcaatcgtcgggattcatatatattggcgattatttctaccacttatataatttgtgcgaacctatcaggcacaaatacacggacagaaaagagcattacataaaggaatttaatgccatctgtgaaaagcaggatattgacttggaccttgttcagaaactattttccgctattttcttccagcgtcctcttaagtcacaaaaaggtcttgtcgggaaatgtccgtttgaaaaagggaaaccaagaagtccgatatcacatcctgattttgaagagttcaggatgcggtcgttcatcaacaatattcgtgttgctttgcctggagagactgagatgcgtcctttgagttctgctgaaatatctgctattgaaccactgttcttcaggaagtcaaaggatactttcgacttcgcggacatatccaagaaactagcaggcaaggggattgttccggtgtataagcatcaggatgatgctgctagaatagacactttcaggattaattacagggatacgacaacagtcagtggctgtccggttacatcgcaattcaaggcgttgtttagtgaggactggaaatctgctatttgcgaacagtacacactttcggatggtaagagccaggaacagattattgatgatatctggcatgctttgcaattcttcgacgatgacgacaaactgcagaagtgggctgctgacaggctacagctgtcagagaaggattcgaaactgttcgcgagtatcaaagttccacaaggatacgcatcactcagccattgtgccataagcaagatgcttccttggttaagggaaggaatgcgctatgacgaggccgctatgatggcgaatatcccagcagttgtcggtaagaaagcttggactacgaataaagaagaaataattcgtactgttgtcggaatagtaacttcatatgtaccaaaccacgatatagcgaatgattccaaggagaggaagatagaggaggaactttgtaatctcggcatatacgatttggatatgacaaagttttatcacccttcgatgatagagacgtacccccagtcgcgtccggatgcgaacgggctggttctgctccagtctcctagaacagactccatcaggaatcctatggctatgaggtcgctcttcagactacgcgcacttatcaatggcttgattaaagaaggaaagatcgataagtttacaaaaatcaatatagagctttcacgtaacctaaatgatttcaacagtcgaagggcgattgattttcttcagagagacaatgaaaagaggcgtgagtcatataggaagtcgattgacatgtactatgcggaacagggtattgaagcagagcctacggatgaggatattctgaaatatgaactatgggaagagcagaagcatatttgtctctatactggcattcagattcccttgtctgggttccttggagcaaatcctcgatttgacatagaacatacagtacctcgatcaagaggcggggacaactccaaggcaaataaaacgttgtgcgaaagccatttcaacagggatatcaagaaaagcttcctgccgtcagaattggccaatggtgatgaaatactcaatagggtcgcagcctgcggctgggaggaggcgatggaatccttgcgcaaggatattgccaaagcaactaaatcagcaaaaagtgcctctgataaggcaagcaaggacaaggctatccaaagacgtcacattgcgaagatgcagttggattattattccgataagattcggagatttaagatgcgggatgtcccggagggtttcacaaacaggcaaggcgtagatattggcatcataggccgttacgcaagactgtatatccagtcggtctttgaaaaggtatattcggtgaagggagaaaccacagctgaatttagaaaaatgtggggacttcaggatagttatgcgaagaaggagagggtcaatcatacgcaccactgtattgatgccataactattgcatgtattgggaaacaggaatacgacatgtgggctcaatacaagagggatgaagagaacttcattctttatggagcaaagaagccgtctttcccaaagccgtgggagacattcactgaagacgtgaaaggcatctcggacaacctcctcgtatctcattacactgcggacaatatgtctaagcagacaaagaggattatgaagaagagtggtgctatccagaggggagatgacggaaacccgaaatatgtccgcggggattctgcaaggggctcgctccatctacagacatattatggcgccatcaagaaggatgaggaagtaaaatatgtcatcaggaaggaactggctttgctagcagataaagacttaaagaatattgttgacgacgttgtacgcgaaaaggttttgaaagccgttgaaaacggcggactctccgctctccaaggaacaatatggatgaatgaggagaagtgtattccaatcaagaaggttcgtctattcgctcccaatgttaccaacccactaacactaaaggaacagaggttcaagtctgacgctgattacaagaggaattattatgtagtcaatgagtcgaattatgcgatgctaatatttgaagggttgacagaaaaagggaagcagaaacgttcgttcaagatgataaataatctggaagctgctagactcttcaaccaaaaaacattagatgtattgcctagggaggatgagaatggcttttcacttaagtatgttttgcaaaatgggacagtggttttattttatgaaccaagtgaaaagaaccttaaactgctttcgcagaaggagctaagcaagagactttataaaacacttaagttctcaacgaacagcatagtctgcttcatacataaccaagaagcaaggccggtgggaaatattgaatacagaaaaggtccatggctttcttcggatgaattcagacctattatggcgatgagctataatcaagtttgtgcgctagttcaaaatgtagatttcaaaattacggtaactggtagaattgttttcctttagttagcatgttgaagcgtacagttatcgttacatcacctgcacggtgttgtttgaagaaccggcaactcgtttgtgaagatgatgaaacgaagataaaaaaaacggctccgattgaagatcttgctgttgtgctcgttgagaatcaacgggcttctttgtcgattcctttgcttaatgctcttgcggataacaacgttgctgtcgtgttttgcgattcttgtggtatgccgaatgcacaacttgtaagtttttctgcatcagcaactcaaagtgaggtctttcgcgcgcagatgtcagcatcagtcgcaaaaaataaaaggatttggaaacaactcgttgaagccaagattcgaaatcagtcacgtctgctggaaaaactcggaaaggatgggatgctacttcgaccatattacgaaaatgtgaagtctggtgatgccgacaatcgcgaaggtatcgccgccagattatattggagggaattgttcggcgatggattttctcgattacgagaagggccctcaccgaacaatatgctcaattatggatatgcaattcttcgcagttcggttgcaagagccttgctgtgttctgggttgaatctagccttgagtgtctttcataagaataggtataatcctattcctctagtggatgacattatggagccttttcgcccttttgtggatgagatagtttatgaattggtgcgtaatggagaatgcgaactcaataccgagataaaagggtatttggcaggtgtgctttcatgtgatacgaaatatgataaacttcgacgtccgttgcagattggtctatcaatcacaaccgcatcattggcaaaatgttatttggaagatactgctaaactgtcgcttccttcattggaagtataacgatgcccgagttacgattgaacgcataccatataatgtggctgtttgttttctttgacttaccaaccgagacaaaacagaatcgtagagatgctggtaagttccgaaaggagttggagaaagatggctttactatgatgcagttttcagtatatgtcagacattgcccgtcaaaagaaaatgcggatgtgcatgtaaatagggttcgtatattgatgccgccagaaggacaggtatccatattgtgcataaccgataaacaatacggagagatattgaattttaatggcaagattatgaaatctttaccgacggcaccaagacagttggaattgttttaagatctttgtaatattgggatataagccacttcccttgcggataatttttattggatattaatgtagatatttgatactcaatcaaaatcctaacaagagttgtggtttgatgtagaattcgaatgaggaacaacgatgggaagaatcggaggaggcgaggagtagttgtggtttgatgtagaattcgaatgaggaacaacgagtcttccccattctcaagtaatccgtagttgtggtttgatgtagaattcgaatgaggaacaacgaggggcggattgaaatgtgtgcggagaaagttgtggtttgatgtagaattcgaatgaggaacaacttgatgaagaaaaggcaaagtcaagcgaaggttgtggtttgatgtagaattcgaatgaggaacaactctaatctcaaacactatcgcctcaaacagttgtggtttgatgtagaattcgaatgaggaacaacccaagacacttgacaaccgaagggacaaagttgtggtttgatgtagaattcgaatgaggaacaacttagaatggcatattactgaatgataagagttgtggtttgatgtagaattcgaatgaggaacaacgccgccgagagggtgaaggaagcaaacaagttgtggtttgatgtagaattcgaatgaggaacaacaagctgaagaggaatatcaagttccacaagttgtggtttgatgtagaattcgaatgaggaacaaccctcaagcacgaggcaaagcagaggatgacggttgtggtttgatgtagaattcgaatgatttaaagatattgataatatgtagagtatgataaatctttcgtccacgcggatgaaccaggaacgtatgttttatcattccaatacgcatgtacgttttgctcggcaaatatctgatggatcgaatattaataatttcttgctcgcgtatcctttcatgcagaaattatattccgacgttggtcgtcgtcttttttaacagccttggtaaccgcagccgtaaccggcaaaagtatggcttcaagtaaaatctttgcagaaacctgagcgagcccgatgccgaccagcactgctgccggaagcctgccgatgaacgcgagcgggaggaacacgaggcagtcggacagctctccgatgcagctggaaacaatagcccgccatgcgaaaccgttcatgtcagaatgttttcttttcattcgcgcaaagactctgtcgttcacaaagtcaccggccacaaatgcaatcagtgaggctgcagttatccttggtgtgctgccgagcacggtgcggaatgcgtcctgattggcgaaggaatcaggataaggccaggaaagcgtgagctcaaatatcaggaccatgacgatgttcatagcaaatgcaatgtaacacgtgacccggctccagcgatatccatatacctccgaaaaaacgtccgaaaggatgtatgtcaaagggaaaagaatgacagatcccaccgtagcctgtccgaatggcaggctgatttgcttgttcacgatgatattactcagcagcaatgcgacggtgaaaacaacagtgagtgtcagctgcaaaaagctgtagcttgaattaactatactgtttccaagttggttctctttagaattggtattagtcttttctatcatatttcttgttgattttcaattgaatttcctcaccagggacaccgtgcctatttcgatgttgttgctcccggcatttgttatactcgtcctcttctgcagcaagaataacgagtttactccctttgatgcaagagcacaaacttgcaataatcaaagctgatataatgaaaagctttttcataacacacagacaaaagtagcgattttcctttacctatacatttcccgaccataagaatatgcattcctggaatccttttcggatactcagtgggttaatcacatccgttcagatggatgaattgaagcattatccgtatatttgcacagttgacaagacaaagaatggttttagattataatatccgattggaagagcctgccgactggcaggaagtggagaaccttacaagagagtcattctggaacgtttatcgtccgggctgcgtggagcatttcgtgctgaacagataccgcagcaatccggatttcatcccggaactggactttgtgatggaagccggcggccggatcatcgggcacgtgatatattccagggcagaactcacctcggacgaaggtgatgtgctacaggcctggacattgggtccgataagcatacatcctgaatggaagcggaaagggtatggccttgaactgctcaaattctcattagggaaagctcgcgaaatggggatcggggtgctttgtttcgaaggcaatatcgatttctactcaaaagccggtttcgtgcttgccagcagcctcggaattcattatcacgcagagccgaaggatgatcctgtgccatatttccttgcacaggagatagctcccggttaccttggaggcagggagtggacctactgccctccgaagggatactttgccgccgatgacgatccggaaggctttgagagctatgaggccgcattccccgccaaggagaagcatttccaggaaggacagctcccgcagttctgccagagctgcggtatgcctatggcatccgatgacgtatgcggcaccgatgctgacggaagcgccaacttcgattactgcaaatactgctatctggacggagaattcatagacaaggtatctatggaagaatacatcgaaatgtgttcgcagttcggtgcgcaggccgggatgagcaccgagcaaatgagggaacattgccaaaaacttttcccaatgctgaagcgctggagaaggaaatgagtcctgccccgaacataatatcagcttccagaggcattgctggattcacaatgctattttcccccgtcttcagcccttggttctgggcgctgtattgctggggaggaatctccgatatgattgacggggcgctggcgaggaaactcaactcggccaacgggacaggcgcggagattgacagcctggcggattaacaattgatttgcctttatgggtatggttgtggattgcggcaatcggatcatgcagacaacggaaactcgcaatcccgcattcggcgaccaataaactgactggcattcttctattctgcctgccgtttgcactaatccattttggagctctcatcccatctgtaacagtatgcgctatggcgacattcagcctgttggaagacatcctattcattcgttgtaagcctccgatgaagtacgtctcccggagcttgtaatgaacatttacctttgcatcaaaaaggaaagagctatgatgacaaaggaagaaatcgcagagatagtgtcgtactgcgaa

SEQ ID NO: 516 - DNA, 17727 bp, synthetic construct
  misc_feature 1..17727: note = Synthetic
  source 1..17727: mol_type = other DNA
acgcccgacggacgcctcaagggcgtggccttcgccccgggagccaacccgatgcacggccgcgacaagagcggcgccatcgcttcgctcgcctcggtggccaagatgcgttaccgcgactcgcaggacggtatttcgaacaccttctcgatcgtgcccaaatcgctcggcccgacggccggagagcgtatcgagaacctcgtgacgatgctcgacggctatttcaccaagggcgcacaccacctgaacgtcaacgtgctgaaccgcgagatgctcgaagacgccatggagcaccccgagaaatatccgcagctgacgatccgcgtctcgggctacgccgtgaacttcaccaagttgagccgcgaacaccagctcgaagtcatcagccgcagcttccacgaaaggatgtaacggcttgaaaagccgcttttaggggcgggcgcaggatttgcataccggaacccggtttgcgcccgaacccccttattcaaaaacaaggaacaatcatgcttcgtgtacattcttacgaatccatgggaacattcgacgggccgggactccggctcgtcgttttcctccaaggctgcaatttccgctgtctctactgcgccaaccccgacacgatcgaggccggagcgggcacattgaccgaccctgcggagatcctgcgcatggccgtcgaccagaagcccttcttcgggcggcgcggcggcgtgaccttctcgggcggggaacccaccttccaggccgcggaacttgttccgctcgtaaagtcgttgaaggaggccggcatccacgtctgcatcgactcgaacggcggggtgtggaacccggccgtcgaggagctgctggggctggtcgacctggtgctgctggacgtgaagcaggccgatcccgaacgccaccgcgccctcaccggacgcgaaaacgcgcagacgctccgcacggccgcctggctcgaagcccacggaaaacccttctggctacgctacgtgctggttccgggcatcagcgacgccgaagccgacatccgtgcgctgggcgaacgcctcggcggctacaagtcggtcgagcgggtcgaactgctcccctaccacaccctcggagtgcataagtacgaggcgatggggctggagtacaaactccgcgacgtgcgggagaacacccccgaacagctcgaccgcgccgcggccctgctgcgcgaatacttcccgacggtggtggtcaactgacccgaaggggacgtccgccggagggagtgcggacaaccaaaaatccgggacgccgcggcgaaaacgcacggcggtcccggatttttttcgtaccttcgccggaaatccatttctgcgacaatgaagaaccgacttcccgacctgaacgtcccggcccgcgaacgcatcggctgggtggacctcctgcgcgtgatcgcctgcttcctggtggtcttctcccacagctgcgacgccttcgtcgccgtgttcgacagcgaccgcgccaccttcctgcaaggagcgttggcaggcagtttcgtccgggcctgcgtgccgctgttcgtgatgatgtcgggcgtgctgctgctgcccgtgcggaccggaacgggggctttctaccgcaagcgcatcggccgcgtcctcctggcgctggtcttctggtcgctgacgctgcccgtgctctactacctgtatatgcgctacgtcgggacctccagcccgtcgatcgaccccgcgctgttcaccggcgaagcgacgctgcacaagatgtggaccttcgtcttcaacttctgctacgacaccacgccgctctggtatctctatatgctgataggactttatctgatcatgccgctgatcagcccgtggctcgaacgggcctcgcggcgcgagttgcagagcgtcctcgcgatctggggcctgacgctgctgctgccctacgtgaagatgctcgccccggcgctcggctacacgggcaattacggcaacacggggctttacggcgtctgcgactggaacgggttcggcacgttccactacgtctcgggcttcgccggttacctcgtactggccttctacctcgtgaaattcccgcccgcatggaactggcgcaagacattgggcatctgcatcccgaccttcctcgccggatacctcgccacggggctgggttacgtggtgatgcagaaacattttccgggcaactacgcctacctcgaaatcgtctggtatttcgccggcatcaacgtctttatgatgaccgccccggtcttcatcctcgtgcagaaggccgccgcacggccccgcgcatggctctcgcggctggcgggcgcgacgttcggcatctacctctgccacttcatcttcgttcaggccggctacgacctcgtgcagcggattccgggacttcccgcgctggcgcgcatcgcgctgatcgcctgcggggccttcgccgtgagctgggcggtggtgcggctgatgcagcggtggagcgtgacgcgccggctggtggagtaatgcgctaccagcactcggccttgtctttcaattcgggaatccggtctttcgtgaagaccggatttttgatgccctgccgcttctgggccgtgtagtcggccagcagcaggaaggcctgacggcccagcagcacgatcgccgccagattgcacagcgtcatcagcgccatcgtcacatcggccaggctccatgccagatcgagcgtcgccaaggatccgaagagcaccatcgcgccgaccagcatccggtagagcgtcagcgcccacggccgcggagtgatgaagcggatgttggcttcaccgtagtaataattgccgataatcgacgaaaaggcgaacaggaagatcgccacggcgacgaacaccccgcccgcgggaccgatctcgctctccagagccgcctgcgtcagctgaatgccgttgagcgaagcgtcgggaacgcccccgaacaggatgatgaaggccgtgcaggtgcagatgacgagcgtatcggtgaagaccccgagggtctggataagtccctgcttcacggggtgcgaaacgtgggccgtggcggcgacgttcggggccgaacccataccggcctcgttgctgaaaagtccccgcttgatgccctgcatcaacgccgcgccgaccgcgccgcccagcgtctgctcccagccgaaagcgtcggcgacgatcagttccagcacttcgggcagccgcccgaggttgaacagcacgacgcccagcgccagcacgatgtaccccagcgccataatcgggacgatcacgccgctgacacgcgcaatgcgccgtatgcctccgaagatgatgagcagcgtcagcgccgtgagcacgacgcccacccacacatgatcggcgccgaaagctccctcccacgcggcgcagatcgtgttgctctgcaccgagttgaaggcgaatccgaaggtcacggagatcagcacggcgaacagcacgcccatccacctccgcccgaggccgcgttccatgtagtaggccggaccgccgatgaaagagtccctgccgcggcgtttgtaaagctgtgcgagggtcgactcgacgaaagcgctcgcggcgcccacaagggcgatgacccacatccagaagaccgcgccgggtcccccgacgacgatggccgtggcgacgcccgcgagattccccgtgccgacgcggctggccagcgacacggcgaaagcctggaacgacgagacgtgccgctcgcccttcgggccgcttccggccgactcgcccagcacgcgcatcatctcgcccagcaggcggaactgcacgccccgcgtgcgcagggtgaaccacacggcacaccccaagagcgccgcgaccagcacataggtccacagcacgtcgttcacgccgccgatccaacgggaaagagtctccatcagcatactttacacgatccgacagcaaagttaatgctaaaacgcattttccgccggacattcgccggaaagatgcggcgcggcacgaaaaaaacgccccgcctgcgcaggggcgtccgtcgtcaccgcgcccgcagggtatactccccggcccgctccgtaacggccttctgcaactccccgaggccgacttccggcccggagtactccacggcggccaccggagggtccagcgtcacgaccgccttcacgccgtcgagggcgttcagcgcatgttccacatgcatccggcaatgattgcacgtcatgccgtccacgataaattcctttttcatcttttcttcggtttcaaccggttcgtcatgttcacactcatcgccgatccgccggcgtttcagccgcaagctgttggccacgacgctcacgctgctcaaggccatggccgccccgccgatcatcgggtcgagcagaaacccccagaggggatagagcgccccggccgctacgggaatggcgacgaggttgtaaatgaaggcccagaagaggttctggcgaatcgtccgcacggtgagctgcgacagccggatcatctccgggattttccggaggtccgacgagaggatcgtcaccatcgcggtatccatcgcaatgtcgctcccccgccccatggcgacgctcaaatcggcctgcgcgagagccgcgctgtcgttgatcccgtcgccggccatggccaccgtccggccttcggactgcaactgccggacgaatccggccttttcgtgcggcaggacgcccgcccggaaacgggtgatcccggctttccgggccgtttcgcgcgccgaaccggcgttgtcgcccgtcagcatccagaccgtgatgcccagcgcgtgcagccgggcgacggccccggccgacgagggtttcagcgcatcggcaagggcgagcacggcgagcgtccgctcctcatcggcgaaccaaaccacggtcttcgcctcctgcatccacccttcggccagccgttgcagacgggcgtcgggcacgatgccgtggcgggacagcagcgcgtcgttcccggcataccaggtccgcccctccgcgacgccccggacaccctgtccgggaatgctttcgaacccggtcacgggaacgtcccgctccccgccgagcgattcgacgacggcctgcgaaagcggatgccccgagcgtttttcgaggctgaacagaatccgccgcgccgtctccggcccttcggtccacgcagcgtccacgaccgacggacggccttcggtgagcgttccggtcttgtccagcaccacggtgtcgaccttccgggccacctccaggctcgcagcgtccttgacgaggatgccctgtccggcgcccttgccgatcccgaccatgagggccgtgggcgtcgccagacccagcgcacaggggcacgcgatgatcagcacggtcaccagcgccagcagcccgcgggtgaagccctcctccggcgcgaaaagcatccacgccgcgaaggtcagcacggcgaggacgatgatggcgggaacgaaaacgccggcgatccggtcgacggtccgctgcacgggggccttgctgccctgcgcatcccgcaccatgcggatgatccgggccagcaccgtgtcctgccccaccctgtcggcccggaaacggaacgcaccgttgccattcatcgttccggcgaacaccgccgcaccctcctgtttgcagacggggagcggttccccgctgagcatgctctcgtcgacatacgacgcgccttcggccaccgtgccgtccacggcgatgcgttcgccgggatgcacggcgaccagatccccggcgcgaagctccgcaacgggcacggagcgttcgcccgaaggggtgatcaccgtgacggttttcggttgcaggcccatcagtttcgcgatggccgtcgtcgtgccgcgtttcgcccgctcctcaagcagccgccccagcaggatgaaggcgacgatgacggccgccgactcgaaatagacgtgcggctcgatgcccctcgacagccagaattccgggaaaaacaggttgaaaaggctgaacagataggcgattccggtactgacggcaaccagcgtatccatgttggccgccccgtggcggagctgtttccaggcgttgacgaagaactcccgtcccagtccgaaaacgaccggggtggagagcgcccacacggcgtatttcacggccggagcgtccatgaacagcatgcctccggccacaatcggaagacaaagccccgccgcccaaagagtccgccgtttgagcgcccggtaatgcgccgcacggacgtgcgccgcctcgtcctccgccgggccttccgcgtcggtcagcaggtcgtaaccggccgcctgcacggcccgcttcagcaccccgggagagcactcccccggacggtagtccacccgcgccgtagcggaagcgtagttcacatgcgcagactcgacgcccggcaggccgttgagcgccttatcgacccggactgcgcacgaagcgcagctcatgcctgcgaccgggaacgtattcgtgatgatcttactcttttccatgggaacaaaggtaaggtcccgacacgctccgggtgttacagaattatggatatgatttatacctacacttcatccagcggtttcaggccgcgtcctttcagccggcggaattcagtgggcgacatcccggtctgggcgcggaactgggcgctgaggtgcgccacgctcgaataacggagtttgtcggcgatctcgctgacggtcaggtcgccgtaggccagcagttccttgacccgctcgatccgctgggcgaggaagtatttctcgatgctgatgccgttgacctccgaaaagagcttgctcaacgcactgtaatcacggtggcagcgttcgcgcaggtaatccgacaggttgactttcgaggcatcttcgctgtaatgcaccaattcgatcacggccgtccggatctgctcgatgaggcgcatccggctgtcgtcgatcagttcgaacccgtaggcttcgagcagtttgcggaacgcctcccgctgctcccggccgggcttctcctgcacgacgaccgttcccagtccgacatcgaggggcgtgaaccccgctttttcgagcagccgggtgacgaccagaatgcagcggttgcaaaccatgtttttgatatgaaagacgttctcccgttccataaccgcattcgttttatccgtaaatataacacaaaaacgattccgtcccgccgaccgtcttccagcctttcaggttccggccgttgaaaagcgtcggccacgggacctgcgctccgacgaaggtgcagggtccccaacagtgcaagagtctctttttcctatcagtcgggcagttttgatcgtacgaatatagtctatttttttcgggtcttcagcctgtccccctgcaaaattaacctctgacccgctccgtattccgaaaaagtttcgtaacttcggcacagcaaacccatagacgaagccatgaaacatgcgcacatcctgctgctgctcccttgcggcatgctgccgccgctcgccggggcgcagcgcacggagccgcccgaccggttcgacatcgcaccggaataaccaccccgaaaacaagcaaaccaaccaaaaacaaccatgaagaaaaccgcaatcaccctctttttcctgcttcaggccgcgtgtctgttttcgcagatcccccgcccggaatatccccgcccgcagttcgagcggacggactggatcaacctgaacggcgaatggacctacacgttcgatttcggcgcaagcggcctggaacgcggctacgccggctcgaagggattcgacggcaaaatcatcgtgccgttcgccccggagagcaagctctcgggcgtcggccacacggacttcatcggccgcatctggtaccagcgtacgatcgacattccggcagactggtcgggacgcaacgtgatgctcaacttcggagctgtgtactacacctccgaggtgtatgtcgacggccgcttcgtcggccgccacttcggaggcagcacgtcgttctcctacgacatcaccgcattcgtgaagccgggcggcagccacagtctggtcgtcttcgccacgagcgacctgcgcagcggcaaacagactgccggcaaacagtcgctgcaatacgcctcgcacagttgcgactacacccgcacgacaggcatctggcagacggtgtggatggaggccgtggctcccgaggccctcgcacgcgtccaaatgacgaccgacatcgaccagcagcagctgatcgtcgccccgcagttcttccgggaaagcccgaacacgctccgggtgacccttcgggacggcggcaaggtcgtcggcacgcggcaggtccgggcgtcgaacagcagcgtcgtcgtcatcccggtcaaaaaggcccggctctggagtcccgaagacccgttcctctacgacctgacctacgaggtggtcgcccccgacggccaggtgctcgacgccgtgaaatcctatgtcgggatgcgcaaggtccacatcgaaggcaacaaaatctacctcaacaacgaaccctattaccagcggctggtgctcgaccagggtttctaccccgacggtatctggaccgccccgtcggacgacgccctgcgccgcgacatcgagctgggactggccgccgggttcaacggcgcacgcctgcatcagaaggttttcgaggaacgctactattactgggccgacagactcggctacatcacctggggcgaaagccccagctggggaatggatgccaacgacgtggagacggcccgcaacttcctctccgaatgggccgaatgcgtggtccgcgaccggaaccacccctcgctgctgacgtggacgccgatgaacgaggagtggtggcccgacaacacgcagttcccgcgcttcgcctccgacgtctacgacctgacgggacgcctcgacccgacgcgccccgtcaacaccgtcagcggcggcgccgtcgtcaggaccgacatctgggccgtccacaattacgagcagaacccggccaaactgaaagagaaaatcttcagcgacggcacgttcttccatccccgcctgcggacgacccgcgaccagacgcgcaacatcggattcaacgaggtgaaggcgaccgcaaactacgcctggccgcagtacgatggctcgtgcccctacctggtcgatgaattcggcggcatcaaatgggtgaaggaccaggagaagcaggccacggattcccagaccgaatcgtggggttacggacaggcgccccgtacgctcgaagagttctacacgcggctcgaaggccaggtagacgcgctgctctcgctctccggacaggtgtggggctattgctacacccagctcacggacgtggaacaggaacagaacggcatctattgctacgaccgctcggccaagttcgacatggaccggatcaaggccattttcagcaaacgcccggaacatcccgcccgataacgcgccggacagccgcccgcccgaatgaagcgcaccccgaaaatccggaaagggatttcggggtgcgctttttatccggttcgtcatcgtccgcccgcggcagagcctcgtgcacgaatgcgcccggaaacagaaggcgtcgctgaatttctattcgcgtgttttcccggtttcagagtctcgatataaagtattcctgcatattccaacgatatgcccttgatgaacgctgcaattggagatgcttcatgtcggtgcgtcgcacggcgagtggcggacggtccgacatgcgaccttctgttttcggcaccatgaactcccgaaggcaaaaagccacagcgccggcacactccgcaatagcaaccgacggtttttaaattattcacgaaatataaaaaaagtctccacggagtacgcggagacaataggttgaaaaccttcggcatatagccttattgtgataagatgtagaattcttacaccacaaatatagtaaaaaaagatgaatttctgcaattttttatttaattttacagaaaacactttcttcatatggcaaaagtattgggtttggaccttggcaccaactcactgggatgggcccttgtcgatgaatcggagaacgaatatacgctgattgacaaaggtgtagacattttccaggagggagttgcccgcgacaaaaacaatgaaaaacctgccgttcaggatcggacgagcgcccgggcactgcgccgccactatttccggcggcgtctgcgaaaaatcgaactgctcaaaatactcatccgttacgacctttgcccgccgttgcccgaggagctgttgaccgcctggcaaaaagagaaacgttacccgcaggacaatgaattcctccgttggcagcgaaccgacgacaatggggatcgaaatccttaccacgatcgttatgtagccctgtccgagcggctcgatctcgggaatcgcacacagcgctggctgcttggccgggcgctttatcatttggcacagcgacgcggattcctcagcaatcgcaaggaagcaggaaatgagaaagaagacggcacggtcaaggagtgtatcaaaaatctgtcggctgaaatagtagcggcagggtgtcggtacctcggagaatatttctacggactgtaccaacacaaggaacgaatccgcgacaaatacacctcgcgcaacgaacactacctggccgagttcaatgccatctgcgaccggcagcaattgcccgacgaatggcgtaaggcgctgcatcgggcaatctttttccagcgcgacctcaaatcgcagaaggggtcagtcggccgatgcaccttcgagccgacgaagagtcggtgccccgtttcgcatccccgttttgaggagttccggatgctgtcgttcgtcaacaacatccggattacaggaccgggcgacaatgctccacgacctttgacacaggaagagttcgagacgattcgttcgctcttcttccggaaaagcaagccttatttcgatttcgaagagatcgcccgcagaatcgccggcaaagggaaatatgcctgcaaagaggagcgtacagaagctccttatcgtttcaatttcgcccgcacggccaccgtatcgggatgccccgtcacggcatcgctgcaagcgatcttcggagacgactggattacggagattcgcagcctttacctgcttggagcaggaaaaaacgaggaccagatgttgaatgacgtatggcacgccctcttttcgttcaacgacgaaggtcggctgcgtagctgggcctgcgaaaaattgcaactcacggatgaacaagccaaagcgtttgcagccatcaaactcccgcaggattacgcggcgttgagcctaaatgccatcggcaagattctggtctatctgcgctgtggctatcggtacgacgaggcggtattcctggccaacctgcgggcggcacttccgaaggaggtctatgccgacgaaagccgtcggcatgaaatcgaacaggacatcgcctcgctgctgcttgactacaagcgaaatccgtataacaagttcgattcaaaggagcaccgcattgccgactatttcagcgatcatggattggatgcctctcgtctgatccgtctttatcatccctcgaaaatcgagacctatccggatgcgcaacccaaggcaaatggcattctgcaactcggctctccacgtactgcgaccattcgcaacccgatggccatgcgggccctgttccgattgcgcaacctgataaacacgctgttacgcgaaggcaggatcgaccgagacacgaagatccggattgaattcgcccgcggactcaatgatgcgaacaggcggaaggccatcgagcagtatcagcgggaacgggaggttgagaatcggaaatatgccgaagagatccacagccagtatgccgccgaaaccggccgcgagataaaaccctcggacgacgaagtgctgaaataccggctgtgggaagaacagcagcacgtctgtccctataccgggcggcaaatccgcatttcggacttcgtcgggtcggctccggatttcgacatcgagcacacgctcccgcaggctcgcggcggcgatgactcgcagatgaacaagacgctctgcgaaaaccggttcaaccgggagacaaaacgggcgaaactgccggccgagttgtccaaccatgtcgagatcatggagcggatcgaatcgtttggttggcgggaaaaaatggagagtctgcaaaagtagattgaagcccaggttcgcaggagcaaaagcgcagcgattaaatccgaaaaggacgacgccattcagcgccgtcactatttgcagatgcaactcgactactggcgcgggaaatacgaacgcttcaccatggccgagattcccgaaggattcagcaatcggcagggagtcgacatcggcatcatcggcaaatatgcacggctctatctgaagacggtttttgaccgaatctatacggtcaaaggttccacgaccgccgcgttccgcaagatgtggggactgcaggaggagtatgcccgcaaggagcgcacgaaccacgtccaccactgcatcgacgccatcacgatcgcctgtatcggccgccgggagtacgaccgctgggcgcaatatgtcgccgacgaggagcgatacggctacggcgaaagcggcaaaccccgcttcgagaaaccctggccgacctttaccgaagatgtcaaggcggcggccgacgaactgctcgttgcccaccacacgcccgacaacatgaccaaacagacgcgcaggaagttacgggttcgcggccggataaagttgaatgccgacggggaaccaatctaccagcaaggagacacggctcgctgccggttgcatcaggataccttctacggcgctattaagcaggatggagagatccgctatgtcatccgcaaatcgctcgcgcagttacagccgacggacatcgacaagattatcgacgatgcagtccgggatcgcgtacgggaggcaatcgacgaggtcggattcaagacggcgatgaatcccgatgaatacacgatctggatgaaccgggaaaagggcattcccatccgcaaggtgcggatcttcacaccgagtgtcaaacatccgatcgcgctaaaaaaacagcgcgacctatctgcaaaagagtacaagcgggattatcatgtcgtaaatgaggggaactattgcacggtcatctatgagggccaggacaaaaagggcaaaacgaaacgcacctttgaactcgtcagcaacctcgaagctgcccaatatttcaaagccagcgctgaccgggaagcccgccccgatctggtaccgcagaccgacacgaacggtttccccttgaaatacatcttaaaaacggggaccatggtcctgttttatgaaaataccccggcagaactttatgaatgtacccgcaaggagttggtaaaacgactctacaaggtaacagcaatggctgcagaaggacgggtacagttcctctttcatcaggaggcccgagatcagaaaacacttacctccttatatggagctgggacctctcaattctgccaatccaatccatcaccgaaattgcgcctcagcgtttccaattttaacatgttggtggaaggttatgatttcgaactgaccgtaacgggcgagataaaattcaaagatgaccggccatgctgaaacgaaccttgtttttttcgacaccctactgtttgagcctgcgcaacggccagatgatcatccacacgcgcgaggcccccgaccaacggaaaagcatcccgatcgaggatatcggcttcgtggtgctggaggaccagcagacctccatcacgctgccgctcttgaatgcgctgtcggacaacaacgtggcagttatcctgtgcggagagaaccgaatgccgaacgccttgttgatgaatttggattcaaacagaacgcaaggtgaacattatcggatgcagatcgctgcatccgaaccgctgaagaagggcctttggaaacagatcgtcgagaccaaaatccgcaaccaggctgccttgctgcggaagctggggtatgacggagacaaactgaaaccctgctacatgaatgtcaagagcgccgacgccgacaaccgggagggcatagcagcgagaatctactggtcagaactgttcggtgccgaattttaccgttcccgcgaaggttcgccgcccaacaacctgctcaattacggctatacgatcctgcgagccgccgtggcccgtgcgatcatgggctccggactgttcccagcattcgggatcttccatcggaatcgttacaactcctttccgctggccgatgacgtaatggaaccctatcgaccgtatgtcgacgaattggtctgccaactttacagaaacgggaatacacaactgaccaaaaaggtgaaaggcgaactgttgcggctcctgtttgtcgatactcgtttcgacaaggttgtgcgacctctcgaagtaggacttatgttttcagcctcttccctggctaaatgctttgctggaacccaaaaaaagattgcatatcctttattggagtagtcgaatgtcagaagtacgcttgaatgcttatcgaatcatgtggttgtttgtcttttttgatttgccaaccaatacaaaaacggaacgacgtcatgcggtgcaatttcgcaaggcgttggaaaaagatggtttcacaatgatgcagtattcagtctatgtgcgccattgtgcatcgaaggagaatatgcaggttcacattaagcgggttcgacgatcgatgcctccgacaggatttacaagtattcttgctgtaacggacaaacagtatggagacatattaaatttttggggtaaaagcgaacgagcaaaaccggaaattccgcaacaattggaatttttctgataaatcgttattttcgttctttgaaatacggaaaatgcatcaaactggcttcgtcggaacacccgatcgtatttttatagtggcagacagcccgtaagtaacactttatcaatcaatatgaggcccgacgttgtggtttgatgtagaatttcgataagatacaacggcaatcctcgcactttccacacgggatcagttgtggtttgatgtagaatttcgataagatacaacgagaagatcaagcaagagatgacggttcttgttgtggtttgatgtagaatttcgataagatacaaccttgaggttctgcgaattaagccttatccggttgtggtttgatgtagaatttcgataagatacaacgccatcggaaagtttagtggagcgctgctgttgtggtttgatgtagaatttcgataagatacaacagttccgtcatggtgtagcagaaggtatggttgtggtttgatgtagaatttcgataagatacaacaatatcattcgcatgatgagcatgtccagggttgtggtttgatgtagaatttcgataagatacaacgtggatcaagttccgaaaaatgaaagacgtgttgtggtttgatgtagaatttcgataagatacaactggtcgcactcgaaaactgctccgggagcagttgtggtttgatgtagaatttcgataagatacaacccatatgccacacagacgaggggcgagtcgttgtggtttgatgtagaatttcgataagatacaactcatgcaccccaacacggtactgagaatagttgtggtttgatgtagaatttcgataagatacaacctaacaatttaactcacatgtagtatgccgttgtggtttgatgtagaatttcgataagatacaactggaacagcaagcgggttgctgcgaacgtcgttgtggtttgatgtagaatttcgataagatacaacaggagtggcctatcttgtggcgaacccgttgttgtggtttgatgtagaatttcgataagatacaactgcggcacggtcgtctattccgtgactccggttgtggtttgatgtagaatttcgataagatacaacaacgcccggagccgggaaacctcgacgatcgttgtggtttgatgtagaatttcgataagatacaacccgcattcggtaagattgatttatgggtgagttgtggtttgatgtagaatttcgataagatacaactccgtctcccgttagatttgttcgcttcatgttgtggtttgatgtagaatttcgataagatacaacacctatcccgagacatatattgcggggatagttgtggtttgatgtagaatttcgataagatacaaccttcttgagttttagcaatgccgctacctagttgtggtttgatgtagaatttcgataagatacaactcatccctccgcaaagcgtcgggggcgtgaagttgtggtttgatgtagaatttcgataagatacaacgtgagggcattgaatatcgctatgccggcggttgtggtttgatgtagaatttcgataagatacaacttatttctcaaaataactacgacgcgtaaagttgtggtttgatgtagaatttcgataagatacaacctgatgtagtgccgtatggtttacgatttggttgtggtttgatgtagaatttcgataagatacaaccgtgctcgcgcacttagggcatcgatgaagttgtggtttgatgtagaatttcgataagatacaacataattgatccgcttctcaaagtcgaaatgttgtggtttgatgtagaatttcgataagatacaacaagagaggcgacaggatagccactgccggcgttgtggtttgatgtagaatttcgataagatacaacggcagtcttcacacttgccgcaggggaccagttgtggtttgatgtagaatttcgataagatacaactctgatagcgggcaaaaaccttcgaagggtgttgtggtttgatgtagaatttcgataagatacaactccatatctttcatgtagaaatcatacatcgttgtggtttgatgtagaatttcgataagatacaacgacataagcgaattaggataagcgcgagagttgtggtttgatgtagaatttcgataagatacaacaccttgggatgtggctcgccagtggctcatgttgtggtttgatgtagaatttcgataagatacaacataaagtaaattgtatacatttgcagtgtgttgtggtttgatgtagaatttcaataagatacaaccggcagtattggaatgctgcataattgcaactgttgtttacattacccttttgactcaagaagatttcaaactcccttaaatacgtcaaatccaattcatcaaaacgcatattgaccgagcggaattgcgacacaaggaccaacgttaccttatgtttgctggcggaactgtacttttcgactttttccaagcgttcgataatctgtttgaagtactccccgaccgtgcagttgattcgtttgccgttctgttcaaacagcgtatcgaatgtaacgggaatttccagcacctccaactttttgattttcttctcgtattcacgtatcttggaggttatttgaaactgtatttctgctctatcggggcagtcggcggtaggttgttgcttgtcgaaatcccaatgcaccaaagcttccgaaatgcccagaccgacgaacttacggcggcggtcatgggtaaagacaagagcaagaggggctaaacggtttctgttgatagcgtctctgcgacatacgacgttgattgtcataatctttacggattacgcaagcaacaaaatgcgattcgtgt

SEQ ID NO: 517 - DNA, 15604 bp, synthetic construct
  misc_feature 1..15604: note = Synthetic
  source 1..15604: mol_type = other DNA
tggatggagtcggctatgataccgccaagcatcctatggtgggaacgaaggacaatcccgttcccggagtcaggttcaagtatggttccaccggtgcggctccattgggtggcggactgttctttttgtccgagaatggccgtgatcctaagacaggggttcagaattgtaacgccaggctctatcagtgggacggcaacggctttaagccggccagctagtctgcaggcgttacgctcaggtcgacttttccgggcactccttttacgatggccttgtcggtgaactgccagtaagtccattccttgtgtgaaggagtatccttctcatagtgggctacccagatagggtagccttctcttatctccttgcccaggtagtccttgatgaaagaggaactggcatagaccagcggctttttcccatagtgcttttccacagtcctcagccaatccagagccctcctgttgagaagatcctttgagcatcctaaatgtacagtctctatgtccagcacgggagggaggtccttgtagcgcatgtctccgactgtggatatgaaattcctggcttggaccaccccatccttggaacttctgaaaaaatggtaggcaccccttctgagaccggattttccggcttccttccagttcttcttgaaatcgctgtctttgaatgaggccccttcggtagccttgatgaatacgaactccacaggaaatatgtccttagctctgtatggatcctttaccgtacgcttcctggaatcggtcatgacgaagagggaatcccagacgatcgggccttcgttgttgtgggagatgtcgatcccgaacctccagttgccggggggaatcttcgccccggtttcggaaccatcaccccggttccatggcattaaaacgaggacaagtaccagcaagatagcagctgccgcggccaaagcaacaaaggggctgactttgaccttgcgggccttcttcttcctgcttttcttatgggatgccatattcttggaataatggctacaaaattacttatttttgctatatttgtcattacggcacttttgccgggaaaactttttttttatggaacttaaaggatcaaagacagaacagaacctgcgcaccgcttttgcaggagagagccaggctcacaccaagtatctctattttgcttccaaggccaagaaagacggctatgtgcagataggaaagattttcgaggaaacggctaagaatgaaaaagaacatgccaagatctggttcaagctcctcaacggcggttcggttccctgcaccaaggagaacctggctgctgcagccgacggcgagaacttcgaatggactgacatgtacgccggattcgcggctactgcccgtgatgaaggcttcgacagcatcgcggacctctttgaaggagtcggcgcgatcgagaagtgccacgaagagcgtttccgcaagcttcttgggaaagttaacgaagccgttgtcttctccagcgatgaggatgcgatctgggagtgctccaactgcggccacatcgtcatcggcaagaaagccccggaagtatgcccggtctgcaaccatccacagagctatttccatctcagcgctgaaaactattaatccttatcagatatgaagacgaaacttatcatcatcgctgtcgcggcagcactgcttccttctgctatctgggcccaggtgaggcctcagatgccggagcctgactacaagttcaccgttgtcaaggaactccccatcacctccatcaagaaccagaacagctccggtacctgctggtgcttctccacgatttctttcctggagtcagaagtcatcaggataaagggaatcaaggatcaggcacagtatcctgacctttccgagatgttcgtggtttcaaggtcctacaaggacagggctgagaaatatgtccgcctggatggaaatctcaccttcggagccggttccgaggctgacgatgtgctcgacgtcatccgcgactacggtatcgttccccaggaagccatgcctggaaagcagaagcttcccatccatggtgaactcgacgccgtgaccaaggcatatgtcgaagctatcgccaagaagcccaacaggggcagcctctcagagaactggaaagccggattcgatggcatcgttgataatttcctcggtgttcctccgacttcattcgaagtcaacggcaagacttacactcctgaatcctacagggatgagcttggaatcgtgcctgatgactatgtgaccatcacttccttcactcatcatcctttctacaccaagtttgcaatcgaagtctgtgacaactggaggtgggataccgcttacaacgtgccgatcgatgaattcatgcagatcctcaagaatgccgtcgagaatggttacacggctgcctggggctccgatgtttctgaaagaggattctccaggaacggtgtggcagtccttatcgatgccgccgccgcaatccctcagaccgaccagcagcgccttgtcggagacggccctgcacaggcccagaaggccgaggtcaagattcctgaagagatcaagcccactcaggagtacaggcagaagtgctttgacgagatgacaaccaccgatgaccatggaatgcacatcttcggtatcgccaaggaccagaacggaaccacctactacatggtcaagaactcctggggcgagagcggcaagtacaagggaatctggtatgcatcagagaacttcgtcgccggcaagtccattgacatcgtcgtccacaaggatgcagttcccaaggacatcaagaagaaacttggaatcaagtaaatgaggcttaagaatctcattccgaacattatcacctccatgaacctcctctgtggggtcgtgggggtgattctttcattggatggccacctcgaaggcggtttctgcctgatgctggcagctgctgtctgcgatttcttcgacggctttgccgccaggctccttaatgcgacgtcccctgtcgggaaggaactggattcattgtcggacgtggtgagtttcggcgtgctgcctgccatcatgctctatatggtaagtggggatggcgtcaggttcatgaagttcttcccgcttttgcttgctgccttttcagcctacaggctggccaagttcaacctcgatgagcgtcagcacgacagtttcatcggtttgccgacacctgcatcggcaatgatctgcggctcccttgcctgctatgtacagtcagtcccgcacagtttccttgccggatggacttcctcgccattcttcatccctttgctgaccatcgtcttgtgtttcttgctggtttgcgagattccgatgttctccatgaagttcgggggtgggaagaaatcttccagggcagataatgtcaagcggattacattccttgcattggttgccgccagcctggtactgatcattgtgacgcgctctcattggtcgatggctgtcctgctttcatttacagcctatgtgcttgtgaatctgttgctttctcgcttaaaaggatgactcctgacgggaaaaaggtcattttgtacgtccatggcatgggcggaggcggcgacagccggattccgtccattctgaaagacagcctgggcccaggtttcgaagtcgttataaggacttatgatttcgatcctgagatagcccggagacagcttttttcatgggcaggtgaagtcaagcccgacctcgtcatcggagagagcatgggagctacccatgcgatagccttgaaaggctatcctcacatcttcgtttctccatccctgaatgccccgcgcttcttcagggtattggcctggctttctttcattcccggagtcacgcccttctttgacaggcactataaaccccgggaaggtgaccgccagaagcttcatttcgccccgcggactctactgaaatggaaggaagtctaccacagtgccatgttgaacacgccccttaacggtagcgcggatagtttctatgcctttttcggcagacacgatgccttccggagaagcggggtggtgctggtcaggacctggaggaagtatttcggagacggtacctggacaatctatgacgggagtcatttcatggaagaggaatatatccattcactcctcattccgaaaatcctttcaacgctgaagtaatattctccatggccgtttccggtacgagagcttcttgcagcgttgaatcttcaggagtagtctggattaccgcatcgaaaccggcagattcaaggatttccaggtcacggacctgacctgccgccaggactaccttggtctttctttcatcgccacactcggagtcatatttcctgacatattcaagtaccccgtaagggaccttcccacgaatggtttgggcgtcggcagacccttctcctgtgataaccaggtcgcaggtgtcgagtgcatgccccatgcctgcaatgtcgaggacatgccatattcccggattcatggaggctccaaggcaggccctcatggcgccgccgattcctccggccgctcctgatcctggaatctgccttatctcccggcctgaaaaccttgagtaaacggtgcagagctgtgccatccagttgtcaagtgcttcgaccatttccggaccggctcctttctggggcgcgaacatccttgctgcgcctcctgtcccgtggaatggcacggagacatcgtagaacccggtcacccggcatcgggaaagggccttgtggcggtgtgacgaatcaatgccgattatgttgcccagtacggtgtgcccttccggaaggattccgcctgatgtcatgaatttgtagccgatggcttgaagcataccggtccctccgtcacatgtggctgttcctcccagcccgagccagatttcatctacgccttcatccagagcgtctgccacaagttcacctgtcccgtaactggtcgcggcaaggggattcagttcattccgggacaataatccaagaccgctggcgctggctgtgtcgatcactgccaccctacctcttccgaccagaccgtaagaagccactacgctccttcccaacggatcagaacaccttgcctgcttcatctcgcctcccagtatgcgggtgactatcgacgaaaaaccttctccaccgtcggacacagggatagagatggtttcaccttcaggaaacgccttgcttgcggcggattcagcctgttctgaagtcaggcaccccttgaatgaatctatggccagtattgctttcattttctgcagagctgtcttcaaagatagtgaagattttgtatctttgtggcatacaattccaaatagcagtgaaaaggtttatagcagtactcatcgtccttgctgccttggcagccttgtcgtgctccaggagagtggagaccggctatgatgccttgaggctggtggatgctcttgtggcagattctcttccggctcttcaggaacttgccctccaggcagggaagagttccggcacgatcgtgcttgtcggggatccggtccgttgccttgaattgagcgaagacatgatgggcttcgatgaatatgacaatgtggatgccaggagagtcaaggatggccttccggacttcgcgggcgagaccatcgtttcgctgcttgatttcgccaatcacccgtatgattccctggctgcttctgaagaaggcaggcaggcattgcgcgaaatagctgtgaggagttccatttcagcaattgattccttatgccgttgcaaggtactcatcctgtgttctcctgaacttgctgtcagaggaggagatgatgtgtcggatttctttgaaaagatcggatgcgacgtgcctgtgatctattcggctgacagtactttttctcctgcagctgagtgttttgaaataatgcgtgaaaagaatctttttacacataacatctcatggcccgtggccaggttgctgatgaccttgccttcagatgcaggcaggccttcctcattcgtgggattcgaagactcactcgtgcctgagtcattcgcagacaccgtgggaatccttgctcccaacacctttgtttcttatgtacagaataagcattagtcctgaagatatagaaaagctggaacctgcgagtttccctggaaaaatcaaagtcatagatggattcggcctggacttcctcaaggccgtctcttaccttagaaagcaggaagtgataggattcgacacggagtcgcgtccatgcttttcccctggacaacctcattacggggtctccctgcttcagctttccggcggcgacaaggctttcttgttcaggatcaagctgatgggaggaataccgaaggccttgagggccatcctttccgatgaacatatcctgaaagtcggtgctgcggtgaatgatgatgtgcgggggctgatgaaacatcacgacttcgaagcgaagtctttcgtggacctccagaagattgtctgggaatatggaatcaaggacaagagtgtcaagaaaatggcagccatcatcctgggaatccgtatctctaagacccagcagctttcaaactgggaggctgaacgtctttccgatgcccagcaggcctatgccgctacggatgcttgggtgtgccgtgagatgtatctgaaactcatggcctccgaaaagaatcctctgactcctgagcaaatgttgcccaatccggcgaaaaacacagaaaagaatgataaaggtcatactcaagaagggtagggaagagtccctgaaaaggtttcatccgtgggtcttttccggggcgatcgcccagatcgtaggtaatccacaggagggagatgtcgtgggtgttttcgcgcacgacggttccttcctggcttatggtcattaccagattggctcaatagctgtcagggtgctcagtttctccggagaagatgtgatgggacctggtttctggaccaagatgatctcccgggccttgaaggtgaggacttctgccgggctgacggattgcaaggaaaccaattgcttccggcttgtccatggagagggggatggccttccgggacttatcgtggactggtatgacggtgtctgcgtcatgcaggcgcattcagttggcatgttcagggccaggaccgcgatatgcggtgctctcagggaggttttcggagactctctgaaggctgtctatgacaagagttctgggacggctccttttaaggctgggcttgaccttgtggatggctatctctataaggctgatggtttctccgatgatgaacagatggtccttgagaacggcaacaagttcctggtcaactggacggaaggtcagaagacaggttttttcctggaccagagggagaacagggctttggtaggaaagtactcaagggggaggcatgtgcttaaccttttctgctataccggaggtttttccgtttatgccttgaacaatggtgccgtgcatgtcgattcggtggacagttccaggaaggccatggacatggttgccaggaacatgtccctgaacggtttcgatccttccatgcatggagaacagtgtgtggatgcaatggatttcctaagggaggttcctgaggacaagtatgatctcatgatagtcgatcctccggcttttgcaaagcatcgcggtgccttgggaaatgccctgagggcttaccagaggctcaatgctgctgcgatttcaaaggttgctcctggggggctcgtctttactttcagttgttcccaggtggttgacaaggaggctttttcgttggctgtcttttcggccgcagcccagaccggccgttcggtccggatcctggaccggctcaaccagccggctgaccatgctgtcaacatctatcatcccgagggggagtatctgaagggattgttgctttacgtagaataaaggattttggatatcaaaatttattcgtatatttgcattccataacggtgctttggccgagcggttaggcacaggtctgcaaaacctgggacagcggttcgattccgctaggcacctcaaaatagccatcctacatttctaggatggcttttaatatgtatctttaagtccttaattgaaatcaccatgcggttcttatttgtaaaatactgtttgtcgatcctcttgatagggtgcgccgcctgttccaactctccgagacagacgacggaggatgggacatcggatgcatcgtttatccctgctgcaacacacgaaaacggatggttgaagagaggcgacggccccgtactaggcggccctgaacttgggacctgcttcgatgtgaatgtcatcccggatggctcagccaagtacaacatgtatttctcctggcgtcccaaaaaggccatcgccatctcaaggagtgaggatggggtgtcatggactgatccgaagatcgttctggaatatgacgagttgagcggttgggaggacgacctcaaccggtcctgcactttgttcctgggtggggtgtaccacatgtggtatacaggacaggcaaggggctacagtaaaatcgggtacgctgtttccaacgatggagagcatttcaatcgagtgaccacagatccagtcatggtccccgagttcaactatgagggctattccgttatgaacccatatgtcctttttgatgatgacaggggagtattcaggatgtggtatgcatgcggtgagacgtttgaaccaaatatgattgcctatgctgaatctgaagatggcctgcattgggaacggtcgcccctgaatcccatctttgtcaaaggccaaggttgggagcaggatcggattggcggttgcgaggtgcatcgcctccccgacggcaggtacatcatgttctacatcggctattcggacatccacaccgcccgcatcggggctgccatttctccggatggtatccggcagtgggagcggttggaatccaatcctttaattgaacctaccgagggctatttcgatgccttggcctgttataagcccagcgttttcttcgacgaggaaaacaaccgttggcagctctggtataatggtcggaatgaaaaagcggaatatatcggctatgccgtgcatgacggtttgaaactggattgacccgttttttccatagaccttatttcagttcatcctaccttgtcagataaaatcgttgtaacaaattgtcgtggcgcctgacttattgattataagtctattattagtaagaggttgcattaatttcgatgcaacctctttacgttaacaatatgataatctgagatataaatgccacaggtatttgaaggagatgtttcttagtgttagtctggatgtgtggagtccatagggggttgcaccgccgcttcgcggccccaccgttcgcgtcacttcgttctgctccggtccccccctcttaacgtgccgatggtggcagtggtgcaaccccctatggactccaccatgcgcagtgaggaacccaacaagaaaatcaccttcccacacggagcacatcatatagccctgcaacactgactcagagggaaggtcagacaatttcgcctagccttcccaatcagaatataacacaagggcccataaggctaccctcctgggaaggtgaatattgtcttctgtcttaaccgtatgcatttcgcagcctttcattctccaagacaggtttaagaggcgactaaaggaatcttcctatgttgagcacacagacgtccgtcctgttgctgccatccctctcctacagttctgcaccgatttcaagtacttttgacttgattcctaaatagtccgttccattttttttatctttgtgttagttgcgttgagatggcggacatcgaagacaaaaaaagatcccacggagtacgcgggatcataggataaaatccttcggcatatagccttattgtggtaagatgtagcttactaaagcaaatataataatcttattctggataaacaaataatggaaaaggtattaggacttgatttaggtaccaattcaatcggttgggcggtcatcggtaggaatgaggacgatacctgcatgcttatcgatagaggggtccacgtctttcaggacggagttgcccatgacaagagtggagaaaaacctgcagtcttggagagaactgcagctagagcttcccgtaggcactatttccgtcggcggatgcgcaaggtcgcactgcttaaagtgctagtcagggaaggattatgccctcgcttagccgatgaagatcttaaaaagtggcagaacgagaaggtctatcctcttaatgaggaattcatgctatggcaacgctcctttgacgggccggacagaaacccttattatgatcggtatcgctctcttacggagaaacttgacctgacagatatcctggacaggtacacacttggccgcgccctttatcacattaatcagcggcgcggcttccttagcaatcggaaagatgcggccgatgattcggagaatggaaaggtaaaggagggtattagccttctttctagtgaaatgaacaatgccggatgccgttatctgggcgagtatttctatcatcttttcaagaaaggcgataaaatacgctgcaagtatactgccagggaagagcattacaaggctgagttcgatgccatctgtgagaaacagggattaagtgcccgtttgaaaaaagatatagagcgcgcaatttttttccagcgccccctccgatcccagaagggaaacgtggggaagtgcagtttcgagaaggggaaacctcgttgccctatttcccaccctcgctatgaggagttccgcatgttgcagtttatcaattctgtccgcgtgcagagaccatatgaaacggaggcatatcctctgaatgacaaagaagttcaatccattaagccattattcttcaggaaaagcaaaccggattttccttttgatgagattgcgaagaagatcgctgggaagggaaactatgcatacagggagaacgggcgtaatgaccaatacaggttcaattacaggatgtccgtaagcgtttccgcctgtccggtctcagcggccatcatcagcgcgcttggacttcaaggtcccgatggatgggaagaagagctttgttcagtttatacgaagtcggacggcaagatgcaggacggaatcctgaatgacgtctggcatgcgcttttcttctacgatgacggaaagaagctgtccgagtggctctctgctgcgctccagctcgatgaggataaggcggacggtttggcgaaattccgtctgtcgcagggttatgcagccctcagcctgaaagctatcaacaaaatcctgccctggctccgtcgagggcacatctacagtgacgctgtcttttatgccaatcttcctgcggtacttccttccagcgtaacggaggataccaccaagatggccgttattgtcgagaacatgagaatccttttggaagacttttccagggatccgttgaacagggagtccagcaaagtcaagaacatatccgactacctccttggggtggccgacaatgtccatccggagaaactgtatcatccttcgatgatagagacataccatgcggtcatgccggacggtaagggaagggttcatttgggatcaccgcggacggacgccttcaagaatccgatggcgatgcgtgccctcttccggctcagggccctactgaaccggctgctcgatgagggggttatcgacccttctaccaagatcaatattgagttcgcacgggagctgaacgacactaacatgcggaaggccatcgctgactggcagaaggaccaggaagaacagcggaagaaggattccgatgccatccgcagcatcatgggtgacgggtacgtgccgtccgatgatgtactccttaagtatcgcctctacgaagagcagaatcacatctgcctgtataccggccgacagatttcgccccggatgtttcttggaggtgtctctgagttcgatatcgagcatactatcccgcgttcacggggcggcgacgactctcaggcgaataagacgctctgtgaaaacaagttcaaccgggaaatcaagaaaacgcagataccctccgaactggttgaccacgatgtcatacttgagcggattgcaggatggaaagagacaattgaggaactgtcaaaccaaatctcttttcagcgaaggaaagtccgggccgcccagacaaaggaggcaaaggatgcgtccatccgccggatgcattacctgaagatgaaattaaactattggaaggggaagtacgaacggtttacgatgacgaaggtccctgaagggttctctaaccgccaagccgtcgatatcgggattatcggcaaatatgcccgcctttacctaaagacactcttctgtaagatttatgtcgtgaagggagcgacgacggcggctttcaggaaagaatgggggctccagagcgaatattcgaagaaagagcgagtgaaccacgcacaccactgcatagatgccgtcactatcgcctgtatcggcaagaacgaatatgacagatgggcccaatatctgaggaaggaggaggattatcagttcgggaaagggccgaaaccccgttttgaaaagccctggcctaccttcacggaggacgtccttgccatcccttccagcctgattgtttcccactacacacctgacaatctgccgaaactagacaagaagaaagtgcgtgtccggggtgtcatccaaaggaacgtcgacgggaaacccatgtatgcccaaggacatacggcaagggcccttctgcataaggatacgttctatggtgccattcagaaggatgacgaagtccgatatgtcgtgcgcaaacccttggattccctggatgagaagaaggatgtccctaaaatcgtcgataatgctgttcgggagaaggtccttgctgccatcgctgagtacggaagtctcaagaaagccgtgacggagacaatctggatgaataaggaaaaaggggtgcctatccgtaaggtaagggtatttacaccgactataacatctcccattgctttgaagccgcatcgtgacgagtctgataaggagtataagagaagctactatgtcgccaacgacagcaattactgtatggcgatatacggggataaaaagccttccttcaaacttttcaacgctctttctgccgtgaatcacttcaatggaaaacccgtggaatggatcgctcctactgatgcgacgggtcggccgctcagatgcattgtaagagcggggttgatggtcctcttctatgaggagtctcccgaagaactttacaactgttcacaggaagagttgtccaggcgactttatgaagtcacaggcctagcacctcaaaacatgggtaagtaccattatgggattctaactcttaaacaccatctagaagcaagatcctcaactgaacttacgataaagaaagggctttggaaacacggagagaatcttcggcctattataggcatcaacaacaaccaggctctattcttggtggaggatcaagattttgtcctaacagtgaccggaagaatcgttttcaaaaagtaaggcaaatgattaaacggactatcgttttcacgagccagtgccgagttttgctcaagaacgggcagttggttgtggagaaccacgagacgggtgaacaaaaaaagacatcggtcgaggatttagggattgttctcatcgagaaccagcaggtcagcattaccgtccctgccctgaatgccctgtctgccaacaactgtgcagtcgtcttctgtgattcaaagcacatgccttcctccatgttgatgtcgttggactccaattccgtccagggagaaagatacagagatcaggtggaagcatcattaccactcaaaaaaagcctgtggaaacagatagtacaaatgaaaattcggaaccagtcgtcactgctgacgaaagtgggatacgacggaggaaaactgaagccattctatacaaacgtcaaaagcggagactcggataatagggaagggatagccgcaaagatatactgggacgaactgtttggagatgagtttgtcaggtccaggaccggtccggaccctaattcgcttttgaattatggctattccattttgcgcgcagccatggctcgcgcaatcgtcggctcgggactgtctccttcctttggacttttccataagaatcgatacaatgccttccctcttgctgatgatctgatggaaccatacaggccctatgtagatgctgtggtgttccaacttctggatgaagataagaaagagttggactccgaagtaaaacagcgactgctttgtgtgctttttgccgatacggtgttcgatgattgtatacggcctttggagattgggttgtcgatgactaccgcctcattggcacgttgtttttcaggcgaagggaagcaactggttcttcctcgattttgactatgattgagggaaaccgactgaatgcctaccgggttatgtggatttttgttttctttgatttgccggtgacgacgaagaaagaacggaagtcggcgactcagtttcggaaagctttggagaaggatggatttaccatgatgcagtattcagtttacatccgacattgtccatcgaaggagaatcgggatgtacatgtgaaacgaattaaggccgcagttcccgctgtagggatggtaagtatcctttctgtgacggataaacagtacggggaaatcgttaacatttgggggacaaaggagaaaaagttactaggaactcctttacaattggaattgttttagatctttgatatctttgaaataataaaaagcgttacagagaaccacttccttgataaaatacgcatttttatatcctttatatctatgtaatatgcttattataagcctgttgaaaagttgaggttgtggtttgatgtagctagggaataaggaacaacaaatttaggtaaaggtattgcagagattaagttgtggtttgatgtagctagggaataaggaacaacctattctttggctccaatccctttcctctgttgtggtttgatgtagctagggaataaggaacaacatccgccgtgactatcacctacacgcaggcgttgtggtttgatgtagctagggaataaggaacaacgatgatggaaaagacgatctgcccttctgagttgtggtttgatgtagctagggaataaggaacaacttgtaaaaaccaatataaccatggcaaccagttgtggtttgatgtagctagggaataaggaacaactctaagccatggagacaagcgtattccaaagttgtggtttgatgtagctagggaataaggaacaaccgacagtagggtcgttctcgagttcaaagggttgtggtttgatgtagctagggaataaggaacaacaaaatcttatgaatggattaatataatgttgttgtggtttgatgtagctagggaataaggaacaaccgtgactctcacagccaccgacggccttgggttgtggtttgatgtagctagggaataaggaacaacc

SEQ ID NO: 518 - DNA, 15388 bp, synthetic construct
  source 1..15388: mol_type = other DNA
  misc_feature 1..15388: note = Synthetic
acgctcaaaaataattgcattttcatataccatcaaaaagagtgccttgtgggcactctttttttatccaatcaattaatgcttttactaaattcaaacacacccgtgcaattctaatatttttatttaactttgtcaattaaagaagagtggtcacttgacctgattccacatactggagtgagcagagtgattttcatttctcatagatgacatagattccctagttgtcctacaagttttctatttatagtcgctatcccttgattttataattctaaacttttctatacctcttacaagtctatacttttatcaaaacacatataattatgtctttctgaaaaattctgttcattctgtcaaaaaaagaggagtattattgcaaaaattttccttttacgttgccataaccattttcacccacatttaggcaagcaaaaaaatgacaaaattgaatatttttttgacgatatttttattgaatttgattttttatttgtaactttgaattaagaagccgaatttgctattgacaaaccacgctttacatttatttattaataggtaaaaaagattatgaacaacaacgactttagaaaatttgccgtaaaccaccttggcatgaacggtcttgctatcgaccaatatatgtcagcaacatctgccaacatcacttcaagctatatcaacccaacaatcatcgaagaacgtcaactcaatgtggctcaaatggatgtattttctcgcttgatgatggatcgcattatattccttggcactgatgttaacgactacaccgccaatgtgattcaagcacaactcctttatctcgaccaagccgacccaactcgtgatgtttctatatatatcaactctcccggtggatcggtatatgccggattaggcatatacgacactatgcaatatatctcaagcgacgtagctaccatttgcacaggcatggctgcttcaatggctgctgtactccttgttgccggagctaaaggcaaacgcttcgcattaaagcactctcgcgtaatgattcaccaaccaatgggtggagcacaaggacaagcatccgacatcgaaattacagcacgcgaaattcaaaaactcaaaaaagaactatatactataatttctaaccattcaggcgtagcattcgacaaaatcgaaaaagactctgatcgcgactactggatgactgctgctgaggctaaagaatatggcatgattgacaacgttctcattaaagctcaacactaatcaatggcaaagaaaaataccataaaatgttctttttgtggtcgcccctccgacatgagcgaagtactcgtgccgtcggcaataggggagacctacatttgtgctgagtgtatcgaccaaattcacgagatgcttggagaatatcgcaacgatgctaaagccactgccaaagccgaagttgccaccgacttaaacaaggtgcctcgccctcgtgaaatcaacgacttccttgaccaatacgtaatcggacaagattcggccaaaaaatacttatcggttgctgtttataaccactataaacgtcttgctcaaaactctaacgatgatgttgatatcgaaaaaagcaacattatcctcgtagggcacaccggtacaggcaaaacacttcttgccaagactattgctcgactcctcgatgttcctttcactatcgttgatgccaccgtattgaccgaagctggttatgtgggcgaagatatcgaaagccttctcactcgattgctccaagctgccgactataacgtgggaaaagccgagaaaggtattgttttcattgacgaaattgacaaaatagcacgcaaaggcgacaacccatcaatcactcgcgacgttagcggagaaggtgttcaacaagggctattaaagctccttgaaggttctatcgtaaatgtacctcctcaaggaggtcgcaagcaccctgagcaaaagatgattcctgtcaacaccaaaaacatattatttatatgtggtggagcttttgacggcatcgaacgcaaaattgctcaacggctcaacattcacgttgttggatattcaaccgatgctgctcgccaacgagttaaacgcgacaactatttgcaatatatcgcccctcaagacttaaagtcctttggcttgatacccgaaatcatcggacgtctccccattttgacacatcttgaccctcttgaccgcgatgctctattgcgtgttctcaccgagcctaaaaatgcaatcattcgtcaatacaagaaactctttgagatggacaatgtaaaattatcattcgctcaagatgctcttgaactcattgttgacaaggctattgagtataaattaggtgctcgtggacttcgttcaattgttgaatcgattatgattgatgcaatgtacgacattccatctaccgacattaaagaatttgaagttacacgtcaatatgctcttgaaaaacttcaagcagccaattttgacacatcagtaatcaaataagcttaattatctgcagacatcaataaccaactaaacttttaacatgagcaatactattaaatctcgactctatgatgcattaaaaacgcattttggatttgacaaattcaaaggcaatcaagaggcaatcatgacaagcctgctcgaaggtcgtgacacatttgtattaatgccaacagggggaggcaaatctctatgctaccaacttccggcattgctcatggacggaactgctattatcatttcgcctctcattgctttgatgaaaaatcaagtcgatgcaatgcgaaatttcagcgaagacgataatatagctcatttcctcaattcttcattaaacaaaaatgctattgaccaagttaaaagcgatattatttcaggcaaaactaagttactatatgttgcacctgaatctttaacaaaagaagaaaacattgaatttcttaagactgttcctatttcgttttatgccatcgatgaagcacattgcatctctgagtggggacatgatttcagacccgaatatcgccgaataagacctatcataaacgagattggcactcgtcctgtcattgcacttacagcaactgcaactccaaaagtgcaacatgacatacagaagaatcttggcatgcaagatgccaacatcttcaaatcatcttttaatcgtcaaaacttatattacgaaattcgccaaaagtcacaaaacaccgatcgcgacataattaaatacatcaaaagccaagaagggaaatcgggcattatttattgcttaagtcgcaaaaaggtagaagaccttgccgaaatgctacaagtaaacaatattaaagctctcgcttatcatgcaggaatggatagtgccactcggtcagaaaatcaagatgcgttcctccttgaaaagattgatgttattgttgccactattgcatttggcatgggtatcgacaagcccgatgttcgctttgtgattcactacgacatgcccaaatcacttgaaggctattatcaagaaaccggacgtgccgggcgcgatggaggagaaggtcaatgtatcactttctattcatataaagatctccaaaaaatggagaaatttatgcaaggcaagcctatcgcagaacaagaaattggcaaacaacttctttctgagactgcttcatacgccgagtcttcagtgtgccgtcgcaaatcactacttcattattttggagaagaatttcctcatgaacactgtggcaactgcgacaactgcctaagtccaaaaaagaaagtagaagccatggatatgctcctttcgattttagacacaatcgacgcattaaaagaaaaattcaaatccgaccatgtaatcaatgtcatgcgaggaaaaatgaccaataatgtaagatcgtatcgccatgacgaccttgaaatatttggttgtgctaaaaatgaagacgagaaatacatcaatgccgttattcgtcaagctataattgcaggttatcttgatagagatattgaaaattatggtctaataaaaatcactccattaggacaagaatttgcaaaatcaccacaatcattcaaaatcgttgaagacaatgaatttaacgatgacaatgaagaaattgtgattaagggaggggcatcatgtgcagttgatcccgagctatatgccatacttaaagaccttcgcaagaaaatagcaaagaaacatcaactacccccttatgtaatcttccaagacccatcgctcgaagcgatggccacaacttaccccattacaatggaagaactccaaaatattaccggagtaggggctgggaaagcaaaaagatatggtgctgaattcataaaaattatcaaaacccacgtcgaagaaaacgagatagaacgccccgaagatttacgcgtgcgaagcgttgccaataaaagcaaaatgaaaatctctattattcaaggcatcgatcgcaaaatccctctcgatgaactcgcctcatcaaaaggccttgaatacactgagatactcaacgaaatcgaagcaatagtctattcaggaacaaaaatcaacattgactacttcattgacgaagtaatggacgaggaccatctcgacgacatctttgaatacttccgtgaaagcgaaagcgacgacataaacgaagccattcaggaactcggacccgactattccgaagacgacatacgcctcgtccgcataaaattcctctccgaattaggcaactaaccacaacaaaaacgataaatttcagcaagtgtaggcttattatcgaggtactttgtaatgagaataaccgagtaccatttgctgacactgaaatttgcgacacaacacaacgcccccgcttacattatgcaatgtgagggctgacatttatttactatttgatagccgtttttaacatcttgtttgcaatttggttattttttcttacctttgcatttctaattatatattttgaaatttatcgtggaaaagaaacgacaaaatagtgcgatactattaatgcattgccccgaccaaccgggtattatcgctgtaattactgaatttatcaacaccaatggtgggaacattctatatctcgaccaatatgttgacaaagagaatggagtattttatatgagagtagagtgggatttagataactttgcaatccctgccgataaaatcgaagaatacttcaacaccctctacgctaatcgttataacgtaacatatcggttaacatttaccgaccgtcctcgtcgcatggcacttttcgtgtctaaaatgtcgcactgtctatatgacattcttgcacgctatgtagcaggggagtgggatgtagaaattcccgtaatcataagcaatcaccccgacctcaaatcggtggccgaccaattcaatatcccttacgaggtaattcctgttactcgccaaaataaagaggaaatggaagctcttgagtttgaaatccttgatcgctaccaaatcgactttatcgtattggctcgttacatgcaagtgctatcggaaaactttatcaaccgttacccaaatcgcatcatcaacattcaccactcgtttcttcctgcattcgtgggagcaaaaccctatcatgcagcatacgatcgtggcgtgaaactcattggagcaacaagccattatgtaactaccgagcttgatgccggacctatcatcgaacaagatatcgttcgcatcactcacaaagatactgttaacgacttagtgaaaaaaggtcgcgacttggaaaaaattgtgctctcacgtgcagtagagaaacatatccaacgcaaaatacttacctacaacaacaaaaccgtagtgtttagctaatttattatctctaatgaaaattgcgataataaaatataatgcagggaataacttctcggttgagtgtgcactccgtcgtctcggatatgaagctatcgtaaccgacgaccccaacgagatacgtcaagccgacaaagtaatattcccaggagtgggagaggctcgcagtgctatggaatatttacgtgaacatgggcttgatgagattataaaaagtctcacacaacctgttttaggcatctgcatcggtcagcaattaatgtgccgccactctgaagagggaaacgttgattgcctcggcatatttgacgttgacgtaaaaagatttgacgcatcggcttcggatatgaaaatacctcacatgggatggaacaccatctcccttgtcaaagacgattttataccggctgacctcaacaacaaatatgtgtattacgtacacagctactacgtgccggtcaacgatgctacaattgccactaccgattatatcacaccatatagtgcagctctacacaaagataacttctatgccacacaattccaccccgaaaagagtggagacattggcgaacaaatactcaaaagcttcatcgaattatgatagatattatcccagctattgatgtaattgacggaaaatgcgtgcgtcttacaaagggagactacgaccggaaaaccatatatgccgacgaccctctcgatgtggctcgtatgatggaagatgccggatgtaagcgattacaccttgtggatcttgacggtgcaaaatcaagccatattgtcaattatcatgttcttgaacgcatcgccaatggtacaaatctcgttattgactttggtggtggattaaagagcgatgaagatctacgcatcgcatttgagaatggagcatcaatgattaccggtggtagtattgccgttaaagagcctgagatttttcaagggtggattaatcaatatggtagtgacaaaataatcctcggtgccgacactcgcaatgggaagatttcgacatcgggctggattgacgacagcaatcacgacattattccgtttgtgaaagattatatgacaaaaggcatcaacaaagttatttcaaccgacatcaacgttgatggaatgctcagtggtccatcaatcaacctatacaaagagatgcttgccgagatgccaaatttgtatctaatcgcaagtggtggcgtgagtgccatgcacgacattgaagctctcgaagcagccggggtgccggcagtgattgtgggaaaagcaatatatgagaaccgcattagcctcaaggaattagaacaatttaatttattacaacaataacaatctataatgcttgcaaaacgtatcataccatgccttgatgtgaaagatggcaaaaccgtaaagggggtaaactttgtcaactttcgcgatgctggcgaccccgttgctcttggcaagaaatatagcgatgatggagctgacgagcttgtatatctcgacatcacagcatcacacgaaggtcgcaaaacatttatagaccttgtgcgtcgcgttgctgaaaatgtgagcatacctttcactgttggaggaggcatcaatcaggttgaagatgttgaaaaattactgaatgccggagccgataaaatttcaatcaactcggcagctctacgcaatcccgaccttattgatggcatagctcgccgatttggcaaccaagtgtgcgtaactgccatcgatgctcgcatggaaggaaatgaatgggtgtgctacatcaatggcggacgagtatcaaccggtcgcaaacttatagaatgggcacacgaagcacaagaacgtggagccggtgaaattctattcactagtatggaccacgatggtgtaaaaaccggttttgcaaatgaagcattggctatgcttcacgacacgttaagcataccggtgatagcatcgggtggagcaggtgattattcgcatttctacgatgttttcactcaaggaaaagccgatgctgcacttgccgcgagcatttttcacttcaatgagataccaattaacgaattaaaagagtatctttgcaaacgaaatataaacgtaagaatataaacgcaacgacataatcgattatgagtattgatttcaacaaaatgcaaggacttgttcctgccattatccaagacgttcgcacaaaaaatgtgttgatgctcggatttatgaatgaagaagcatatcaaaaaaccacagaaacaggcaaagttacatttttcagtcgcacaaaaaatcgcctttggaccaagggtgaggagagtggaaatttcctcaacgttgtttcaattcaagaagattgcgaccacgacactttgttgattaaggtaaaacctgttggaccggtgtgtcatacaggtactgacacctgttggggtgaaaaaaatgaatggggcgttgaatttttccgttatctccaagattttatcaaacgtcgctacgatgaaatgcccgaaggctcttacaccacatcattgtttaagagcggcatcaatcgcatggcacaaaaagtgggcgaagaggctgttgaaacagttatcgaagcaacaaatggcaccgacgatcgtttaatctacgaagcatcagacatgatataccacctcatcgttttgctcacttcaaaaggttatcgcattgaagaccttgccgaagaattagtaaaacgccacaaagaataattccctaaatcgcatttatacccaaaatcaatcaaaccaatgggaaccatagtcaaatatcgtgatgtagagattctacgccaagaacatattgttctaaaaaatgtatcattcgacattaatgatggcgaatttttatatctcatagggaaagtgggtagcgggaaaagcagtttgctaaaatcaatgtattgcgaaatccccatcaacactggctctgctcaagtttttgactatgacctcacaaaaatgaaacgcaaagcaataccaatgcttcgtagagagattgggattgtgtttcaggattttcaattgcttaccgaccgtaatgtttatgacaatcttcgctttgtgcttgacgcaaccgggtggaagaagcgagaagaaaaagatgaacgcattgaggaggtattgaaacaggtgggaatgctcaacaaaagctataaaatgcctcatgagctatcgggaggagagcaacaacgcattgtaattgctcgtgcattgctcaacaagcctcgcctaattcttgccgatgagcctaccggaaatctcgacccggccacaagcgaacagatagtgaaccatctgcacgaaatcgccaaaaatggcacagcagttgtaatggcgacacacaaccttgctttggtagagcagtttcccggacgagtgttgcgttgcgaagataaacaacttgtgtgacgctttgattttgacaaacgattatccctttgtggggtgacttcaatataatccactgctggtggagttgaattgagtgtgtcgcttggcgatgcactcgattttgtttgtgaaggggtgcataatgcggcatattgctgttctttgagagcgagtttagcctcaaattctattaatcgttttatgcgagcgatgacttgttgctgaatttttaatagtatcgggtcggaaaactctccaagagagtaatcgccattaaggtttcgttctactgctgcattgagagcatttgaagaagatataccattgtctaatagtaatgaacgtaccatagaccacactccattgatgtgtaattttgtcataatttttaaggattaaaggttaaaatgattttggtgcaaagttaatacatgaaaaaagggaaaaactgcgataatgcacaaaaatattttttagacagaagtacaaaagaacatattaattagtgcattaaattgagggttctatgtctttttatgtcctctaagtcaactatgggaaataaaaaagcccccacagagtatgcgagggcgtagttcttaaaacttcggcatttagccttattgtgataagatgtagaattatattgcaaatatataacgtaaatttttattatcaaagattaatttgttaattttacaacaattataaactctaatttttaatttaaaccttaaatattatgtacgaagatgttttaggcattgatttaggcaccaattccattggatgggcaattgtaagaaaatatctatatcactatgaattattacataaaggagttcatatatttcctatgggtgttacaaatactgataaaggagaagtaccttctgtacaagaacgaacacacgctagagcattgcgtcgtctctactttagacgcagattgcgaaaaattgaaatactcaaagttttaattgaatatactttgtgcccatttttaactcaagagcaactacttgaatggaaactcaaaaagaaatatccattatctgaggagttccttaaatggcaacgcacagatgataatattgacaaaaatccttatcatgatagacatatctgcttaactcaaaaacttaatttagaaaacgaaaatgaacgctatatccttggtcgagctttgtatcatctttgccaacgtagaggatttttaagtaatcgcaaagctaattcgcgagaaagtgacggagaagttaaaacatcaatttcaaatttgagcaaagaaattgaaaactcaggctacaaatatataggcgaatatttttatttcttatacaaacgaggagaaaaaattcgaggtaaatatactgctcgtgatgaacactatcgcaaagaatttaatgcaatatgtgacatgcaagagctttctgttgaattagttacaaaattagaaagagccatattttttcagcgtccactcaaatctcaaaaaggacttgttggcaaatgttcttttgagaaaaacaaaagtcgatgtccgttgtcacatcctcgatttgaagagtttagaatgttatcattcataaacaatatcaaaataaaaacgatgaatgacaacaattatcgaccacttgatgaatcagaaataaagctaattataccattatttcatcgcaaagctcaatttgaatttgaagatattgccaaggcaattgctggaaagaaagtcaactatggctttaaagatgataaagcagatgtagcatatcgattcaactataaaatgactaccaatgtatcaggatgtcctgttacatcggggcttattggcgtttttgggaatgattggcttaacgagatatgtagtgtgtatcaaaaaggagaaaataaaactcaagaagaaattcttaacgacatatggcatgtattattttcatttgataataatcaaaaattagaggaatggggtcgcaaatatttacaattgacagacgaacaggttaaaaaatttataacaatatccattcctcaaggatatgcttcattaagcctaaatgcgataaataagtctttagtatatttgcataagggattgcgatacgatgaatctataatgttggcaaatataaaatcaatactacctcaacatatcttaaataataacgaatattttacacaaattgaaagtgacttaattaatacaataaccgattttgtatttgaccccgataatccaaaacgaacaaagcctgatgctataagagaatatctcgaagatattgtagaacgtaaaaagttagataaaatctatcacccttcaatgattgaaacctatcctaacgctgtagcaaataaagatggggtagtattattgggaagtcctcgcacatcatctattcgcaatccaatggcaatgcgagcattatttcaacttagacatttaatcaatcaattgataaaggaagggaaaattaatcaatacaccaaagttaacattgagttttctcgcaatttaaatgatgcgaacaaacgtaaagcaatagcatcagtccaaaccgataataataaaaaacggactaaagcaataaaagaaattcaaaatcatttcaaaacacaacataatattgaatatacaccaagtgaaaatgaaattctaaaatatcttttatgggaagaacaaaatcatagatgcatttatactggaacacaaattgacatttctgattttgtaggagcaaatcccaaatatgacattgaacataccgtaccacgttcaagaggaggtgatgattctcaattaaataaaaccctttgtgaatcaaggtttaatcgagaaataaaacaagcaaaacttccatcagagttatccaattatgatgagataatggcacatgtagttcagcaaggatgggaaacaaaaattaaagatttagaaaaacaaattagtcgcattaaaacttctagtgccaataataaagtatcgaaagacaaaatgattgtagaacgccataaattaagaatggatcttgattattggcgaggaaaatatgaacgatttacaatgaaagaagttccaataggtttttcaaatcgtcaaggggtcgatattggcataataggacgttatgcacgaatgtatttaggatcttattttaacaaatatatcaatactacgagcagatctatagatatcgaagataatatcagcagtaataagcaaattttcacaattaaaggagccactaccgctgaatttagagtgatgtggggattacaagaagaatatacaaagaaagagcgtataaaccacgttcatcattgtatcgatgctattgtaattgcttgcattgaccgagcacagtatcaaaagtgggcaacatataaacaaaatctagaaataagccaatggaataattttacaaaacctatttttgaaaaaccttggaaaacttttactgaagatgtaaaagcaatctctaattcaatattggtttcacattatactgctgataacatgcctcgcaaaacaaaaaaagcattacgaataagagggaaaatacagcgaaatgttgaaggaaaaatcaaatatcaacaaggagatactgctcgtggagcacttcacaatgataaattctatggtgccataaagaagaatgataatatacattatgttatcagaaaacgactaagtgaattaagcgaatctgacgtatctaaaattgttgacgaagttgtcaaagaaaaagtgagtcaagcaattgctgaacgtggttttaaaaatgcgtttgctgaaccagtgtggatgaataaagagaaaaatattgaaattaaaaaagtacgcattttcgttaagagtacaaatcccatacacctcaaaaaacatcgagatttatccgataaagactacaaactgaattattatgttacaaacaaaaacaattattgcctagcaatatatgaaggtatcgacaataaagggaataccaaacgatcgtataaaattgtcagtaatttagaggctgctaaaaaattaaaacttaatgctcgcaaaaacgacgtagaattagttccattatccgataaaaatgacaatcctttaaaatatttttttaaaataggcacaatggtccttttctacgaaaattcatcgtcagaaataattaaatgtaatatttctgaactacatagcagattatacaaaataactggaataaatattgacccaacaggaaatggatatgggtgcattgtcttaactcattcatctgaagcgaggtcttctagtgaattctctacaaaaaaaggtaaatggaaaataggagaagatttaagaccttctattacattaagacacactcaatttaatgcacttgtagaaggttttgattttgaactaacaacaactggagaaattatttttaaataataatgcttaagcgagtactatatttgactacggcaaaacatctttcattaaaagataatcagctaatattagcgtcaaaggattcatgtgacaacccacactatgtcccaattgaagatattgggtatattatagtggaaaatcagcaaacatctttttctattcctgttataaatgcattgagtgaaaacaatgtggctgttgtattttgtggcaaaaatatgatgccatgctcaatgttattaaatttggattcaaactcaactcaaggagaacgatatcgccatcaattaaccgcaaataatatcctaaagaagcatttgtggcaacaaataatttcttcaaaaattaaaaatcaaagtagattactctataaattgggactcgatggggataaattaaaaccaatatataaaaacgttaaaagtggagatgccgacaatcgggagggggttgcagcacgaatatattggaaagaacttttcggaaaagaatttacccgatatcgagaaggtcctccaccaaataatctcttaaattatggatatagtatattaagagccgctattgcacgagggttaatgggagctggtttatttcctgcatttggaatttttcaccgaaatagaaataatgcctttcctcttgctgatgacatgatggaaccatttcgaccatatatcgatgagattgtttatcatttgtataatgagggaaaagagaaccttgataaagaaatcaaacatcacattgtaaaaacattattttgcgacacaaaatataaacgtgtaactcggcctttagatgttggcataacatacacatgtgcctctcttgccaaatgttttttgggagatgaaaagacactgaattttcctgaatttaaataacgattactaaatgtcggaacttcgtctaaatgcgtatcatattatgtggttgtttgtattttttgatttacctgtaactacaaagattcaacgaaaaagagcaactaaatttcgcaagtatcttgaaaaagatgggtttacaatgatgcaattctctgtatatgtaagacatagtccttcaaaagaaagtatggaagtacatctaaaacgagtaaagtcttttattcctccagatggtatggtaagtattttaaaagtaactggtaaacaatatagtgaaattataaactattatggtaaagaagttcaaaacaaccctgaagttcctcaacaattagaatttttttaatatatttgcgtagaaatctacttttacaaaccatttctttagcttaattactctttttttgaagctaaaatacatcttaacaacctatattttagctcatttaccaactaaggttgtggtttgatgtagaaattagatattaaacaaccagagtcgccactactacctatctgagcaggttgtggtttgatgtagaaattagatattaaacaacatacatgaattaaataacacaacacaacatagttgtggtttgatgtagaaattagatattaaacaacctacccccttggatacatctcctcccaatcgttgtggtttgatgtagaaattagatattaaacaaccgatgcgataggataactttccttatcaccgttgtggtttgatgtagaaattagatattaaacaacacaaaccctaacagcattattcgccaatagttgtggtttgatgtag

SEQ ID NO: 519 - DNA, 15329 bp, synthetic construct
  misc_feature 1..15329: note = Synthetic
  source 1..15329: mol_type = other DNA
atctcgataccggctctgccgcagaattgcgccataatgggataccccgaacagatacacggcaaagagatgtttcacgccggcagacacacggcacgcatcgagcatcagggtgcggtaataatcgaaggaacgctcacgctcgaagccgtccgccggaggttcgacacgggaatgacctactacgactgcaacataatcggggcttcaaaactatgggcagagaaaaccgcggagaggaccatatcctcgctggaagacgacttccggctcacgctgacacagacggcgattcaaaacagctggacagatgccggagcatggattcggatgctgcccgtatgccgcaagccctactctacggacttttcgtcggggcatcttactgccgccgcacagattcttacgaccgaagattatcacccgttcatacacgtggctacactgctaaggaaaataatggcggcggccggatatacattggtttcgcaattcgcggactcggaattcttcggctcgctgtacatcagcggccgctatccgagcgcggacacatccctgctcaatgcggcgatggactttcgggctcgcaaatatgccgacgtgcaggcacaggccgattatctggggcgcgtatacgccaatccgtatgcggcgtcgagcagcgtcggcaatatcgcggacagtgccgaccccatgttcgaaaaggacggggtacgttacgacgacgtattctctcgctcgggatgcttcgcctcggacggcaaaagagtggtattcaagccgacgaaagaggtatcggtaggattccgatacgaaatatcctacaccacgtcctatcggatactctcgcgcacggagctggcagggttcaaccgcatctatctcggcgagaatttcgaccgcagcttccgtctggccaatagattcatcgaccgttcgcgcgaattcagggccggcaaagagttccgcatagtagttttcgaccacaggcagggcgacacgtacaggctctactgctcggacggccagacttcgattgtggtggacgacaacatcgccacacgttccaaaatcgtgagcatacagcacgacggacagcttcgcgaccctacgctctatatcaaaaacggggacacggagcgcatttacaccggcgactgggcgctctacgacggatatgtcaccgagacgggccagacggatgtgaacatcaccctgaacaccggtcccgaaaccctgtcgccggccgacccgaaactattcgacgacatatatttcggaggtgccgagccgggtatgacgctcacgctgcacaaggggacgagcgtaaggccggtattctcgccgcacccgacggaaggagcgacgctgagtttcaaggacgtggccgcatacagcacgcggcagatagatttcatcgcggccctcaggcacatgttctcgctatgcttctacaccgatgcggcgacctcgaccgtatacatggagccggcgacgactttcttcgaatcggacaaggtcaccgactggacggacaagatagatttctcgcaacagattacaatcgaggaaatcggagcgggaaaccatgccgtcagattctgttacaagtccggcgacgctgcggtagccgacttcaaccgcaaaaggcaggacgacttcggggcatgggtgatgagcggggtggaaaataccgaaagcgaaatcggtacacgtgaaaacccgatgttcgcccccacgataaccgccgacggggtatatccggatgctcccgatgcgcggatagtcatggcaaaagacagttctgcggaagaaggcaatctgaacttcaccgcgaaaatagtccgttaccatggcatgaaacctctgccggcctcccaaagctggggctggccctcgggagcggcgtcctatccgctcctgtcgttcggaggctgtacggacgacgacctgtcgctgtgtttcgaagaccgagacgggaaaaaggggctgaaccgattctacggccgcagtatagacgcactccgaagaggcaggcgggtaacgctttttctgttcctcagcgctgcggacatcgagccgctgataaggccgtcgcagtggacaagcgatttcagatcgcgttacaggctcgacatcgagggagagagcgggtattacatcctcgaacaggtgtgcgacttctgcccagagcggagccgcccgacaaaatgcacattcataaaaatctgaaactgactatgacacaggacacagaacaaaaagggcaggggcagattccgctgcacggatacatcacatatgccgaagctctcaggctcattgccgacgctatcgggaatctgaaaatatacgtttccgaggccgagataacccaagcgcagcaggcggcactgaaagccgaaacgcaatccagattctgacatgacgacagtcgagaaaacgctcgcgcagaccatctcccgaaagctcggtaatccgaccgtggagcgggtcgtcgaaacgctcgccgacatggggctgctggacttcacacggtgtcgggccgccgtggccagcgcacacgtcgcactgctcgtggaacagggaatggggaaggtggatgcgatgtatgcggccgccgaaaagttttgtctgtcttacgaatgcgtgcggaactacgtgtacaactacaaaaaacagatgtaaaatgccaatcgaaaaacaatgacagctgaaatcaagattacaaactccgccggaagtgtcgcggtaatagacatcgaaggcataatcggcatgcccgagcagtggcagttcgacagcgacgacgaaagggtggccacatacgaacggttcaggcagagcgtaagacaaatcgccgacctgaaagtgaacaaggtcatagtcaatatccgctccactggcggagacgtgaacgacgcactgctgatatacgatgccctgcgttcgctggatgccgaagtcaccacgcgatgctacggatacgccgcctcggccgcgacaatcatcgcacaaggcgcctcggaaggggcgcgggaactgtcgtccggctcgctatacctgattcacaactcggtatgcgcgtgcgagggcaactccatagacttgcagcagaaaacgcagctgctgaatcagaccgacaggcgcatcgccgaaatatacgccgaacgttcgggccgcgatgcggaacggttcctcgacatgatgcaagagaatgcgggggacggccgctggctctctccgcaagaggccatagacagcgggttggccgaccgcataatcggacgtgcagaagacggaggacaggattcggggaaagtacaggcagccctgaaacgcatcgggcagcgcgtaaacgcctttttccgttcctcggccgacgagcgtcgaagcgcggcagatatccgtgaccagtacgaaaccctgcaacgcgaactcagacaaaaacgcatgtcgctcgaagcccgcaatgcgcaaaacgccgcactgccaacactcactcgcgaaacggaagatccgccaatcgccgaattcaggctctcggagaaccgctcggcctacgaacaggatgcaaggaatttcagaaattaaaagccggaaaggcattcaaacaatcagttaaaaaatcgacaagatgagcaaaatcgaacaagcgaaaaactactcgggaaaagacctcgaaacaatctttttcagacccattctcagcgggccggacgccaaaaaattaggaatcaaaatcctgtacaacatgccggttccaaccactctccatttctggcaggcttcgtcggacgtgttgcagaaatacagcgaaaacggctggacgggcggttcgtcggctgaaaagtaccagaaaaccataaagctgagcagagtgaaggccgaagtgggatattcggcgtccgactacttcgacaaggtatacgaactcatctccgccagcagcgacgtgaacatggacgatttgagcggaaccgaactcgaacaggccgaaacggcccttttcaagcaggcgatagccgagagcatccgcaacaccatgtgggtgggcaacacatcccgctcgctgcgatacaacacgttcgacggaatcattacgcggctcatgtctttttttgatgatgcggcgaccaccgagatctacaccaagacctacaagcaggcagacatagccgccgaaggattcggagagacgattctcaaaaaagtctgggactccgcccccgaagagctgcggcagctgcgctcggaaggcaatctggcatttttcgcgacgacggaaatctgcaactcctacgaggagagtcttaacagcgcggagatggaatcggcgtatctggccagacagaacggccgcgatgcacttctgttccgcggcattccggtaatagacatgcagataaacaacgccttgcgcggatgcgccgacctgccctcgtcactggtgattctgaccgacagacgcaacctcgcccttgcggtaaataccgccgatttcccgggtacggaagtgcgcatgtggtacaatcccgacgaaatggagaaccgccagcgggcggtgttcatggccggatgcgactacctgctgcctgaactcatctccatggcctacctgaccgcgtagcgcatggccatatccggattttcgtctccgcagaggcgcatacgcggaggaatagtgaaaatagccatgatagaggcctcgcaacttcggcacgttacggaaaacgggcaatcggagtttcaggtattctcccgaagcggctgggccgagtacgattgcagggaagacagcgccgtctataccgaaacgaccgaaatacgagacgggacagtccgcaccgaacacacgttggagttcgctctgaccggaatagacaccgcttcgcggctggccgcgcagcagattcttgcctcccagtccggaatactggcggtagtgactacggccgatagcggaatgctgctcataggatactcccgcctcatgcagaccgagtgtcctctgagaccggatagcagcacggctctgagcggagccgagccgctggatgcctgccgaagaacgctacggctgcgaagcgtggactgctcgcccgcatgcagggtcgtcaaatacgagtaaacgcagcaaggggcggagtcgggtgctccgccccgtttttttcaaaatcgaacaaaatatggacaataaaaaaacaaaaacggttcggacgttcaccctgcacgatgcggtggacccgttcattgagattgggcatgcggccgtatcggacgacagatactggcgctggggaagcgacaacctctttccgcaggcattgtcgctgatgtcgcgccgctcgaccactcaccgccgaatcataaacgacaaggccgactacatctccggcaaagggttcgcattcgacccctcgctcacgtctctggcacagttcgtccagcgggccaacggtatgggggaaagcctgcggcaggtcgtctcgaagctggcgttcgacaaagcgctgttcgggaatgctttcgcagaaatagtgacggaccgcagccattcgttcctctccatctttcatcaggacgcttcgcgctgtcgcctgagccgcgattcgaggcacgtgcttctgcaccacgactgggccgatttttcatcctccgaggccgccagtctgccgctgtaccccgatttcgaactcttcggcgacggaacactccgctccataatccattacaaggactacgagccgatgttcagccactacggcgttccgccatacatagcgggcatgaacgtgtcggcaatcgcatacaagaccgacaaatggaacatcagccgtttagacaattcgttccagctttcgggcgtgatgatgctcgacgcttcggtggatagcgaggccgaggccgaagagattgtacgtgccgcgaggcgcaagttcgccggcaatcccgggcaggtgatgttcatgatacgagaaggagccgaagccgacacctcgcgcttcattccgatacagagcgcgaacgaaggcgactggcactcgctgcacgaacaggccacctcggacatagtggtggcgcactcgtggtttcgcgccctgagcggactggactacaattcgggattcgattccgaacgcattctgcacgaatacgaagtggcgctgaacacggtgattctaatcgagcaggccgaactgctggaacccgtcaggacactcataggaaacattctcggacaaagcgccgactcgctgcaaataatcaaccacccgccgacaaaggccaaacctctgtacatgaaggtatgggaggctcgcaaggcggacggcatgacttacgacgagacggatccagaccagcagcttttcctgtcgcaaatcaccaagtaccagatgagaaacatagactaaacggcaatggaaaatacgcttataacaccttcggaagtcatcgccgccgccttccgtccctcggatttcgtcagggagcaatccgtgtccgcctcggacattctcgcggccgagcagaaattcatcgctcctgtcttgggcgggctgctcgatgcgctgcatcaggggctataccccaccctgctgtcagactacataaccgcgccgctggccctttacgtcaaggcgcaagtcctgccgcgtctgtggatgcaaagttccgaagcgggcgtggtgcagattaaaagcgacacgatgacctccgcctccgaggcgcaaatgcgtgggctggtgcgctgtgcgatacgtcaggccgatacgctcatgcgccgagccgtgcggcatatagaatcctcgcccgagcagtatcccgagtacgatgccgaaaaaaacgtttcgaaccgctgctcgattctcggcggcataatcataaccggcgatggaacagatatataagaacatctgcgcggtagcgtgcgccctgccctcgctgttcgtccccattcgaggtctgataatatgcgcccttattttcatcgccgcggatttcgttacaggagtggcagcatcggccgtaagcagccgtcgggccggcaggcgcttcgcattcgagagcggcaaggcatggaacacggtcagcaaaatgctgttcgtaatggctggaatatcgctggcatggctcatagatgcggtgatactcaatttcatgacgctgaatctggccaaactgttcaccggattcgtctgcggcgtcgaattttggagctatctcgaaaatgccgccgaaatatcccgccacccgatttttctgcatctcaaacggttcatgaaaagcaaggtggacgacgcactcggcggcaaggataatccgcagtaaaacacatcgggagacatgaacgaaaagaatttaccgagaggaatccgcaaccggaacccgggcaacatccgccgcgggaatacccgctacaagggcgagacgcaaggctgcgacaccgcattcaagagtttcgccacaatgcagtggggctatcgcgcgattttcgtgctgctgcacacctacgccgtaagatacggtctgcgcacaatccgcggcatgatttcgcgctatgccccgcccgaagaaaacgatacgcgaaactacgtcgatacggtggcccgcctgtcgaaaacggatgccgaccggctgatagacactctgcgtgccgaagacatgataccgatagtcgaggcgataagccgcgtcgaaaacggtatcgacgccgacaaagagcaggtgctcagaggctgggaactgttcaggacagattattgaacggacggcaaaaaagcatcgcaggcatcgtattcggcagaagaggagtacggcataatatcgtaaaaaggaaccggcacatcttcccgataacgggtccggaataaaagagtgtatttgcagaaacgcggcagggacttgaaaaagtcctgccgcgttctcgtttttctgttcgcccgtcccgaggtctaaatatcgtcgtcctcgacatacgacaaatcgtccatcagcgcatctatctcccgacgctcctttttagtcggacgtccggttcctctgtcccgcatcacgaatacggtctgatgcggaggatgcagtttgtccagttcggactgcggagtgagattctcgacatactgagcgactttcgcagcgccctgacgcgtagagacgaattccagaacgcggtacgtataggtaaccgcgccctttcgcaccgtcagcatatcgcctatctttatctcatacgacggtttgcagtaggcgccgccgacaagtacgcgattcatcttgcacgcctccgccgcatcgctgcgcgtcttgtatatacgcacggaccagagccacttgtctattcttacgccgcttcccatgccgttacttgttattgaactcgttcatggcgctctgtaaacctcggcacacgaaagcctccacggcctgtcccgcgagtttcagacgctccggaagcgcctcgcgttcgcccgacgtccactccccgagaacgtagtctatctgcccgccgcgtgcgaaatcgccgccgatgccgaatctcaatcgggcgtaatcgctgctgccgagcatctcgttgatgtttttaagaccgttatgaccgccgtcgctgcctttgccgcgcaggcgcaaagccccgaacggcaaagctatgtcgtccaccaccacaagaaggttcgacatctctatcttttcctgctgcaaccagtagcgcaccgcctttccgctcaggttcatgaacgtggagggtttcagcagtgtaacggcatttccgcgcatgcgcacgctcgccacatcgccgtaacgggagctgacaaaagaagcattggacaccgaagctatggtgtccaatactctgaaacctatgttgtggcgggtttcggcgtactcggcgccgatgttacccaaccccgtaacaagatatttcaaaacaggttatcttgaaatccgttatttcgaagcctcggcggccgcagcggcaccgcgcgacgcacgagttacgcgaacggcgcaaattgcagtagtcgcaggcgtcagcagcgtaaggttgtcgtaatgaagatcgcctacgaaaatggacttgccgatacccaaatcggtaatgtctatcgtcagttcatcgggcagattctcgaccagaccgctcacacgcagtttacgcttgctctgagccagctttccgccgagcttgacaccctccgagtttccgaccagtttcacgggtatgtcgatagctaccggctttccgctctgaacgcggtagaaatctatatgcagaatctcgtcctttacagggtggaactgtacctcgcgcatcacggtctgaactttctccccgtcagtgtccaactctacgatgtaggcgttgggggtgtagataagcggttttacctctttggcatcgacgctcaaatgcagcgtatctccgcctccgtaaaccacgcagggaacctgtccggcacgacgaatgtccttgctctcctttttgccgaaaccttcgcgtttcgcagctttcaattcgaatgttttcatctttcttttattttttaattgtgttaccttcggcatcactcagcttcgggaatcacccgctgcgcatttctcagccgtttccggcatccgcattcgaagccccataaatgcctgcgggcgcaaagataatactaatgcgcgagattccaaaacccagagaagaaaaacggagcgcggcttcgagacgcaacgattccaataataaatttgcttccgagtcggttccgcccgttttcaagtcattcggcaatccggaaaaacagctctcaaagtatgtccgtacaaatttccgctgtatactgccgcacaaaaaaaatctccacggagtacgcggagatataggcgttaaagcctgcggcatgtagccttgttgtggtaagatgtagaactcttacagtgcaaatataaactaaaaaattggaattgacaaattttaattttatttttacggaaaacaatatgctatatggcaaaagtattaggtcttgatttgggcaccaattccatcggttgggccatagtggaacagaatgactgcggttatacgctactcgataaaggcgtggacatatttcaggaaggcgtcgcacgcgaaaagaacaacgaaaaacccgccgtgcaggacagaaccaatgcacgcgccctgcgaaggcactacttccggcgccgcctgcgcaaaatagaactgcttaaagttttggtcaaggaggacatgtgtcccgccctgacggacgagcagctctccgcttggcagaaaaagaagcaatacccaatggacgaagagtttctggcatggcagcgcacctgcgacaataccgacaagaatccgtaccatgacagattctcggctctgacccaaaagctggatttgaataaccggcaggacaggcacacgctcggacgggcgttgtatcatctggcgcagcgcagagggtttctgagcaatcgaaaagacacgaccgacccaaacgatagcggcaaggtcaaggatggcataaaagacctctccgatgagataaaagctgctggatgcaactacttgggcgagtacttctatatgctttaccgcaagaaaggcaaaatacgcacgaaatacacctcgcgcaacgagcattatctggccgaattcaacgccatttgcgagaagcagaatcttccgcagcagctcactcgggctctgcatcgcgccattttctaccagaggccgctcaaatcgcagaaaggtctggtaggtagatgcactttcgaaaaaagcaaaagccgctgccccatgtcgcatccgcgcttcgaggagttccgcatgctttcgttcataaacaacatcagagtgacgggaccggacgacagcgctccgcgcccgctgaacgagagcgaacggcaaaagatactgccccttttcatgcgcaagagcaagccgcacttcgacttcgaggaaatcgcccgcaaactggccggcaaagggcagtacgcatgcaaaggcgatgcgatacaagcaccctaccgcttcaatttcttcaaatcgcactcagtttcggggtgtcccgttacggccggactcagctcgattttcggagacgactataagtccgagatatgcagtctgtaccgaaaggcggagggcaaaaccgcggatcggattatagacgatgtatggcacgtcctgttctcgttcgacgacgagcagaagctgcgcgagtgggcccagaacaatctgcaactgtccgataccgaagccgaaaagttcgcagacatcagacctccgcaggggtatgccatgctgagcctgaacgctatagacaagatgctgccgcatctaaggacaggcatgcgctacgacgaagccgttttcgtggccaacctgaaagccgttcttccagccgacgtatgggtagacaaagcggttttgaacgaaatcgaaaaagacatcgccgacatattgcaaaactacgtgcgcaatccttacgacaggttcgactcgaaggagcgccgcatttcggactatctccgagggcaaggaatcgacgactcgcgcacaggacatctctaccacccctccatgattgagacataccataaggcagagccaaatgcggacggcatcatgcagctgggagatccgcgcacccccgcagtccgcaatccgatggccatgcgtgcgcttttccggctccgcatactgctcaacaaacttctgcaagagggttcgatagaccgagatacgaaaatcaacatagagttcgcaagagagctcaacgatgccaacatgcgaggggcaatctataagttccagcgcgagaacgagaaaaagaacaaagaatacgccgatgaaatacgcaaactatacaaagaggctaccggcagggacatcgaaccgaccgacgacgacatcctgaaatacaaactttgggaggaacaaaatcacaaatgtctttacaccggaaccgaaatcggaatcaccggttttatcggcacagatactcggtacgacatcgagcacaccgttccgcgctcgcgcggcggcgacgactcgcaggcgaacaagaccctctgcgaaaagcgtttcaatcgggaaaccaaacgcgccaaactgccctccgagctggacaatcatgccgaaatcatggcaaggatagaggctctcggctggaaagaggaaatcgacgacctgcaaaagcaaatcgaaggaacgaaagtccgcagccgtaacgctacgaccaaagacaaaaaggacgcggccattcaggacagacattttttggaaatgaagcgcaaatattgggcagacaaatacgagcgcttcaccataaccgaagtgcccgacgggttcagtcttcggcagggcgtggacatcggcatcatcggcaaatacgcccgtctgtacctgcaaaccgttttcgaccgcatctacaccgtgaaaggctccaccacggcggcattccgcaaaatgtggggtctgcaaagcgaatacaccgtcaagagcagggacaaccacacccaccactgcatggatgcgataacaatcgcctgcatcgggcgcaaagaatacgacgcatgggcgcaattcgaggacgacgaggacaagcacgaatggtacgggactgcaaggccgcaattccccaaaccatggccgacattcaccgaggatgtcaaggcgataagcgaccggcttctcgtctcgcaccacactgccgacaacatgcccaagcagagccgcaagaagctgcgcatccgtggcaaggtgcaatacggcaaagacggaaaacctctttacgttcagggagacaccgcccgcggttcactgcataaggatacattctacggggccatagagcgcgaaggcgaaatcaaatacgtggtgcgcaggtctctcgattctctgcaagaaagcgaaatagacaaaatcgtagacgatgtcgtccgtcaaaaaatccgagacgcggttgcagagaaaggtttcaaggaagctacggccgacacgatatggatgaacgaacagaaagccattcccattcgcaaggtccgcatattcgccacgagcatcacccagccgatacatcttaaaaagcaccgcgacttatcgacaaaagagtacaaacaggaatatcatgtagccaatgacagcaactactgcatggcaatctacgaaggcacggacaaaaaaggcaaaccgaaacgctcgttcgaaatagtcagcaatatcgaggccgccgcatatttcaaacgaagtgccgaccgcgccgcgcgccccgatctcgttccgcagtcggacaaggacgggttccctctgaaatatatcctgaaaacgggcactatggtgctgttctacgaaaattctccggcagaactgcacgaatgctccgaacaagaactggccaaacggttgtataaaataactacaatgagttcgatgactctgaaacaaggcgaaagaatctaccagtacgggactctcgttctgagacatcatcaggaagcacgccttgcaaccgaattgaaagagaaaaacggaatctggaaaacgggggaagaataccgtcctcttataaaattatatcacacccagctcaatgcttatgtcgaaggctacgacttcgaactttcggttacgggcaaaatcgcattcaaacaccggcagccatgataaagcgcgctctgtttttctccaccccgttctgcctgagcctgcgcgacaaccaaatggtcatccgcacaaaggaggaacccgacatgcagagaagcgtgccgatagaggacataggcttcgtcgtactggaacacaggcagacatccgtttccctgccactgctcaatgcgctgtccgagagcaatgtcgcggtcattttctgcaacgaggcgcgaatgcccaatgcgatgctcatgaatctggactcgaacaaaacgcagggagagagtttcagggcacaaatcgaggcgagcgagccgctgaaaaaagggctttggaaacaaatcgtcgaggctaaaatccgcaatcaggctgcgctgctgcacaaattgggcaaagacggcgacaagctcaaacctttttacatgaatgtcaaaagcggcgatgcggacaacagggaggccattgccgcaaaaatctattgggcggaacttttcggcagggacttcatccggctgcgcgacggcatagaacccaacaacctgctgaattacggttacactattctgcgggccgccgtagcacgctcgctgatgggttcgggactgttccccgctttcggcatctttcaccgcaaccgttacaactcgttccctttggccgacgatattatggagccctaccggccgtatgtcgatgaaacagtatatgacatctatcgtcagggcattaccgaactcacgccagaaaccaaaggccgcctgctgcggctgcttttcgccgacacccgtttcgaccgcgtaacaaggccgctcgacgtcggactgacattcacttcggcatcgctcgccaaatgcttcgccggcaaacagaaaaaactgtcttttccgatgttagaataaattccgcgtatgtccgaacttcgcctaaacgcctaccgtatcatgtggctattcgtattcttcgacctgccgaccggcaccaaaacagaacgacggaatgcggcccaattccgcaaatcgctggaaaaggacgggttctcgatgatgcaatactccgtctatgtgcggcattgcccctcaaaggagaatatggatgtccatgtaaaaagagtaaggcgctccatgccgccctccggctacacgagcattctaagcgtaacggacaaacaatacggcgagattctgaacttctggggaaaaatcgagcaggccaaaccggaaattccgcaacaattggaatttttttaataactttgttctttgaaataggaaaaacgacatcgaatccacttcttcgactccttcactgccgttttgcaggctgtaaaacagccgtaaaagcaaggcattcaacagaatcgactatcgcagttgtggtttgatgtagaaactcaataagatacaacaagtgccgatttgcggcaagctgtcttgcggttgtggtttgatgtagaaactcaataagatacaacggtacaaataaatataaaatgcaatgcaagttgtggtttgatgtagaaactcaataagatacaacgaaagggaacaattcatatacatattgaaggttgtggtttgatgtagaaactcaataagatacaactgcttcgtagacatagcgacggacggcacagttgtggtttgatgtagaaactcaataagatacaacc

SEQ ID NO: 520 - DNA, 15296 bp, synthetic construct
  source 1..15296: mol_type = other DNA
  misc_feature 1..15296: note = Synthetic
tatccgtggcggttcctgcggatgttgaccaaagaaaacatccggaaattcatccgcaacaacatcacgcattcaaaagaaagcaatgtccggctcgctgccgcgatgggatggggtgtatcttgcggaatcctgccgatttgggggtatcagctggtgtttgcgttgtttacggcccatctgttacgcctcaacaaagtgctggcggcggtgttttccaatatcagcgtgctgccgctcattccctttatcttgtatggaagccttatggcaggtgcgtggataaccggttcggcatcggtgttttccctgcatgagatttcgtttgcctttgtccgtcagtttctttggcagtatgtgataggcagtgtcgtgcttgcttttttggcgggcatggcggtctttttgattgcctgggcggttttaggtatctttaaacgtaaaccggaacatgagtagtttttttgtaaaaatatacgattggttctgtcggcataagactttgctctatgtgttgcttgcggtatgggtgctcgttatgggcgcgttggcattgcgcatgcgttttgtggaagatatcacctcgtttttttccgataatgaaacggggcgccgccaatcgctggtgttcgagaatctgaaacttaccgaccgcatcgtcatcctggtggaaggtgaggatatggaatccatgatggatgccggagacaaggtgatcgaagcattggaacctttaatggaagaaggttggctttcccgggttacgccgggtgtggatgccggcgcgatggagcggagcatggcgtttatttacgacaatcttccgatatttctcgatacagtggattatgaacgcatagaagccctgttggaaaccgattcggtagaagcggcggtgcgccgttgttttgatgtgatggcctctccttcaggtgtgttcatcggaaaaagctgtctgcgcgatcctttgggcataggattccctttgctgacgggactggcgcgattcggcgatcaaggcggttatgaactgtatgccgaccatattttctcgcaagacggttcggtcctgtttctttttgccgacccggtgaacggtatggggagtacgggagagaacgatgcctttgtgagccgtctggaagaagtattggcacaggtaagtcgggaaacaggcatggagataagttatttaggagcttccgccattgccgtttacaatgcccgccaaatcaagaaagacaccatgtttacgctctcggtggcgttaatggtcgttattgtggttatatccctttcgctccgtagcaaacgggcggttctgcaaatcatattgccggctttgttcggggccttgttcgccttgggcatcctttcgcttttgcaggggcagatatcggctatagccatgggggcaggtgcggctatctttggcgtggctctgagttattccattcactttgtttcgcatcatacgcatataggcaatccccgacaagtggtggcggaattggcatatcctctcacggtgggaagtttcaccacgataggggcttttgttgccttgctgtttacccattccaggcttttgcaagattttggcgcgttcgcctcccttgccttgataggcaccaccgttttctgtttggtgttcctgccgcatttcctgtcttctgccaagggcggaaaacaaggaaaactattgcgtgggatagaccggataaacagctatccctatgaacgcaatccctggctggtgggaacacttctgctggttctggcggtgagtgcgttcttttccgatgaggtccgtttcgacagcaatctgggcaatctgaattatgaaccgccccatctgcgcaacaccgaacggaagttggaacaacttacaaattccgaaacctccagtgtttttctagtctcctttgcccccactgaagtacagacgcaggaagcctgccatgaattggaaatatgcttgcaaaccttaaaaaaagaaggaaagatacgttccttttcaacggttgacggatatttcgtgaatgccgaatgtcaacgtcagaggatagcttgttggaacggattttggaaaaaaaggcgtgtaccgctctgccaaaagataaacaaggccgcttctgccgtcgggttcagcgagcaggctttcgatgcattcggggaattgctgagaaaagaatatacggtctgcgattattcggacgagatgttggcggatgtaccgctgttttccgactttatcaacgcctcggattcaggcttccttttggtggcgaaaatggaaatcgaacaggaagaaaagccctttgtttacgaaaggatagcttcttgtccgaacaccaccgttatagaccgtggttattactccaaccgcatgatggaagaaatcaacaacgatttttattttatcctgttcgtttcttcccttttggtttcgatagccttgctgctttcctacgggcgtatcgaactgatgctgctttccatattgcccatgtttgcaagttggatcatcattttgggctttatggccttgttcgatattccgttcaatatcgtcaacatcatactttccaccttcatattcggtatcggcgacgatttcagcatctttatcatggatggccttctgagtgaatacagggatggtaaaaagatgttcaatgcccataagaccgccatcttcttctcggcctttaccacgattgtcggcttgggcgcactgatattcgcccggcatccggcggttcgctccattgccgttatttctgttctgggcctgagcgtggtgattttggtatcctataccctacaacctgttcttttccgccgtttggtgtcgttgcctgtgcaacgaggcggatttccttataccttgcgggatttggcaagaacaatctatgcgttcttttatttctttttagggtgcatagtggctcagattcttgttctgcttagcttctgtattcccatcgcccgttccaagaaacagtattgcctgcatgtttttatctgtgccttcatgcggctctttgtccggaccattccctctgtcaaggtgcagtgccttaacacgacgggagagaccttcagaaaacctgccgtcctgatagccaaccatcagtcggttatcgatattttgttgatgttggccataacccctaagattgttatggttaccaatgactgggtatggaaatcgcccgtaattggcctcattgtacgttatctgggatgtttccataccgccgacggctatgccgctgccgttgaacaattacgcgacaaagtggcgcaaggttattcgattgccatattccccgaaggaacccgttcggaagacggttcgatagcgcgctttcacaagggagcgttttatgtggcggatgcgttgaaattggatatcgttcctgttttgatttacggggccggtatggtttcttccaaacggcagtctttctatatcaagccggggcgtgtgttgtcgcaaatcgaagcacgtgttgcctatggaacaagtttcggcaacacctatcgggagcaagccaaggcttggaacgcttggttcagggaaaaatatgccggattatgcgatttgaacgatagggccgacaatccgtatttccgcaacgctttgcgccgtaatttcctctacaaagggcagggattgacctatcgggtaatgaaggaaatccgtcgcaacgactattacgattgtttggacaggcttattccccgtcaggcagtggtaaccgacataggttgcggctacggtgcccgtgccttgatgctgggaatgctttcacgcaaccggagaataacgggttttgatgcggatgcggacagaatacgtttggcagaacattttttcatgaacaaaggcaatatcgcttttgcgcttctttctgaaattccggaaaagtggcaggaatcggatgtgtttctgataaaccggcttggcgagatatcgttgacggaattattgcaaagctgtctgccgaatttgaaacagggaggaatgatggtgattgacggccagatggcaggacagaatcgtgaggatatcggtgtgtttgcagttgccgcttctttgcaggaaacaacggcagacaacgggtttattgtattgaaaaggagggattgaggatggaaaattttgaagtggttattgtgggtggcggcttgggcggtttggcgtgcggcgtgatgttgagcaaggaaggcatgaaagtgtgcgtgctggaacagcattcgcagattggcggatgtcttcagtctttttaccgtcgcggcagggttttagacacgggtatgcattatgtgggcagcctgcaaccgggtcagattctgcatcaatatttcaaatatttcggcgtgatagaccgtttgcgcctgcaacagctcaatcctgaggcttacgacattatcgttgccgctaatggctcccgttattgctatgccaacggagaagaacgttttgccgcccgtcttatagagtattttccggaagaaaaggccggtatcaggaaatattgcaatttgttgaagaaggtaggcaaccttatttcgcccgaggtactccgctccgggcatatttccaacggagggcttgaatacatgaatgtttcggcctgcgatgtgataaattcctgcacgcaaaacgaaaccttgcggaacgtgcttgccggcacggtctcgctgcatagcggcgacagggaacgtacttcgttttatgagcacggcatgatcatgtattcgtatatggaaagcgcttaccgttttaaagacggttcacagcatgtggccgatgccctggccgacgagataaggaaatatggcggagaagtgcgtttgaacgcaaaagtgacgggtgttgaaatcaaaaattcccgtgtgcgcgaaatccgaataaacggtcatgaacccgtttcggcaaaatatgttatctcggatatccaccctgccggaatgttggatctgttggagggtgaaaaagtgctccgccccgcttattgccgtcatatacattctttgccgaattcttacggttgttttacaacgcatatactgatgaagcccggcaagaccccttatgccaacagcaattattatttccataaccgtccggacgcgtggtcttcccaaggcgattacaagggttgcaatatcccggttatccttttgagcatgcaaccgcctaaagagggggtttatgcagacgcggtttctttgctgacaccgatgtttccgcagatttttggagcttggtcggatacggaaatcggcaaacgtggcgaggcctatgaagcgcttaaaaaacagtacgcgggtgccatgatggattgtgtttcccgtttgtttccggaaatagaggcgcaaactgaggcggtctatacatcaacgcccttaacctatcgtgattatacgtcaacgcagaatggctccgcctacggcatcgtcaaggattgccggaacgctctgctttcgcgcatacccgtccgtatgaagatagagaacctctattttacaggacagaatatgaatgtgcatggatgtttgggcgtttgcgccagtgcggcggtaacctgtagcgctttgttaggggaagaatatctggtaaaaaagataggaaatgcgtagaatcttgaaaatatcggcatggtgtgtggccgcgcttctggcggttttgctgctgttggcggcaacggtctggattttggcggtgaacgccgatttgaaaaggccggatatatgtgtggacactaccgattatacgcttgacctttcgctcgatacacttcgtgtttgccgtggcaatacgttgtacagaaacccttatgggatatgggaagcggatataaagggcgatgcggtggaacgcggggcggtcatgggtgcgatgagccgggatttgcttcattttcaggaagaggtgtttgtaaggcagataaaggaattggtgccttccgatacgtatcttggcgtattgcacaagctcatgttgttttttaaccgaaagatggcgtgtcatatacccgaagaatacagggctgagatagcggcgctttccgaattttgcagccacgatttcgatgctttcggaacgccgtatgagcggcagctcaactatcatgccgcccacgacatcggccacgccatgcaggaatatatgctggtagggtgcagttcctttgcggtatggaacgaaaaaagcgccgattccacgcttttgataggcaggaacttcgatttctatatgggcgatgattttgcggcgaacaaattggtgagttttgtaacgcccacatcaggctatcgttacgtttcagtcggatggccgggcatgataggtgtggtgtcgggtatgaatgaaaaagggcttacactcaccatcaatgcagccaaaggagcaattcccacccatgccgccatgccgatttcgcttttggcgcgccatatcctgcaatatgcggccacgatagaagaagcataccggatagcggacacctgccggactttcgtttcggagtccttgctgatagggcaggcggagggccgttgcgccgccattatcgaaaaaacaccggaaaaacaggccttatattccgtacgggaagcaccactgatatgcaccaaccattatcagtcggaagccttttccgaagacccggccaacaaggagaacatcgcccggagcgacagcagataccgttaccaaaggctggaggagctgataagtcaacaagctccgctcacacctcaaaaagccgcctccatcctgaggaacgacaaaggattggaagaaaaatccatcggattgaccaacgaaaagtccatccaccaatacattgcccatcattcgattattttcatgccggagcaaaggcttgtgtgggtttccaccttcccttggcaatcggggcggtatctttgttatgatttgaaccgcattttcggaaatccggacatggttttgttttcccatgcggacaacgggcgcgatattgcggaggattcctgttttctcgaaaacgtctatgccaaggtgctccgttatcgggaacgggcggcagcggtgcggaaagccgttgcgcaatccgtgcaactcacaagtgcttatgtggatagtttaacgatagaaaaccctgatttttacgaagcctatcttttgcagggcgattaccattttatgcagggcaaccgcctgcaagcggaaacagcctggaaaacggcgctgacaaaagaaattccgagagaaaaccagcgggaagaaatcgaaaagaagctaaggaaatatggtaagagataaagaaatacattaccgctcgcatgcggaaatcaaacgctttcaagaagaaagattggtggaagaattgcgctatctgcaatccaattccaagttttaccgcacgatgttcgaaaaacacgggatagatattgcaaaaatccggcggatagaggatttgcagacccttcccgtcacaaccaaagaggatttgcagttgcataatgccgattttatctgtgttccccaaaacgaaattatcgattacgtaaccacctccggcaccttgggaaatccggtaacatttgcgctcacttcgggagacctggaccgtttggcatataacgaagcctgttctttttccgtatgcggctgtacctctcaagatattctgcagttgatgaccacaatagaccgccgtttcatggcgggattggcatattttatgggcgcgagggaattgggctgcggcgtggtgcgggtgggcaacggaattcctgaattacagtgggataccatcaaacgcatcaagccgacagcttgcatcgtggtgccttcgtttctgctcaacctgatagattatgccgaagccaacggcatcaacctgcacgattgttccttaaagaaagccatctgcataggagaagccctgcgtacctccgaaggcgtcctgaccgctttgggagcgaggataacgcagcgttggcccgaactcgaactgttctccacctatgcctccaccgaaatgcagtcgtcctttaccgaatgtgcctgtcataacggcggccatgtgccggccgacttgattatcgtggagtttctcgacaacgagaacaaacccgttccggcaggcgttcccggagaagtgaccgttaccacgataggtgtgcgcggcatgccgttgcttcgtttcaagaccggcgatatctgcatccattacgatgaaccctgccgttgcggacgcaataccgtgcgtctcagctccgttctggggcgcaaggggcagatgataaaattcaagggaaccacgctctatccgccggctctgttcgatattttggacaatattcccgaaatagaaaactacatcgttgaggtctataccaattccatcgagaccgatcaggtgcagataaagattgggagcaagaaccatagcgaggaatttgtcaagcagataaaggatatcttccgctccaaagtccgtgtggcgcctgatgtggtgttcgaggcttcggagataatcgctaggattcagcggcctcctgtgggaagaaaggtagttaagtttattgatttgagaaatgtgtaacaaacataaaaacacaaatattatgaaaaagatttgtttggcgatttgtttaatcgttgccggctttacggcgaaagcgcagaatgccatgaatggcgtttcgttggtcaatgtgtatggggctgattattcggaggtttggattagggatgcggaaaagtcgaaattaagccagtttgtaagcaaggcggaaacggcaaaggagtacgtatctacctttgaagatatcaatctgctgttggctcaagatcctgaaaaatacgatttcgggaaaatgcttcgcaaaccggtaaaacttgacatagaaccggtttgcaacctgattcggcatcgagacacagcagatttgcgcgaacgtccggaacatccgataaatgtttccgaacaattaaaacggtatgaattgcaagaaacggaaggtttgggtatgatttttatcgccacaaatctggacaagagaatgggcaaaggcacctatgtggtggtttgctttgatattgcaacccgagacatcttgttccgtcaagaaatcactacttcggccggcggtttcggattacggaactattgggccaacacggtggaagacataatagaggataaggccctgcggaacgaattgcgcaagttgatgaaataaatagtgatttaaagagagccgccccattcggggcggctctcttttgactatacctcctccaccccagccaaaatatcaattccgccaaacctacaaacccgaacaagcctacaaagtatcggttcttccctatcgtgagaatgccggaatagagaatataccgttatacgggatattttcaattctttaggcatgaagaaaccgttttactcaacgcactgcgtaaaaatactcaatgcactgcgtaaaatgtaaggggtggttgtacagagttgtataataggcatataggatttatcaaaaatgccaatatcgaaaattcaaaaagcccaaatggcactttggattgctctttggatgaatgggctctgttgaaattccttaaagccaatccctccgcaaagcagacagaaatggccaaacatatcggaaaatcggaacgtaatcaaacgcatgacccctacattgattgaacgcggcctgcttgagagggaaaacgggaaaaggaacggcaagtgggtggtgaaaattcaattatcttgataaaagtattgttttacatttattttgagagaaggcagaagaacaagcaacaaaaagcccccacggagtacgcaggggcataggttaaaaaaccttcggcatatagccttattgtggtaagatgtagaataacttacaccacaaaggtactaaatttttttaattcgtcgaaatacagtatttttaaaggacaaaagatattgttatggaaaaagttttaggtttagatcttggtaccaattctatcgtatgggctatcattgaacggaatggcaatgagtgtaaattgttgggtaaaggtgttaatatttttcaagagggggtggccagagagaaaggagtggaaaaacccgcagttcaagatagaaccaatgctcgggcttctcgtcgacattatttcagaagaaggcttcgtaaaatcgaattacttaaagtcttggtcgaaaatgatatgtgtcctcatctttctcttgagcaattaaaagaatggaagacaaataaaaaatatccaatggaggaagatttccttctttggcaacgtactaatgaaagtgaaaataaaaatccataccacgatcgttatagagctttaacagaaactttggatttggccaaacaaaaagatcgttatgtgttggggcgggcattttatcatttggctcaaagaagaggttttagtagtaatcgaaaagaattgcagagtgatgaagattcgggaatggtaaaatccggaataagagcgttgtctcaagacatggaggatgctcattgttcgtatttgggagaatatttttaccaattatatcagaaaagggagaaaatccgggagaaatatacctccagaaacgaacattatttaaaagagttttacgcaatctgcaagaagcaaaacttgcaggaagatttaatgttgaagttacgttctgctatcttttttcaacgacctcttaaatcgcaaaaagggtttgtcggcaaatgtacttttgaaaaaggtaaaagtcgctgtccggcatcgcatccgcgttttgaagagttcagaatgctttcattcatcaacaatattcgggttgccgatcccgaaacaagagattttcgcccattgagccaagatgagataaaacaaataacaccattgttttatcggaaaagtaagcctcattttgattttgaagatattgcaaaaaagattgcaggaaagaaaaatgaatatagttgcaagggagaccgggaacaaaaaggctttcgatttaactatgcacggacggctacggttaccggatgtccggtaacagcagaatttatcgctgtttttggggatgaatggatggcgaacatgtgcagccagtatattcatgcagataaaaaagaaggggaaaatcaagaagacgaaatacttaacgatgtttggcatgcacttttcttctttgaagatgaggaaaagttatgtaaatgggctacggaaaagttacaacttgataacgagcaggcaaaagttttttcggaaatacatcttcctcaagattatgccagtttaagtttgaatgccattaacaaaattctgccgtatctccgcatgagtatgcgttatgatgaagcggtttttgtagctaatttaagagcggtattaccgaaagaactgtgggaaaataaagaaaagaggagacagatagagaccgatgttttgcaaatagttgaagagtattcggaaaatccgctcaatcgagaattcactaaagaacaatgtgtaaaagactatttatggcattcggtaggtgtggaagaaaagaagttggcacatctttatcacccgtctatgatagaaacatatccgaatgcggaatgtaatgcacaaggtgttttacagcttggttcgcctcgtacacaatcggttagaaacccaatggccatgcgggctttattccgtttgcgtcacttgataaacagacttttgcaagaaaagaagatagataggaatacgaaaataaatatagagtttgcaaggggtttgaacgatgccaacaaacggaaggcgatagagcaatatcagcgagaaagggaaaagaaaaatcaagaatatagagaggatataagaatcacatataaagaggaaacgggtaaggacatagaaccgacagaaacagatattttaaaatatcgattgtggaaagaacagaatagaaaatgtttatatacaggaaaagaaattagcataagagcttttcttggggaggatccggcgtttgatattgaacatacaatacctcgttcaaagggtggggataattcacagatgaacaaaacgttgtgtgaaaacagatttaatagggatataaagggcgctaaattaccttcggaactcgctaatcatgcagacatcttggctcgtattgaaactttgggctgggaagaaaaaatagaaaatcttcaaaaacaagtggaaatgcgtcgacgggatagcaaacgagccacaacgaaagaacaaaaagataaggctatacaatcccgccacaaagcgcaaatggaactcgattattggaagggaaagtaccaacgttttgtgatgacagaagttccggaagggtttagcaatcggcagggtgttgatattggtattattggcaagtatgcccgattgtatttaaaaacggtctttgacaaaatatatacggtgaagggtgctacaactgcggagtttcgcaagatgtggggtttgcaggatgaatatgcaaagaaagagcgggtcaatcatattcaccattgcgtggatgctgttgttattgcttgtatcggaagaaatgaatatgatgcttgggcacagtatatggccaatgaagagcgttttgagaaaggaaacggacaagccccttgttttgcaaaaccgtggccaacatttaccagcgatgttaagcggttggccgatgaagtgttgatatcgcattatacggctgacaatatgcccaaacagagccggaagaagttgcggaaacgtggaaaagtacaggttaatgcggatgggaaacctgtttatttgcaaggcgatactgcgagagaggtattgcatatgcagacattctatggagcaatagaacgagatggagaaattaaatatgtagtacggaaagccatcagtcaattgcaaccagcagatgtagaaaagattgtggatgaaaccgtgaaacaatgcgtaaaagaggctatacaggagcttggatttaaaaaagccattaatcctagcgagtacactatttggatgaataaggaaaaacaaatccctatccgaaaggtacggatttttgcaagcaatgttaccaagccgatttcattgaaaaagcaacgggacctttcccccaaggactacaaacaaaattattatgtaactaatgattcaaactattgtttggctttgtatgaaggagcagatgcaaaaggaaaagagaagaggagttttgggttgattagcaatcttgaggcggcaaaatactttagattaggtacagacaaaaagaagcaatcctatttggttcctatttctgataaagatgattatccacttaagtatgttcttcgtgcaggaatgatggtgcttttttatgagaatacaccacaagaattatataaatgttcttcagaagaattagggaaaaggttatataaaattacgggattgtcttcgatgacattgcaggggaaatacacttatggggtgttgacgttcaggcatcaccaagaggcgcgaccagctggagaactaaaagcaagaaatggggaatggaaagtgtctgatgactataggcctattattagggtttatcatacgcaattcaaagcccttgtggaagggtatgatttcgaaataactattactggtgaaatgaaattcaaacactgacatcatgttgaaacgtgcgcttttctttgccaaccctcatcagttgagtttgaaaaacaatcagatgataattgtaagcaaagatgatgcccaaactaccaaaagtgtgcctattgaagacgtgggtactgttgtgctggaaaacccacagagtacaattacgttacctttgctcaacgctctttccgacaataatgtggccgttattttttgtggagcgaatagaatgcctaatgctatgttgatgaatttagatgccaatacaacacagggcgagaattatcgggcgcaaatagaggcgggcgaaccactcaaaaagaatctttggaagcaagttgtggaatgtaaaattcgtaatcaggcgcggttattgacaaaaatagggaagaatggcgataaattgaagccatattggatgaatgtaaagagtggagacatagagaacagggaaggcattgctgcaaaaatttattggacggagtttttcggaaaacaatttgtgcggcagcggacaggagcagaccctaatgcattgttgaactatggatatacaatacttcgggctgcagtggcccgttctttgatggggtctggactttttcctgctttcggaatatttcaccgtaatcgatataatgcgtttcctttggcagatgatattatggagccgtatagaccctatgtcgatgaaatagtttggaatcttttattacaaggggaaacgggactgacacaggaagtcaagtcggccttaataaaagtgttgcacactgatacaaaatttgataaggtaacccgtcctcttgagatagggttatccattacctcggcttcgttggtaaaatgttttaacggcgaacaaaagaaagtgatatatccacttgtagagtaatgactgaagtaagattaaacgcatatcacattatgtggctttttgtgtttttcgacttgccgaccacaaccaagacggaaaagcgtaatgctactctttttcgtaaagcgttggaaaaagatggtttttcgatgatgcagtattcggtatatgttcgtcattgcccttctaaagaaaatatgagtgttcatatacgaagggttaggcagtcaataccggcaataggatatgtcagtattttgagcgttacagacaaacaatatggcgatatattgaacttttggggaaagattgaacgtcctatattggaaacgcctcaacaattagaacttttttgatacctttgtgtcgaagagaaaaaactacatcaaaataacttcttcagtatattttcttggttttttaaccttgaatttatgaattaaacagcagaaattcagtaaaaagaaaatctgaagttgtggtttgatgtagaaaaggaataagatacaactctctccttgccgaaagtcagtacgaggagttgtggtttgatgtagaaaaggaataagatacaaccgcatatggcggtaaatctgacaataattgttgtggtttgatgtagaaaaggaataagatacaactagcaaacaacaaggcacagaccgaagaggttgtggtttgatgtagaaaaggaataaggtacaacgcactcaagaaatttcacctactgcacaagtt

SEQ ID NO: 521 - DNA, 15232 bp, synthetic construct
  source 1..15232: mol_type = other DNA
  misc_feature 1..15232: note = Synthetic
tgccattgaatacccgtcatagccatagaaattcatcacatcaccctcgacacggggcaatgccacaggcatatgctttgcaagccgctcaaccaaaggccatatctgcggttcatcggccagcggtgcaaacagggcaaccacccttgcgccgctcactgcaatatgcttcgccacctcctcacaaatggccgcagaacgctcctgcacatcggccggaccaagtaaagcaagcctggcacgcacgtcacgcctcaacgccctcttatcctttgcttccatgttccacagcatcaaagaaaccaatcaccctgttggctgcggcaaaagaggtaatctcgccctgcaacaacaactgttcatagcgcgcaagcagttctcccatgccctcggcattatagaaacgcgacttcaactgctcgtctatagcctcatacatccaatatctctgttggctgcgacggcgttcatcgaaacagccgttcgccttcaccttgtcaatatagtttccaatcatcccccacaccttgtcaatccccaggtcatagaatcccgagtatgtcagcacctcggggcgcataccgcttgccggcataggaaacagctgcagggcatttctgtaatgcaccgctgcacgacgtgcctcctcggcattctcgccatcggccttgtttatcacaatgccgtcggccatctccattatgcctcgcttgatgccctgcagttcatcacctgcaccggcaatctgtatgagcaggaagaaatcgaccatagagtatacggccgtctcgctctgccccacgcccaccgtttcaacaaatatattgtcatagccggcagcctcgcacagtattatcgtctcgcgtgtctttcgcgccactccacccagcgaacccgccgatgcactcggacgtatgaatgcacgcggatgtgccgacaaacgttccattcgcgtcttgtcgcccaggatgcttcccttgctgcgttcactgctggggtcaacagcaagcaccgcaagctttccgggcgtgtttgaaagcagatgcataccaaacgcatctatcgaggtactttttccagcccccgggacacccgtaatacctaccctcaacgattttcccgaatgtggcaggcacctctccaccacctcctgcgccatagcctgatgctcgggcagcatactctccagcagtgttacagcgcggctcagcaccgtcacgtcgccacgcagcacaccctctacatagtcattcaccgacagttgcgccgcctttttgcgccgcattgtcgcaagatagggattcaccgggccaagagtctccactccatcgttcaccttgagccccttgtatgcttcactgttttcgggatgttccataaacaaaaggattctttctttgcgaagatagtaaaaagcattgtaaaaacaacggcaggcatacaataaaaaagttcccggagcataacgcccgggaactttcgtttcatttatccgcaatcacttttcaaaggacaccgttcaccacaagcgccttcacaagtgaatagaatttctcgactgtaggtatctcaacgcgttctgttggagagtgtggggacatcaatgtggggccgaacgacaccatatccatctttggatagttggtagagatgataccgcactccaagccggcgtgaataacgcgtacatcgggcatcttgccgaacatatcgttgtacgctgtcttgagagctgcaagcagaggtgagttcacattgggctgccagccgctgtagccaccgctcaattccaccttcatgcctgccattgcaaaacaacttgacagctgcaatgcaaggaactccttcattgtatcgcaagagctgcgtgcaaggatgttgatttcggccttgccctcgccaatcttcacaatagagaggttactcgatgtctcaacggtatcggggattgtcgggatgaagcgcagaacaccatcgtggcaagcgagaatgacatccacaaggttgtcctgaatctcctgtggcacaacagtctcaggcatctcggtctcgctcacagtgattgttataccctcctcaattgtagcatactcgctgttgtagagagcctcgtattttgccgcaatctccttgagttcgtcaatagcctcctcgggcaacgtgagtacaacctcgcagcttgcggggattgcattacgcatattgccaccgttccagcttgcaagcaccacagcaagttcatccatagcctcacgcacaaaacgtgccataagcttgtttgcattgccgcggcccgcattgatctcaagacccgagtgaccaccacgcaagcccttgagctgcacacgcactgcaacatcggcatcgtcactctcctcttccatgaactccattgatgccgagatgtcaagaccaccggcacaaccgatgtagagcacaccctcctcctcggagtcaaggttcagcaatatctcaccctcgagttcaccgccctttaggccgaaagcaccatacataccagtctcctcgtcggctgtgatgagcgcctcgagcggaccgtgttgcaacgatgaatcctccatgatagccataatggcagcaacgccaagaccattgtcggcaccaagagtggtattgtcggcatagagccaatcgcccttcaccacagttgtgattgggtcatttacaaaatcgtgcttgctgtcgggagtcttctgtggcaccatatccatgtgcgcctgcaatattatgcccttgcggttctcaagaccgggagtggcaggcttgcgcatgatgatgttgccggcctcatcctgccaagtctcaacattgatgctcttaccgaagtcgagcagatatttctggattttctcaaggtggcccgatggacgaggcacctgtgtcaaagcctcgaagtgtttccacacctcgcgtggctgaaggtctttaattgtaattgccataatctgtaaagtttgttataaaaattcctaaaattccaatccaagcacaccgtcactttgtcctcatccctctcaactgcaatgcagcaatgccataaagacccaggagagccacaagcaacgtctgtgtactatgtactatcaacgcaaaaacctgtgcatcggttgtcgtaaccccatacagcaccatgatgcttattatgacatagtgccatggacctgccccgttgggcgtgggcacaaccacagctatgctgccgccaacaaacaacagcaatgcagccgccaccgacaacccgctgctgaacccgaagcagaagaaacagagatagaactgcatgaagtagcagaaccatataccaaccgtctcaacaacgaacagacggccgttcttcatctttctcagcgaaaggagcccctcaatgaaccgtgcagcgaacgactttatccttttccatatcgacaacctgcgcagcaggaaaaagagcagcagcgacagggccaccaacgacagcagtgccaccattgcccctttgggtgtcgagagcatctcgccgcccggcaccctcaccccggcctcgttcacgaactcgcagaacacaggccactgcacggcaacagccaccagggtaattagcagcaccatcagggtatcaatcatcctctccatcaccaacgtacccagcgcgtgtgcaaagggaacgtgttcgtgccgctcgagaatgacacagcgcgacacctcgcccacacgcggcaacaccaggtttgcggcgtatgccacatagaccgaatccacacaggtggcagacgacgggttatatcccaatggagcaagagtgagtttccaacgccatcccctgaccacgtggctcattatgccaaagaaaaccgacaccgcgaaccacacaaggttcatccctttgagttcattccacagctgtgaaaagtcaaagtcatcatacaccacatacagtatgaagacacccaacagaatgggcagtaccgtttttaatgtataattgaaaatctttttcacaactttagaaacatttttaattgttttcgttacctttgcaacattgcggtagatggcctttgtgcaggatgcactgaaactgagccatacacaggcatctttgccggatatcgcaaagatagataattattgaagataaattgcttttttaagcataattaaataaaaaaagcaaccggagatgaaggaagtaacggcaaaaaagagattgggacaacattttctcacagatttgtccattgcaaagagaattgcagacaccgttgatgtatgtcccggtattcccatactggaggtaggtccgggaatgggtgtcctcacccgtttcctgctcgagaagccccacccgttgaaggtggtggagatagacgaggagtcagtcacctacctgtgcaacaatctgccccagttgcaggaggagaacatcatccccgatgatttcctcaagatgcacctcgaccgtctatacaacggcgaacaattcatgctcattggcaattatccctataacatctcgagccagatattcttcaggatgctcgactacaaggagttcatcccctactgcagcggtatgatacagaaggaggtgggcgaacgcctcgctgccggtcccggcacaaaggcttacggcattttgagcatcttcatacagctttggtacgatgttgaataccttttcaccgtcgacgagaacgttttctcgcccccgccaaaggttaagagcgccgttgttctgatgaagcgcaacaaccgcacggagcttgagtgtgacagcgaactgttccgcaagattgtaaagggcaccttcaaccaaagacgcaagaaactgcgtaactcaatacagcaaatcgtgggcaaggagtcgccactgctgagtgaccccatcctcgacaaacgccccgagcagctgtcaatagaggatttcattgaactcacaaagaaagttgaacgcgaattggcataaaagcagagatttatgacacaggaattcatcaaccacataaaggagctgatagagaagaaggactccgttctgatacaggaggccgtttcgcggctgcaccctgccgacattgccgagatatgccttgagctgaccaccgagcaggcacgttttctgtaccgtcagatcgacaacgaaaccgcagccgatgccctcatcgagatggacgaagacctgcgtaacgaccttctcgaagaactcccctccgaagccattgcaaagcggttcgtcaactacatggacaccgacgatgccgttgaaatcatccgcgacatggacgaggagaagcaggaagaggtgctttcaaacatccaggatattgagcttgccggcgacattgtggaccttctgcagtacgacgaggacaccgccggtggtctcatgagtaccgagatggttgtggtgaacggcaactggagtatgcccgagtgcctcaaagagatgcgccaacaggccgaggaactcgacgacatatactacatatacgttgtcgacgacgacgagcgcctgtgcggtcttttcccgctgaagaagatgattaccagcccgtcagtatcaaaggtaaagcacgtcatggacactaagattatcagtgtcgacgttgacacccccattgacgaggttacaatgctcattgagaagtataaccttgtggcaatccccgttgtcgacaagatcaaccgtctggtgggacagattacagtcgacgacatcatggacgaggtgcgtgaacagaccgagcacgaccaacagctcaccgccggtcttacccaggacgtcgagaccagcgacagcgtgttcgtgcagtcaaaggcgcgcctgccctggctcatcatcggcatgctgggaggtatcggttcatcgctcctgctcaactgcttcaccaacacactgggcaaccaccccgagatggcactcttcataccccttctggcgggtatgggaggtaacgtgggcacacagtcatctgccattgccgtgcagggacttgccaacaactcactgaactccaagcacatcttcaggcacatactcaaggagatggtagtagccataataaacgccaccatcctgtcgctcatggtgtacatctacaatttcttcatgtacggtgcaattgacatagtaacccttgcagtgccgttgagcctttttgtggtagtgctttttgcatcgggtttcggcacactcatccccatggtactcgagagaatcgacatcaaccccgcagtggccacaggcccattcatacagattataaacgacctcagcggtatgacattctacatgataatctcaatgttgctgagccaaataatgttatagaaccaatgaaaatgacaaaactcctatctacaatagccgcaattgcggcattgttgtttattgcccccacagcctcaacagcacagatacaggaattcaaggcgtggctccaggcccccgatggcgagctcacacagcaggcctttgccacaggcaagctcaacaagaccgacagcaacgaggctgcatacatcattgactccctctggctcaagaagagcgcacaggagcttgccccaatgtggcagcgactcaccatcacacacgactccatcaagctggcgtgtgcctgccgcgtgttcggcatagcgcccaaggacggccgcagcctctacatctcaatgcacggcggcggccattgccccaaagaggtgaacgatgaacaatggatgaaccagatatacctctacgaacctgccgagggcgtgtacatagccccacgcgcaccgtggaacacttcggacctgtggcaccgcaagggactcgacgagctactcgaggatgtcatcagagcctgcgtagtgttcgagggcgtaaaccccaacaaggtatatctgcttggctattcggccggcggcgacggtgtgtggcgactggcaccccgcatggccgacaaatgggccgcagcatcaatgatggccggccacccgggcgagtcatcacagattaacctgatgaacaccccctatatgatttggatgggcgagaacgaccactactacaaccgcaatacccttgccaaggagaaggcacaggtgatggactcgctcagtgctgcacaccccggcaagtacacacacagcagccacattctcaaggacaaaggccactggatggaacaggccgacactgccgcactcagttggatggcacaataccgccgcaccccctaccccaagcaggtcgtatggcgacaggaacttgtgacacgcaatcacttctactggcttggtgcccctgccaacgaggttgagcaaggcaagaccgtcattgcagagatcgagggcaacgacatcaacattgagcagtgcgactactcaaagctcacaatctatctcaacgaccacctggtaaaccttgacaagaaggtcaccatacgccacaaaggcaagaagattgcacgcgtgaagccacgccgcaccattgccaacctgtacaacagcctcaacctgcgcaacgaccgcagctacgcattcccttgcattgtagaggtggagttggaataaacaggatggggaaaaacctttttttcacataaatttgaacagtttcctaaaataaacattatatttgcagaaaccacagaaagacatcaatggcttttcattgcataaaatgaagagccacaatgtttttcgcattgcattttttataaaccaaaaataaaagacaatgagcgaaagtatcaaatcgaatgtccagccacaagagctgaacattgcgagtactcctgatgaggctgtcaatgccgctacgactgaaatcacagagcagaacagcatcaacatggagactccacaagcaccatcagaagatgcagccaatgaaaccgaagtcgcaaaaccggcaagccgtcaggaaatcatcagtcgtctccaggcaatagccgacagcgacgatgcgctcaacagcagagccgaggttgaatccctgaaggtacagttctaccgcatgcgtacagccgagattgaggcagccctcaaggaacacattgcccaaggcggcgaggaggcactctttgtgccacagcccgatgaactggaggaagccttcaagcaacacctgggccagataaaggcaaagcgcaatgcgtggctcgaagcacaggaaaaagagatgcaggagaacctcgagaagaaacaacagctgctcgagcagttgcagacactcgtggagaaagccgcacaaggcacccccgaggtgaacgaattccgcgcagtacaggcagcctggaaagagataaagaacataccgcagagccaggtagccccactgtggaaacagtaccagttgctcggcgagcagttctatgacgtactcaagataaacagcgagttccgcgaatacgacttcaagaaaaacctcgagacaaagacaatgctctgcacacaggccgaggcactggcccaggaagccgatgtcatcagcgcgttccgccagttgcagcagctgcacaacgagttccgcgagacaggccccgtagcccccgacttgcgcgaggaggtatggaaccgtttcaaggcagcttcaacaatagtaaaccgccgtcaccaggaacacttcgaggcaaagaaggagaaggagcaggagaacctcgacaaaaagactgccatctgcgaacagatagaacagctcgatttcgcatccttcaccacctaccaggcctggaacagcgcaacagagcaggttcttgacctgcaggcaaagtggaaggagattggttttgcaccacagaagatgaacctcaagatattcgagcgtttccgcgcagcgtgcgacaacttctttgttcagaagagcgaattcttcaaggaggcaaaaaacacactcgccaagaacctcgagcgcaagaaagaactttgcgagcaggccgaagcactcaaggacagcgaggactggaaggcaacagccgacaaactcaccaagctgcagaaagagtggaaagaggtgggtgcagtggcacagaaacactccgaggcactgtggaaacgctttgttgccgcttgcgactacttctttgagcgccgcaacgcagccacatcatcacagcgcagcgtagagcaggagaacctcaagctcaaacgcgcggtgatagagaaaatcaacgcaatagacaccaccctgccggcaggcgagcagaccaagcagctccaggcccttgcccaagagtggaacagcataggctttgtccccttcaaagagaaggacaaactctacaaggagtaccgcgaggcaaccaacgcactctatgacaagctccacaccaatgctaacgagcgcaagctcgccaatttccgcaacaatatgggcaagggagcaggcagcctgcagcgcgaacgcgagcacctcattcgccagtacgaggcaatgaagagcgagatagccacctatgagaacaacataggcttccttagcgtatccaacaaaaaaggcgcaagccttgtcgacgtaatgcgccagaaggtcgagaagctcaagcaggacgcaaaagtaatcctcgacaagatacacctcgttgaggacgagatagaaaaagaggcaaagtaaaataaagccttgatactttaaaaactccacgcggttccatgtttaaacatggactgcgtggagtttttgtttgcataggcgctaagatattcatttgcccatttccctacgtaagcacacaaccctgcaagccttgcaaagaggaattattattatactttacttgagcaattatatatttgcagaaaggataggaagtaaggcaaatctttaaaaataagactaaaataattggattttagtaactaaataattatgtttgttaatataaattgcatcaataaaaaaacctccacggagtacgcggaggtataggtctaagaccttcggcatttagccttattgtggtaagatgtagaattcttacttgacaaaggtaatttatatttttattttttgcaaatgaatttattattttccacaaatactatggcaaggatattaggaattgatcttggaaccaactctattggttgggcaatcactgaagaagaaaatggtatctataaactcattgacaaaggtgtaaacatatttcaagagggtgttgcatacgacaaaaacaacgagaagccaatggttgaaaaacgcacaaatgcacgtgccttaagacgccactattttcgtagaagattgcgtaaaatcgaaattcttaaaattctaattgacaacaatttatgcccttttctttcagctgaagagctaaacacatggagagagaagaaacaatatcctttgaatgaagaatttctatcttggctacgtacagatgacaacaaagataacaacccataccatgatagatacatcgcactaacgcaaaaaatgaatctagacaacaaactggaacgattcattttgggtagagctatttatcatattggacaacgtcgaggttttttaagcaaccgcaaagactccactaaagaagaagagaaaggcaaagtaaaaagttccatcaaggaccttgatgaggctatagcaaacagcggttgtaaataccttggagagtttttctacaaattatatcaaaataaagaacgcataagaaacggtagtttcggagaaggtcacggctatgcatatagaaaagaccattatcttaaagaattcgaggtcatttgccaaaaacaacatattagccaagaactgcatgacaaactttaccatgctatatttttccaacgcccgctgaaatcacagaaaggcgctgttggatattgcacctttgaaaaaggaaaagcacgttgtcctatatctcatccttcttttgaggagttcagaatgttgcaattcataaacagcataaaagtacaaactcctaatgacaaaaaattacgtgagctgacagaagaagaacgtaattctattattccgttatttatgcggaaatcaaagcctcattttgaatttgaagaaattgcaaaaaagattgctagtaataaaaagaacaactacggttacttcaaagataaagataataaacaatatctcttcaattaccatctagacacaactgtttctggatgtccattaatagcttcgcttttaaacctttttggagacgaatgggtcgagcacttatgttctgtttacaccaaatcagagaataagagcaaagagcaaattataaatgacatatggcacgttctcttcacattcgacgactgtgacaaacttatggaatggggcatcacgaaccttcagctgtcacctgaagaagctaaaaaattttcagaaataaacaccgtacagggatacgcatcaatgagcctaaacgcaataaacaaatctcttccttatttgcgtgccggctacagatatgaccaggctatttttcttgcaaacctcaagagtgttgtcggagaaaacagatggaacaatattgaacaaagggatagaattatcaatgatgtatgcactgctattgaagagtttgcttttgtaaaaagggtagaaaaaacaaaaaaagaatacatacaaaaaatcctcctcgacgaatacgggattgaaaaaagttattcagataagctgtatcacccttcgagagttgagggttttaaagatgctgaaatagaccacacaggaactctacaattgggctcaccaagaacctcatccattcgcaatccaatggccatgcgctcattgtttcgtttacgcatacttatcaatgaattgctacgcaacaagctgattgacaaggaaacaagagttaacattgaaatggcacgcgagctgaatgatgcgaataaacgtgcagctatcaaactataccaaaaagaacttgaggaaaaccataaaaaatacgcaaaagaaatcagtaaagcatatttcgaagagactggaataagaattatcccaacagatgatgatatccagaaatatcaattatgggaagaacaaaagcacaaatgtctatataccggcgaggagattggaattgcagatttcataggatgtggaaataaatatgatattgaacatactgttcctcgctcacgtggcggtgacgactcacaagcaaacaaaacactatgcaacaatcagttcaatagagaacttaaacaagcaaagttgccaagtgaactcaattgtatctttgatataagagtaagaatcgaagaactaggttggaataagaagattgaagaattcgaaaaacaaatagctcaacaggtaaagaaatcaaaaacagccacaaccaaagaggccaaagacaatgcaatacgtcaacgccattatctaaagcttaaactcgactattggaaggataaagtacatcgtttcaatattacagaaatcaatgaaggctttaccaagagacaaggtgttgatataggcattataagccgatatgcacgaatgtatctacagactgcattcaaaaaagtgcatactgtcaaaggtgctactacggcagatttccgcaagatgtggggactacaggatatttatacaaaaaaagaacgcaacaaccacgtacaccattgtattgacgcaattacaattgcttgcattgggcatggcgcttacgatctatggaaaaaatactgcgagaatagcgacaagcataaattcggtaatagcagtaaagcagttgtagaaaaaccttggatatctttcacagaagatgtaaagaacatcgttgaggaaattctcgtttcgcactatacagccaataacgttccaaaacaaagcaaaaaaaagatgcgcgttagaggtgttgtacaatacaacgaaaaaaacgaaatcaaataccaacaaggagacaccgcccgtagttcattacacaaggaaacattctatggcgcaataatgaaagatgacgaaataaaatatgttataagaaaatcgctttcatccctcgaagaaaccgatgttgaaaaaattgttgacgaaacaatcaaacaatgcataaaagatgccatcaaagccgaaggcttcaaagcagcgatgtcaaagcctgtatgtttcaacaaagagaaaggtgtatacattaaaaaagtaaggatatatgctccaagcgtaaaacagccgatatgcttaaaacagcaccaacaacagtccaaacatgagtacaagcagggatactatgtcgttaatgacggtaactattgtatgggcatatacgaaggcaccgatgaaaaagggaaagtaaaacgtaattttaaaatcgtgaataatcttgaggctacagagttcttcaacggcaagagtaacgagttacaacttgtctcaatgtccgacaacaatgatttgccattaaagtacatcataaaagcaggcacgatggtactcttttatgaaaaggaaccatatgagttctataactgcaacaaagcagaacttaacaaaaggctgtacaaaattaccggatttagcacccaacaaatcaagcgaaacacaggtaaaatagacaaatacggtgctatgactttgaagcatcatcaagaagcccgcccagccggagaactcaaagcaaaaaatggcgagtggaaaattggtgaagagtacaggcctattataagcctgctacattcccaatttaatgcatatgtagaaggttatgattttgagttgactgttactggtgaaattatattcaagcattaaaccatgttgaaacgcacccttttctttacaacaccgtatgtcttgagtcttaaaaataatcaaatgattatcaagactcgagaaatgcccgacatgcatcgtagcattcctattgaagatataggttttgtaatccttgagcatcagcaaacaagcattacgcttcctttgctcaatgcgttgtcagacaacaatgtgagtgtaattatttgtggcgaaaactatatgcccaacgccttgttattgagtttagtatctaataccacacaaggcgaaacgttaagactacaaatagaagcaacagaaccattcaaaaaaaacatttggaaacaaattattgaaagcaagataaaaaaccaagcagcattgttggacaagttagggaaaaacggtaatattttaaaaccttattattgcaatgtcaaaagcggcgatagtgacaatcgggaaggtattgcagccaagatatactggaaggagttgtttgggaacaattttatacgtacacgtgaagggatagaacccaacaacctcttaaactacggttatactatactacgagcagcagtaacaagagccataatgggttctgggttattaccagctataggtatttttcataaaaacaaatataatgcatttccactcgcagatgacattatggagccatatcgtccatttgtagatgaacttgtttacagaatctattctaaaggaggaaaggaactcacaaaagatattaaagctgaaatattgaaaatcctttttactgatacgcagttcggtaaaatcacacacccgttagaaattggattaacgacaacgactgcatcattagtaaaatgtcttaatgggaccaacaaaaaaatcctttaccctctacttgaataaaatgagtgaaatacgtttgaatgcatatcatattatgtggttatttgttttctttgatttaccaacaactaccaagaaagaaaggcgtgatgcggctcattttcgaaaggatttggagaaagacgggtttaccatgatgcagttctcggtatacattagacattgtggttcaaaagaaagcatgaacacacatataaaaagggttagaaaatttatcccggaaagcggacaagttagtattttgtccgtaacagacaaacagtacagcgaaatacacaatttttggggtaagattgaaaaagcaaaacctacaataccccaacaattggaattattttagtacattagcagacataaaaacacatcacgccacttcaccggagtgcaaaagtttgattttcagttttgatatttttacatatcattcaaataatcaacaatataaatgcccagcgttgtggtttgatgtagaattttaaatagaaacaacaaatgcttttaataatccatcagcagcactgttgtggtttgatgtagaattttaaatagaaacaactgtagaatagctcatatactacataatcttgttgtggtttgatgtagaattttaaatagaaacaacaggtc

SEQ ID NO: 522 - DNA, 15182 bp, synthetic construct
  source 1..15182: mol_type = other DNA
  misc_feature 1..15182: note = Synthetic
aaccatattccctaaaaatatttttcttatccgacgattccagatatatcgatttaacccgatctcaacaacacaaacggaatttgtatatcatccgctttgcaaatcatcgatttttcgtatatttaaggtcacaacccctatttattttcgtttgaaataaaaacaacacggtttatgatctctctttcgttgttgatgacgaccttattatcgtccataactgcatgttatacaaccactacagattcactatcagagaaaaacactccgtcctgtgaatttaccacgaataattgggtatataccgactgttacgaccggagcgtcgcaaattatgaacagtgcggccctaaacgggataaattagtcggtattttctatttcttgtggcacagcgaccgcaacaaagcaatcaacaccactgatttctttaaaggacaccctaacggtatcaatcagctgcaacccggttacagttattattggggtgaaccggaagatggatattattgcactaatgacccttggatcatccggaaacacctgaacatgtttgccgttgccggaatcgactttctctatttcgacatcacgaacggaagctatgaatgggtctattcggccgtcgacgccatcgcaaaggtcgccatgcagatgcaggccgaagggataaaagttcccaaattcgtctttacaacgaactattatcaaaaagagacgatcacggccgtatacgaccggatctatcggccgggcaagtataaagatctatggctctattgggaagggaaaccggttatcttggccccccgtactgcagctccgaatgaggaaatcgctgattttttcacttggcggtacggatggtccagctggggagaaagcctgcaggatagttggccatggcacaacatcggaggctacggatacacaaacgatccgaacgacatagaacaaatgactgtttcgaaaggttcgcacccgacgatcaacgtcggttcgagctatcggctcggaccggaagggatcatccgattcggagctgacttcaaggatcaatttggcggtgaacaacccccaatcaacaccctctaccgctgcgaagaaaccggcaccggtgcccttttcgaaaaacaatgggacaaagtcttcgaacgtgaccccgacgttttgatgatcacccaatggaacgaatggatcgccgtctgttgctctcaacgatactgcatcgaagtatggaaaaaccgggatatgaccaacgaatactttttgggcgaaaaactggaatatgacgaccgctatttcgtcgacatgttcaacgacgaatacaatcgggacatcgaacccatgaaagggggctatggagatgttttttactatcgtatggtccattatattcgcaaattcaaagggatggacgcaccggatcccgcttcggaatcccgtacgatcactattgatggcctctttaacgaatggaaagagatacttccggtttatacggatctgaaaggagatgtcatgcaccgcgactatccctctgtggacaacactactcgatatgtaaaccggaccggacgcaacgacatcgtcgagtcccgtgtctgtcatgacaacaagaatctctatctttatgttcgaactgctgctccgctaacttcgcataccaactcgaattggatgttactgtttctaaatgttgactgcaacaagaaaacaggatgggaaggatacgattttttgattaacgccaaggttaagaataatcgcacctcgtcaattcatcgctgggatggtacacaatggactcctgttgcaaaaatccgttaccgatactcgggcaacgaaatggagttgagtgttccactcgacgttttaaacctcgatccgaatactgtcgcactcgattttcactgggctgataatctgcaaaacctaaccgacattacggaattttgtatcagcggagattctgcacctgaccgaaagttcgattttcactatgacaatcgaaccaattccaaaaacaaataaattctaaaggcccttcacactttacactacgtaactcaaaaacggagatattgcacatttccgcttgaagtcataaaccgaggacaaaaacgcacgctttccggtagtttcaaccgggtctattcggcattctggtaggctttcggcgagcatcctacctctttcttaaaatagacaccgaaaaacgactgattggcaaagttcaacatgtcgctgatctgctggatcgtatactgccgactcttcaacagcgccttagcctccaaaatgacatagtcccgaatccagtcgccggcgtgtcgtccgctgacggcatacaccatctgtgacaagtacttgggcgtaatacacaacttatcggcataaaaaccgatgttgcgctcctcggtataatattcgtgaaccaaatccataaaatcgtcgtagattttcttcttccggtttccgacatgctcctcgcgtacttccacgtagggagtgatcagttgacataaattataggccaacacccgcatatacccagtaatcacctcttttttataaagatagtccggctgttcgatctttcgtctcaacgcccggtagatctgcatctgctcctccatatccgattcgctgacccgaagcaccgagtgccgaaccaaaaactttcttattatggctgctccttgtgaattggattccatcgctaaataccccttcgagaaggctataaaaaccattctacaatctgctgaaatatcgagacattgtccgatcgacccttgctgaagaaagaaaatatcatttttttgcaattcatattccataagattcgaccgtacccgaatggatccgcccaaacaaaataagatcatcgtaaactctatcttgaacggatagggagatgcgacaaaagatttgatcttaggactggacaaaaaaacatccgatttttccgtcacattgaaattatcggccatgataaattcatcctcaataatgcacgcgcgttcatcgagcggtatcatcaacagactcaatgtacgaattcgttctgattgctgcataagacaataacgtttttcagcacaaatatacctattcaaataaaaataacccataatagttgtttaaaatagccatattgtcatcctttagaacaattatatcgaatacatagacattcgagatacatcaaaaaatagaactttgtgctcaataaaatcattcaaaaaaaagcgaacaacaccatgaaagcatcacattggattgtagccaccacaaccgtatgtctgttgggatcctgtgcgggtgaacagcaatcgaccccgttcctccgcagtgtatataccacacatccatccactcggggagaggagtcctcaagtatctactccggcatcgtcgaagagtctcatgacgtcggactcggattcaagacggcgggccaactgaaaaacattcttgtcgaagagggcgatttcgtccggaaaggagagctgctggccgaactggacgatgttgattatcagttggctgtcgatgccctgcaaatccagtacgatcaactgaaggatgaagtcgaccgtacgacccaactcttcgaacaacgaagtatctcgtcgaacgactacgaaaaggcgactgccggattgcgccaattaggaattcaattagaggcaaataaaaacaaagtaaaatataccaagctttacgcaccaactgacggatacattcggagcgtaaacttctctccggctgaaatggtagatgcaggaacggccgttttccgtctgatggatgtatcccgcctcgaagtcgctctcgacatcccggcaaaagcgtattcgggaagagagcacttctctcgtttcgcatgcaaaactccatattcagaccaagaccttccgatgaccctgctcagccttacgcccaaagccgacgggaaccagctctaccgtatgcggctcgcttttgccgaacagccttcgaaacagctgacagcaggaatgaatatcgaggtgcgaatcctttcgagagtcgacagtacaggatatacactcccgttgtgttccatttttcatgaaaacgatgactcgttcgtatgggtgatcggcgatgactcgaccgtccacaaacgcaacgttgtcctccacggtatagattctgaaggagatgcagtcgtcgcatccggactctcgggcgatgagacaatcgtccgggccggcgttaactccttgcaggagggcgaaaaaatccgcatcatcgaacaaccgagtaaaaccaatgtaggaggagtgttgtaatgaaaatgaaagcgaccgaattcttcatgcggcggcccgtactcttctggtccctgatgacgggtatcctgatcgccggtgtcctctctttcatacaaatgccgaaactggaagatcccgccgtttcgataaaacaggccatggtcgtaatcccttggcccggagctacggctcacgaaatcgaattggaggcagcacagctgatggaagacgaactgagagcactacccaatgtcaaaaaggtcaaaaccgagtgtcaggacggatcggctaccctgaccgtcgagttccgcatgaccgttctcagcgacgagctcgaacaacacttcgacctgctgcgacgcaaagtgaacgatgccgcaatacgcctgccgcaagggtgctacgatcccatcgtcatcgacgacatggtcgatgtgtacggaatcttctatgcactgaccagcgacggctacgactatcccgaaatgtatgaatacgcaaagttcatccgtcgggagctgctggatgtctcgggagtcaaacggatcaacatctccggcaatcgggacgaagtgatcgacatcatcctgtcgaaagagcagatcgcccgcaacggaatcattcccacacagattatggcggcactgcagggggcagggaagaccgttgaagcgggaaaataccgcagtggggacgaccggatcgcgatgcatgtcgattcggccatcgaagatgaacaagatatacgcgatctgctgatctcaacgatggacggacgtcagatccgactgagcgacatcgccgaaatccggcgcggatacgccgaaccccaacaaaacggattcttcgtcgacggaaaacccgcactggccatctgtctggccatggagaacgatgcaatcgtccccgacgtaggaaaagccgtcgaccaacgactcgaggaagtgatgcagcgagtcccagccggattggaggtgcaaaagatattcttccaacccgacaaggtcagcgatgccatctcgtcgttcatgtggaatctgctcgagtcggtcgtcatcgtcattctggtactgatcttcaccatgggtgtccggagcggactaatcatcggattcgggctcattctgaccgtcgctatttcgttccccattctgttggagtgtggaacaacgctacaacggatctctctcggtgcctttatcgtggcgatgggtatgctggtcgacaacgcagtcgtcatcatggacggcattctggtcgacaagcagcgcggtctcggacccaaaacctacctctaccgcatcggtcgcaatacggccctacctctgttaggcgctacggtcatcgccgcctcgacgttcctttgcgtctacctgtcgcccgattcggccggtgaatatgcccgcgacctgttcctcgtactctgcgtaagccttctggccagctgggtactagctttgatacaagtaccggtgtgcgccaagaactggctccccgcacggaaccgccagaagaatacgaccgattcgggcgtaatgaactctccggtacatcgtttcgttcgtcgttcaatttcattccttatcgaccataaacgtcttacgatctctgtcgccattctcgtactgatcgtctgtatcgctggaatgacccgggtcaaaaacctgtttttccccgacttcgattacaaacagttcatcgtcgagtgtttctatccggctcaaacctcctccgataaagtccagcacgacctgctggagatgagcgatctgctccagaaaaacccgaacattgaacgggttgcggtgagcatgggcagcgctccggcacactattgtctggtccgtccgatgaccgccgggggtgactgctacggagaattgatggtcgactgcaaggactataaaaccgtcatgaaacagatccccatcgtacggcgcgaactgcgggaaaaataccccgatgcctacatccgtatccgaaaatacaacttctcgatctcctcgtcgcacaccgtcgaggtcgaattcacggggcccgatccggcggtattgcgcaacctgagtgctcaggccgaagcaatcatgcgccgctgcccatacgtggacacctattccgtagagaataactggaaacccacagggaaagcgtttgtcgccgaatacgtacaacaagatgctctaagatccggtatcgggcggagcgacatcgggaacgcactgctggccgcaacggatggtctgcccgtcgggctgctgaacgaccacgaccgcatggtcaaggtcaacctgcaggtccgtaacgaagacggcagccgcataaccgacctcaaggagattcccgtttggagcaccatgaacgtccgcatgacgaacgaggagatgcaagccatgctcgcctcggggaagggcatgagcgaactgcaggaccgcattttccaatcggttccgttgggaaatgtcgtgaacgacatccatctcgactgggatgaacccgtcgtgctccggttgaacggacggcgagccatcgaggccgaatgcgaccccaatcccgacatcgacgaagccacacccgctaaggtcgtatccatgatcaaggacgacatagagtcgatcgcactgcccgaaggctactcaatgcgctgggtcggcgaaggcgaattacagggcgaagcgattggaaacctgatgaaatacatgccgatcaccatcttcatcgtactggcgatcctgttgctgcttttcaatagctggaagaaggtgttgctgatcatattctgcttcccgttcgtcttctgcggcatcacccccgcactgctgctgaccggacaaccctttacgttcatggccctcatcggtatgatgggtctgatcggtatgatggtcaaaaacgccatcgtgctggtcgacgaaatcaaccggttgcaaaccgaagagaaagctgttccgtatcgtgccgttgtggaagcaaccgtatctcgtgtccgtcccgtactgatggcctctctgaccaccatcgtcggcatgattccgttgataggcgatccgatgtacggcccgatggccattacgatcatgggtggactcacggtaggtacgatcattaccctgattctgcttccgctcttctacacagccctgttccacatcaaaaaaacaacgacccccattcaaatgcaatagtcatgaaacgatcgatcatatttttgggtatagcccttatggggttacccgcatcattacctgcacaagagcctctctccctgtctcaggccgaatgccgcgaacgggctctggcccacagcgaagagttgcagcaggccgaaaacgcactccaacaagcgggtcttgaccgcaaaatcgccaattcggcctcccttcccaacttcgaaggttctgccctcggcgcctatatgctccccgacatcgacatgatgggcagcgagcttcgcatgcggggaacctacatggccggtatctcactgactcagcccatctatacgggagggaaaatctcctccgggcggcgtctggcaaaaatcggtgaagcggttgcctccgaacaacggcggatgacccgcatggaggtgattgccgaggccgacaatgcctattggagctacatcgccgttgagcggaaggtcaaaatgacggagcagtataaaaccctcatggacaccctgtttcaccaaaccgaaacggccctgaaggccggtatggcaacagacaacgacctgcttcgcatcgaagcccgccgcagcgaaatcctgtaccagtttcaacgggcccgtaacggagccgacctgtgtcggttatcgctatgccgcattatcggggtagattccaatacggaattcattccgaccgataccctgataaccgttacgactccgagtcagctgagtgccgacattgactctcgtccggagctgcgcctgctcgaaaaacagatcgaagccaacgagcagcagatccgtatgacccgagccgacatgctgcccaccgttgggttcagtgccggatacacctattacggcaacatcaaactgaaaggtacggccgacatcgggaacggaaccctgatcccctttacccaacaatttcgtgatggtatcggaatcgcgatgttggccgtcaagatccctatttttcactggaacgaagggcgcaacaaagtacgaaaagcccagttcgacctcgacaacgcccgtctcgagatgcaaaaaaactcccgtctgctcgacctcgaagtgcagcaggccattcgtaacgtagaggacggattccggctgatcgaggcagccgatctcgctttccgccaagccgaagagaaccttcgcgtcatgcagaaccgttatgcggcatcgatggctccacttaccgatctgctcgacgcccagtcgcagtggcaacaggcatcaagcaacctgattgaagcacaaactcaatacaagatttacgaaaccgactatttacgtgcgacaggaaaattagaatagctccgcccactatctgaacctactcataatcttatacattgaacaaacgatatagcatcgtttgaggatgctttgccccttgtttaacccaatgcatttttcttaaaacaataactaccaatatgatacacatcaagataaacccaaaatactctcatctggaatcttatttgcgtcaactcacagtcgggggaactttcaacgaaggaggggaaatactgtataacaaacgcaacattgtcaaactgttcgaggtgaacggcacacggatcgtcgtaaaacgatttggagctccatcgtacttcaatctactgatatatagcgcatccatacggaaaagcaaagcagaaagggcctttcgaaatgccatccgattgcgacagttggacatcaatacacccgaagagatcgctttcgtcgaaatccggaaacgaggtatcttgcaagattgttattttgtctcggcctattctgattatcatccggtacgtcccgtaactgaacattttacccacaatttagaaacccgcccgatcctcgacatgctggcaggatttctttataaaatgcaccagacaggaatccaccacaaagacctacacatcggcaatatcctctacaaggagaatggttcgggaggatacgactttcagattatcgatacgaaccggatgaagttcggtgtttttctgacccaacagcaacgcctgatcaatctgcaacgactctcttgttccgccgctgcctacatctacatcctcgaacaatatgcacggctcgcacatatcgatcccgagtacctacaactcaaaggatcttttacgcgattgacctacgaattccaccgctattacagacacaaactgaaaaaccgcctccgtaagatgttgcacagaaatcaataaaaacgattgcgtagggcagtggagaagcaagtattcttctcctcccacttgtgtataggagcctcaacggcctcctatactgagcaattatactcccaaagcaaaatctaaaaaacggtggctttggccatggcctctcctgaaaagtgcccgaatcgcttcatcgtcgctctttccggtcccagtccgctatatgcctacacctcaaaacggtgcccccaattcacaaaaaagtctccacggagtacgcggagacaataggttaaaaaccttcggcatgtagccttattgtggtaagatgtagaagtcttactctacaaatttatataaaaaatcggatttctgcaactttttatttaattttacagaaaacctctctttttatggacaaaatattgggattggatctcggaacccactcactcggctgggccatcgtcgaagagaccgaaagcggatacacgttaatagacaaaggagtagatatctttcaggaaggtgttctccgggacaaaaacaatgaaaaacctgccgtacaggaccggactcaggcaagagcctcgcgccgccactatttccggcgtcggctacgaaagattgagcttctcaaagtgctcgtggagcatgatctgtgcccatccctgaccgaagaacagttgaccctatggcgaaaaaagaaacgctatccgctcgacgaagagtttctgctctggcaacgtaccgacgacaatctggatcgcaacccctaccacgaccggtatcgggtcttgaccgaaaaactcgacctttcgatccgccagcagcgccatctgctgggacgggcaatctatcatctggctcagcgacgcggttttctcagcaaccgaaaggatgccggggatgaaaaggaagaggggaaagtcaagagcagcatcaagaacctgtcggacgagatggctgctgcaggctgccgatatctcggtgaatatttttatcggctatatcagaacaaagagcggattcgcggaaaatacacctcccgcaacgaacactatctggcagaattccatgccatatgcgaacgccagcaactacccgaaacgtggagaaaagagctgcaccgggcaatctttttccaaagagacctcaagtcgcagaaggggctcgtgggcaaatgtacgttcgaacccaagaaaagccgctgtccggtctctcatccgcacttcgaagagtatcggatgttgtgtttcatgaacaatatccgcatacagggcccccaagacaacgctccgcgaccattgacacaagaagaaataaaggtaatcacccctctcttcctacgcaaaagcaaaccctatttcgatttcgaagagatcgcccggaaaattgccggaaaagggagatatgcgtgcaaggatgaccgcaacgaggctccataccggttcaatttctcacgatcgaccaccgtttccggatgccccgtaacggcatcgctcatcgctctcttcggagacaactggctaccggaaatgtgcagcctgtatcggctcggagagggcaaaaccgaagaccaaatatttaatgacgtgtggcatgccctgatctcattcaaagacgaagattgccttcaggcatgggcctgcgaaaagttgcaactatccgaagaccaagcgaaaaagtttacatccattaaaataccgagcgactatgcagcgctgagcctgaaggctatcaacaagatattgccctatctgcgtcgtggctaccgttacgacgaagccgtttttctggccaacctcaaagcaacccttccccaagaggtgtttgcgaatagctcccgacggctccagatcgaacaagatattgcatcgttgcttctggacttccagacaaacccactgaacagacacaaaaccaaagaggcctgtatcgccgactatttcgacgaacacggattagatacctctcgtctggaccgactgtaccacccgtcaaagaccgaaacctaccgcgacgcccaacccaatgccgaaggcatcttgcagctcggttctccacgcacctcatcgatccgaaatccgatggccatgcgggctctgtttcgcatgcgggccttggtcaaccagctgttgcgggaaggcagaatcgatcgcgatacaaaaatcaacatcgaatttgcccggaaactgaacgatgccaaccgccgcaaagccattgaacagtaccaacgcgagcgggaagccgaaaatagaaaatatgccgaagagatacgcaaacattatatgaccgaaaccggcaaggagatcgaaccttcagaggacgacattctcaaatatcgtctctgggaggaacagaatcacacttgtccctacaccggacaaccaatttgcatttcggcttttatcggatctgcaccggtttatgacatcgaacataccgtgcctcttgcgcgcggaggcgacgactcccaaatgaacaaaaccctgtgtaaaagctatttcaaccgagaaatcaagcaaaacaaattaccctccgaattgtccaatcacgccgagattctggaacgaatcgaatcattcggctggagagaacggatcgaatcattaaagaagcagattgcgattcaaactcgcaaaaaggatagtgcaacgaccaaagaacaaaaagatgcggccatccaacaacgtcattttctgcaaatgcatctcgactattggcgtggcaaatatgaacgtttcacgatgaccgaagttcccgaaggattcagcaaccgacagggtgtcgacatcggtatcatcggcaaatacgcccgtttctatctgaaaaccgtcttcaatcgaatctatacggtaaaagggtccacgaccgatgcgttccggaaaatgtggggcctgcaggaagagtacacaaaaaaggagcgtacgaaccacgtgcaccactgcatcgatgccattacgattgcctgcatcggccgtaaggagtatgaccgttgggcacgatataccgtcgcagaagagcaatttcgttttgggaaaggtccgaaaccccactttgaaaagccatggccgacctttacagaagacgtcaagtcggtggcaaacgaactgcttgttgcgcatcacacagccgacaatatgcccaagcaaacccgtaaaaaactacgcattcggggcaaggttaaattgaatgatgccggtcaacccatctacatgcaaggggacaccgcccgagccctgctccacaaagacaccttttacggggctatcaaacgcgatgacgagatccgctatgttgtccgcaagccgctcgaacagcttcaaccgaccgatgtagacaagatcgttgacgaagctgtcaaggcccgtatcaaggaagcaatcgacgaggtcggcttcaaaaccgcaatgaatacctccgagtacacgatatggatgaatagagaaaaacgtgtccccatccgcaaagtccgcatcttcacaccaaccgttacgcaacccatatcattaaaaaagcagcgggatccatcggataaggaatacaagcaagattaccatgtcgtcaacgacagcaactactgtatggctatctacgaaggagtggacaaaaagggtaagaccaaaagatcattcgagatcgtcagcaatctggaagcagcccaatacttcaaggcgagtgccgaccgtgacgatcgtcccgatttggttccgattgccgatacaaatggttatccgctcaagtatatcttgaaaacgggcaccatggtgcttttctacgaacacaccccggcggaactctacgaatgcacccgtgctgagttggtaaaacgactgtataaggtaaccgggatgagtgtattaaccctacaacaaaaatatagatatggaactttaactctaaaacaccaccaagaggcccgacctgccggagagttaaaagctaaaaacggagaatggacctatcaagaagaatatagacccgttatttctttattacacactcaatttaatgcctatgtcgaaggttacgacttcgagttgaccgttacgggtgagatcatattcaaacacagcatgccatgttaaaacgtgccctctttttttcgacaccatattgcctgaatctacggaacgggcagatggtcattcatacccgcgaagctcccgatatccaaaaaagtgtcccgatcgaagacatcggttttgtcgttctcgaagaccaacaaacctcgatcactcttcctctgctcaatgccttgtccgacaataacgtcgctgtgatcttctgcggagagaaccgaatgccaaatgccatgctgatgaatctggattccaacaaaacgcaaggcgaaagctaccgttcacaaatcgaagcgagcgaacccctgaaaaaaggattgtggaaacagatcgtcgaagccaaaattcgtaaccaatcagccctattacagaaattaggccgcgacggaagcaaattaaaaccctactacatgaatgtcaaaagtgccgacgcagacaatagggaaggaatagctgccaaaatttattggtctgagctattcggcactgatttcattcgatcacgcgatggtcttccccccaacaacctactcaattatggctacacgatcctgcgagctgccgtcacacgttcgatcatgggatcagggctatttcccgcattcgggatcttccatcgcaaccgttacaatgccttccctttggctgacgacttgatggagccctatcgaccctatgtcgacgagttggtctataatcttcataaccaaggacacgaacaactgaccaaagaggtcaaaggccaactattgcgcattctgtttgtcgacacacattttgacaaagtcatgcgtccgctcgatgtcggactcacttttacgtcatcctctatggcaaaatgtctatccggcatacaaaaaaagatagtttatcccttattgaaataattcgatgtcagaaatacgattgaatgcataccggatcatgtggctatttgttttcttcgacctgcccaccaacaccaaaacagaacgacgtcatgcggcacaattccgtaaggcgttagagaaagacggcttttcgatgatgcaatactctgtttacgtccgacactgtgcatcgaaagagaatatgcaagtacacatcaatcgagttcgtcgctcgatgccaccgtcgggttatacgagtctgcttgccgtaacggataaacaatatggcgccatactgaatttttggggcaaaatcgaacaatcaaaaccagaaattccccaacagttggagctattctaaagaaataacttaactttgttctttgaaatagtgaaaaacgcattgaatcgacttcgtcggacgttcgaattgaattttaagagtttgaaaaactctgtaaatatcgcattttcaatacataactatcccggcgttgtggtttgatgtagaatttcaataagatacaacggtgatccataaacaaaaa

SEQ ID NO: 523 - DNA, 15060 bp, synthetic construct
  source 1..15060: mol_type = other DNA
  misc_feature 1..15060: note = Synthetic
cgagtgggcggccgacgtcagcgagctgggcttcgaccgcatcaaggccataggcatcatccccgaggacgacgtggagagcatggagggcaccgaggcggagcgctggggcaaactctcggcagccgagcgtcagaaggctctttacagcttcgagaagcctatccgcgagaagagcatcactcagcagatgcgccagacggcattcgacaactatcagactaccgacgaccacggaatgcagatcgtaggctacgcaaccgaccagaccggcaagcgcttctacaaggtcaagaactcgtgggacgtacgtcccccctacgacggctactattacttctcacgtccgttcgtcgagtacaaaaccatgtcgatcctggtcaacaaaaattcgatccccaaacccataagaaagaagctgggattgtagtcgcatacgattcacagaacgatccaccctgccggactcggttccggtagggtggatttcgtttacaatatgcggagtgaaggcgggcggtgcagcgccggcacacgcgcacagccactatacgatccctatctccgcactctcgaaaaactccgtccgaaggtaggtgcccattctgtacaccgaagtatggttgaacatatagctgcgcttcaacgccttttcgatatcgaacatgtcgctcatgcaggcgcgctcgatagccagatagaattggatagtatcgttgttgagatcgtcgtcgaggaaatagagtccgcgtatcatctcctgatagctcgtaccctgggagctgcactggcgcgccttggcgaacgagtgtatcacattctcgaccagatagttcaaattcgacagtgcacggtgcctgtgcaggaaatcgctgtcgaacaacgcatgcagcgagcgtcggcgcgcggcatcggccgagtcgtcgcccaaatcgaagcgctcgcactcggcatcgtacctgacggggtcgtaaccgcagatgtcgcagagggcatcgagcagcgactgcgccacggccagatcgtaataggctctgcctctgaacgaatggttgaacagcagcgtattctgcatcggcgcgagcgtctggatgatatacgacgtattcttcacggctccggccacgatcgctttgagcaattcgaagcggtactcccgctcggagagctcctgcaacggcacctcgggctccatgctgctgcgtatgaagtcgggcacaacggcacgatcatcctccaaaaaactctttaccgaccgcttcgccgagcggaaataatcggccggggcgcccgggccggcacacagaagcgtgtcgatgaaatagcggtacgtcttggccgcggagtgatatctggtaactatgttggtcaacgtactgttgtagatatcctcatgcaacagattcttgcggacgaaacccgtaatggccgcatccccgccgctgtcgggcaatccggcagccctgcggaaccggtggcacagcagcacgaagcgcacatatatattctgcatctcctcgatgctcggatagagggagagatgatccgcgaaatctctcggatcggactgcctgagaatgcgtcctatattggtaatctccgaaaagttgacatgttcgtactgcctgaattgagtcattataaaacgccgggtaaggaaatcggcgatctcttgcagatgatttaccaaatcgatattctgcacaaaaccctctcttcgccggtctgcgtcttcttctttcgatagcacctctattgcaccgttgatataataattgacgacgtgcataatctctttatagcaccgtccggcaagatcgcgctcgcacgacgaaccgtataacttggatgccgcccaatagcagatcatcgccctatgaaccgaaaacttcggccacttcgacctcttgaaatcatctattatatattgtttcagctcggacagctcgccaatattctcattgcggaaactcaatctcgtcaatacctgaaaatgggtatgccctatgctttccaacaatatcgcaagattatacataagtatatccggattaacgttagaaaggaaatttatcttatcgtcctcgactttcagacacagctcgacgaccttatccagcattatcgaggactccgttccacgctcgcctctttcattgagtcccaatggtttcagcagctccttcattccgttcatatatgaagactgcgcactatacttgcccaatgagacatttttataataaagtatatcgcccagcttgcggaagaagtcggccatgactatgatgttcgcatcatcatcgacggacaacttgtcgtaggagtaggtaccgcagcagccgtttcgcgacatcaatcggccgaacgaggttatcgcctcctcgatatgcacctccctgatgcccgtcgtatcgagtttctcgataacgttgagccgggcgagcacgcccaggtgcattgtgcggttgtcgcggaaaagggtgtgtatcatcggattctcgcgcttgatcgctaaaagatgatccgtcagatcattgtagacggcgtaggcagagttgtcggtatgccgcttctcgtgtgccagaccgagtttgagcatcgttcggttgtagaacagcacgtagttctggaattgctcgtgcctcggatcgtggtttttcagaaacaccgacaccagctcgacacacttttcatagtgacgtatagccaccgagaagttctcctcctgcatgtagacatcgcccagcgagtggtttatggccgccgtgacataacggtcggggtcgggcatctgtttttcgagcgtcgaataatacagcttcttgatcggctgcaactcgtcgagcgagaagttgaacagcgccgagaactcttccgacagcttcgagaagaaagatatctcctcggcgaaccgcgacggaaacttgtactggtagaggccgcacgaaatagtggtcagaagcgtatggttgagatactttatcagcatcgcgatattgtcgcgtatctcgggcgagtggttgatctccaagatctcgggcgtgtgttcgaggttgcgccacgaaaaaccgccctggtgcattttgaatatatgccccagaagaaacgaatccgacacttgcaacttgtcgccgaagatcgtcgagcggctcattatattctgcaacaccggataggcaatataatgcacgaagttgatcttcatctggctgttgtagccgaacgacagccagaactctccgccagcggacgtatcggccgctttcagtcgttcggtctgtacgaggtagcgcgcctcgcagacataacgttcgaagaaggttgtgatcttcttgggcgagccgttgctgatgaaggcgaggtagctgacgaagtggtagagaaagaccacctcgcgatcgaggcgtttccggtcgcacgccgcctcggcagccagtctgtaatcgcgatagtcgcgcagcgacaatacgggggcaggcttgcctgccgacggcggccggctgtaccgttcgggcaggatctgccggcagacgaactcctcggtataggcgatagagtcgtgaacatccggatgcgagtaaaagctgtcgacgttgagtatgccgttgaagatattgctgatcgagaagtcgcgatcggaaagatcggccatagaggcttcgaacagctcgcggccggcgatgaagatgaaataggcatcggccgtcgagaggaaatatttcatgttcgcaatcacgttcagcacctgcatgcggcgcaagcgggaggtagtgtgctgctcgggccgggtggataccttctcgaactcgggcactccgccgctatcgtccggcttgggcgacagaggttcggtcttatccagctcgtcgagcactatgatgaccttgcgtcgcttatactgcgccagaatctgcgtgagctcgtattcgatctcctgaatatcggccaccagcagctccatgtcctgcgatatcgtaccggcgggaaactggtcgacgcccgcccttaccgaccgcctgtaagtggtcttgcggttgaatcgggcgcagagcctctccaaccggtctatcgccctgaacgagttgaagaacagacgcaggaatttctgaaaggcatacgcaagaaccgagaccgacgacaaaccgatcatcgtccactccacgatccacactatcctgcgctccgtcgtttcctgtcccatgtccgatgcgacgaagagcagcgccaccgtaagtatgcacatccacagaatatggtaggcatgcgactcgcatatatccatgatctgataccagcgaaaaccgaagcgcttgaacgacacggtgtctattatggcgttatgcaggttcttggctatgatctgcaagatgttcagctcgttgatattctcctgacctatattgacgcatacgtcgatatatttgcgcttgtgctcttttttcagccgtccgaccaccgcgcccacaaggctcgatttgcctacaccgcgatagcccgacaccagataagtgccgtgacgattggggctgagcagccagttgcgcagcgtgttctcgggcttgtcgcgatgaatgtacttcgaatcctcgcgaccgggattcgtagcacgatgaaagaaattgaaattttcgagcctgatgttgatatacgtgttcagatccttcttcatcactatcactttcagatcaatgcaacatagagacgaaagccggcaaacaggcgatcatcaataccatatacatccaacgcgcatagcggtattgaggcacggacttatcggattcgtccagcaaggagatcatattcgcgaacgatttccaaacatacgcacaacccgggatgaacaagacgacgagacccgatacgattgctatcgcggcaatgctgcggcagcagtcgctatcgatcctacaccaatagtccgacagcaagagagccgccgggacacaaatgaaaaaatagactgcaacggctatgcggatgtcggccatagctctgtcgatagtacggcatatgagcctggacttctccgccctgctgtaatcgctgctcaaccggtcgagcccggatctgagagtaatatcttttttaacattcagctcgtcgatgattcttacctgaatgggacagtccgatttatgcactaccggatcggccagatcgacctcgcactcgcttttcttaacctcggcagtcgtcgctgccgacgacgaagcggcgggcgagccgaaagccgcagcattcgtttgcacgcccgtagcgccggactgcgccgaattattcgtggtcatgtcgtaaatggtttaggttaacagttatacaaagttaataaacgaccgtacaataaacaatttaatagttgcattatacgggctacaacgccctttgcggcaaacctatccgccgatcggcagcggcagcgggcaataatccgcagagataaacgttatatatcaaatagcgactgaattatgaccaaagcagcgaccattgcactgaccatgttatgttcgggcatcatcgcccggcaagcgctcgggcaggtgcagagtccccggagcatatcgtcggagatcatgcttgccgaggccgatacggcggcaatggctgtcttggagcgttatgccgcgcaggcggccgacgcctcgatgccgcatacgacgccgctcgcctctggcctgcgtgccgtcacgcccgacatcgagtcgtggcatccgtcaggacatctgctgccgctggggctgcggcgcagtatagcctccgatatgccggcggcgatacgagtcgcaccgccgcgcctgccggacatgaagaagttacactggaagccctcggagaatttttcgataacgatcagcaacggcagcgccggcaactacatgccgtggcccaactgcccgataggttatctcgacgcacggacgctgtcgtttccgctgccgcgataacgcccccgacggcggcatattcatatttttcccgctcgcgccgcaacgtaacggttttttgagtatctttgcacgttgcagttacgttttgcgacgaactaacccgaacgatataaaaacgatatacgaaatggcagttgaattgaaagatctgacccgcagcgaggagaattattcgcagtggtacaacgatttggtcgtcaaggccggtctggccgagaactcggccgtgcgcggctgcatggtcatcaagccctacggctacgctatatgggagaagatgcacgatgcgctggacaagatgttcaaacagacgggacaccagaacgcatacttccctcttttcattcccaagtcgtacttctcgaaggaggcgcaccacgtagagggcttcgccaaggagtgcgccgtagtaacgcactaccgcttgaagaacgaccccgacggcaacggcgtcatagtcgatccggccgccaagctcgaagaggagctgatcgtgcgccccacatccgagaccatcatctggaacacctacaagaattggatcacgtcgtaccgagacctgcctatcctgtgcaaccagtgggccaacgtcgtgcgctgggagatgcgtacgcgtctgttcctcagaacggccgagttcctctggcaggagggacacacggcacacgccacgcgcgaggaggctatcgaggaggcgacgaagatgatcggcgtatacaagcagttcgccgaggagtatatgggcgtgcccgtgatcgtgggtcacaagtcgcccaacgagcgtttcgccggtgcggaggatacgctcacgatcgaggcgctgatgcaggacggcaaggcgttgcagagcggtacgtctcacttcctcggacagaacttcgccaaggcgttcgacgtgcagtataccaacaaggagggcaagttggagtatgtatgggcaacctcgtggggcgtgtcgacacgtcttatgggcgctcttatcatggcgcactcggacaacaacggtctggtgctgccgcccaagctcgcacccatacaggtggtcatgatacctatctaccgcggcgaggagcagcgtcagcaggtcgtagagcgcttcgagcagatagcacgcgagctggaatcacgaggcgtaagcgtgaagatcgacgccagagacaacgtccgctcgggcttcaagttcgccgactacgagcttaaaggcgtgcccgtgcgtctcgcgctgggtccgcgcgatctggaaaacggcacggtcgagctgatgcgtcgcgacacgctcgaaaagagcaccgtcgagcagcagggcctcgaagagcgtatcgtagccatactcgacgacatgcagaagaacatattccgcaaggcgctcgactaccgcgactcgatggtcacgcgcgtcgacacctgggacgagttcgtcgagacgctcaacaacaagggcggcttcatctcggcgcactgggacggcacggtcgagacggaggtcgcgatcaaggaggccaccaaggccaccatacgctgtattccgctcgacgcggtacccgaggagggcgcatgcgtctattcgggcaaaccgtcgcactgccgcgtgctgttcgcccgcagctattgatcgggacacatgtcgacaagagataacagagaatcggtcatttaccgcgtaacctgggtcgggttggcggtaaatgtcgttttatccgcagccaagatcctcgccggcatcctcggccgcagcggcgccatggtggccgacggcgtgcactcgctctcggatatgtttaccgatatcgtcgtgctggccttcacacggctctcgtcgaaacccgaagacgacgaccacaactacggacacggcaagtacgagacgctggcgacgatcataatatcgctcgccctgctggccgtcggagggatgatcctctacgacagcatacgcaacatagtgctgatagcccaaggcggcaccctgccgcgcccgcatgccgtggcactcgcggcagccgtgctgtcgatcgcggtcaaggagatactctaccgctacacgatacgcgccgcacgccgcaccgactcggccgccttgcaggccaacgcgtggcaccaccgcagcgacgcgctctcgtcggccggcacgaccctcggcatagcgctggcattctttctgggcgagggttggcgcatagccgacccgatagccgcagcggcggtatcgctgttcatattcaagatagccgtcgatctggcgcgcagctcgctgggcgacctgctcgaacggtcgctgccgcgcgaggagaacgaccgcatactgcgcatcgtatgcaacgacccgcgcgtgagatcgcctcacaggctgcgtacgcgccgcataggcgccaatatatcgatcgaggtgcacatacgtctcgacggcaggatgagcgtcgacgagtcgcacgccataaccaagtccatcgagcacgatctgagagagcgttacggcgccggcacgataagctcgatacacgtcgagccgatcaagcgcgattagccgcgcccgacggcggccgagcatcggatcggcggatcggactatacatatatcctcagccgctctgcggcacgcgatttgaagaagtcgtggcgagttatggagtgaaatgaataacgatacggcaatctgaaaattttgtcgtttccgaaattatttctatcttgcactcagaaacgacaaaatattgacacttaaaaacgtattgcctatcgaagaaattctgctcttgtaactgattttatagaggaaagagtatgaacgtgaatgtattaagcgacaagatgctgcttaatagctatctttcgggcgatagaagtgcaatgtcccaactcatagagcgtcactcgcgccgcgtccgcgactacatccgtatgatggtcaaggacaacgacgtagccgacgatatccaccaggaaacctttatcaaagccgtccgcgttatcgacgaaggtcgatatacggactcgggcaagttcctctcatgggtgctccgcatagcgcacaatcgcgtgctcgattattttcgcgctcagaagcagtccaagcaggtcaacgagtccgaagcgggatacaatatattgggtacgatgcggttcgcagagcctacggtcgaagacgagatggtaagccgtcagatcgaagacgacgtaaggcggctgatcgagcttctgcccgacgaacagcggcaggtcgtaatgatgcgatactactccaagatgagttttcaggagatagcggatcagaccgacgtcagcatcaacaccgcgctgggtcgtatgcgctacgctttgataaatctccgtcgaatgataaaggagaaaaatctggttttgagctgatgcgtgcacaatataaatcgccgacactccgttttatagttgtaacaaccttataaacgagtgcctatgggagatatcgacgagaaagcatcacgatccgtctccgaggaggaaatgttctacgacggtgttattcagggcgatgccgagttactctacatcgactgctacctgtcggagcttttccggggagaactaagggttaatttttgaagtggaggagatcgcctgaggcggtctcctttttcgttgcgaccagcagaatgccggccgacatataaaaaaagctcccaccgaagcgggaggcataggtaaaaaccttcggcatatagccttattgtggtaagatgtagaatttcttacaatacaaagatagtgaaatattgtggaaaacaaataattttcactaaatttacctatctaacccgaaaattatggaaaaggtattgggactcgatctgggtacgaactcgatcggctgggctataatccaacgcgaaggcgaccagagcacgcttatagacaagggagtcagcatatttcaggagggtgtagcgcgtgagcagggagcggagaagcccgccgtctagacgcgcaccgacgcccgcgcactgcgcagagcataccgcaggcgccgcaagcgcaagatcgacctgctcagagtgctcgtcgaccacgagctgtgtccgccgcttactcacgagcagctcgacctctggctgcaaaagaaaagatatccgctcgacgagacgtttctggcgtggcagcgcaccgacgagtcgaccggccgcaacccataccgcgaccgttatcgcgccctgagcgagcagctcgatcttaccggcgaaaaggggcgctacacgctcggccgcgctctataccatatcgcacagcggcggggctttctgagcaaccggcgcgacaataccgccgagagcgacggcaaggtcaagcagggcatagactcgctcacggaggcgatgaaggctgccggctgccggtatctgggcgaatacttctatatgctacatggcaagggcgagaagatacgcaaccattacacctcccgcaacgaccactaccgcgccgagttcgacgccatatgcagccgtcagcagttggacccgacgctgaccgacaagctgcgccgtgctatattctaccagcggccgctcaaatcgcaaaagggaacggtcggcagatgcaccttcgagaagggcaagagccgctgccccctgtcgcacccgcgcttcgaggagttccgcatgttatctttcatcaataacattcgcataacgacaccctacgacttcggcgcgagccgccctctcaacgaagaggagcgcgcggctgccatacgcatgttcatgcgcaagagcaagcctacgttcgatttcgaggatatagccaaggctttggcaggccgcaagaggtcatacgcctacgaggaagatgccggcgaggcgccataccgcttcaactaccgcatgtcgacctccgtgtcgggatgtccgacaacggctgcactcgcagatatattcggcgaggactgggtatcgggcatttgcagcctctacacgcgcgccgagggcaagaccaaggagcgaatcgtggacgacgtatggcacgtgctcttctcgttcgacgacgaggagcgcctgcgcgactgggcgcgcacgaaactcggcctgagcgaagacgaggcgcagcacttcgccgccatccggatgcctcaggactacgcctcgctcagcctcaacgccatagacaagatcctgcccggactgcgggcgggactccgctacgacgaggcggtcttcatggccaacatgcaggccgtagtgcccgacgacgtgcgcgacgacgcggcgaagctggagcggatcggcaccgacatcgcggtgctgctcgaagatttcggccgcaacccgctcaatgtccgcacgaccaaagaacagtgcgtccgcgactacctgcgcaactgctgcggcatcgacgacaagcacctggaccgcatgtaccatccctcgatgatcgagacctaccgcgcggcgctgcccgacgccgcaggcatcctgcgcctggggtcgccgcgcaccgactcgatccgcaatccaatggccatgcgggccctcttccgcctgcgcatcctgctcaacaccctgctgcgccagggcaagatcgaccgcacgacgaagatcaacatcgaattctcgcgcaacctgcacgacgccaaccaccgcaaggcattcgaacaataccggcgcgaccgcgaagcggaaaaccgcaagtatgccgacgagctgcgcacgcagtacgcggacgccacgggccgcacgatcgaaccgaccgagacggacatcctgaaattccgcctgtggaaggagcagcagcaccgttgcatctacacgggaaagcaaatcggaatcgccgacttcatcggatcgaatccccgtttcgacatcgagcacaccgtgccccggtcacgcggcggcgacgactcgcagaagaacaagacgctgtgcgactgccgctacaaccgcgaggtcaaacgcgccaagttgccgtcggaactcgccgacgcacaggccatcggggcgcgcatcgaggagctcggatggcggaagcgcatcgacgaactggaaaaacagatcggcaaccaaatccgcaagagcaaaaacgcctcgaccaaacaggaaaaggacttcgccatccaacggcgccactacctgaaaatgcagctcgactactggaaaggaaagtacgagcgctttacgatgaccgaggtgcccgacggtttcagcaaccgccagggcgtagacataggcatcatcgggcgctatgcgcggctctacctcaagagcgttttcgagcggatctacaccgtcaagggtgccacgaccgacgccttccgcaaaatgtggggattgcaggaggagtatgcaaagaaagaacgcgtgaaccacgtccaccactgcatcgacgccatcaccatcgcctgcatcggtcgcacggagtacgaccgatgggcgcaatacaaggcagaagacgagaactaccgattcggtcggggcgaccggccgttattcgtgaagccgtggccgaccttcaccgaggatgtcctggccgttgccgaggggctgctcgtagcccaccacacgcccgacaacatgggcaagcagagccgccgcaagctgcgcgtgcgcggcagaatccgccgcggcaccgacggcaagcccctctacgcccagggcgacacggcgcgcggcgtgctgcaccagcagaccttctacggagccatccgccgggaggacgaggtgaaatacgtagtgcgcaagtcgctcgaccagttgcaggagagcgacgtggcgaaaatcgtggacgacgcggtgcgcaagcgcgtagagaaggccgttgccgacgtagggttcaagacggcgaccaacaccgcggagcacacgatctggatgaacgaggagaagggggtgccgatccgcaaggtgcgcatctacacgccgagtgtcacgcagcccatccacctcaaacggcaccgcgacctctcggacaaggagtacaagcaggagtaccacgtggccaacgacggcaactactgcatggcgatctacgagggcaccgaccgccgcggcaagaccaaacgttcgttcgaactggtcagcaacctggaagccgcccgctacttccggcgcagcgccgaccgtgcggcccgccccgacctggtgccgcagtccgatgcggacggctatccgctcaagtgcatcctccggcccggaacgatggtgctcttctacgagaattcgcccgcagagctctacgaatgcacacagcaggaactgacgagaaggttgtacaaagttacaggattgagcattttgagagttcaaaagaaatgggagtatggtgcaattaccttcaaacaccatcaggaggcccgtcccgccggcgaactgaaggcgaaaaacggcgaatggaaaacgggagaagcataccggcccgtaatcggaatgtatcatacccaactcagagcctatgtcgaaggctacgacttcacgctctccgtcacgggtgaaatcgaattcaaacaccgaccgtcatgctgaaacgtgcgctctttttctccacacccttctgcctgagcctaaaggacaatcagatgatcgtccacacgaaggaggcgcccggccagcagaagcgcatcccgatcgaggacatcggcttcgtggtgctcgaacaacagcagaccacccttaccctgccgctgctgaacgcactgtcggaccacaacgtcgcggtgatcctctgcgggggcgaccgcatgcccaacgccatgctcctcaacctcgattcgaaccggacgcagggtgagaactaccgggcgcagatcgaggcgagcgaaccgctgaaaaaggggctctggcggcagatcgtagaagccaaaatccgcaaccaggccgccctgctgcacaaactgggcaaggacggcaacctgctcaaaccttgctacatgaacgtcaaaagcggcgatgcggacaaccgcgaaggcgtggcggcgaagctctattgggccgagcttttcggcagcggcttcgtacgtgcacgcgaaggcgccgcaccgaacggcctgctcaactacggctacacgattctgcgcgccgccgtggcacgctccctcatgggctcggggctctttcctgcgttcggagtgtttcaccgcaaccgctacaacgcctttccgctggccgacgacctgatggagccgtacaggccctacgtggacgaacaggtatacggactccacgccgcaggacattcggagctgacgcgcgaagcgaaaggcgagctgctgcggctgctcttcgccgacacccggttcgacaaggtggtgcggccgctcgacgtgggtctgaccctcacttcggcatcgctcgcgaggtgcttcgcgggcacggcgaaaaaactcgcgttccccctgttggaatagaaccatgtcggaattacgtctgaatgcttatcggatcatgtggctgttcgtttttttcgatctgccgaccaacaccaaaaccgagcggcgccacgcggcgcagtttcgcaaggcactggagaaggacggcttcacgatgatgcagtactcggtttacgtgcgccactgcccctcgaaagagaacctggaggtgcacatgaaacgggtgcgcaggtcgatgcctccgtcggggttcaccagcctgctggccgttacggacaagcaatacggcgacatgaagaatttctggggtccggtcgagcgcgcacggcccgaaacgccgcaacaattggaatttttttgatatatttgtaacggtacgaacgaaaaaaacgcacgaatcgacttccgcggagtgcgcaacacatggttttcgactggcaaaacagctgcaaacaatcgaaaatcaatagagtaagcgcccgtggttgtggtttgatgtagtttttaaataagatacaaccgcaggcgactgcggatggacgcctgaacagttgtggtttgatgtagtttttaaataagatacaacctactgccgcggcgtgatcgtctgctttccgttgtggtttgatgtagtttttaaataagatacaaccgctcgctcaccgatctggagcggacactgttgtggtttgatgtagtttttaaataagatacaacggccacagcacgagcacggaggcggaccagttgtggtttgat

SEQ ID NO: 524 - DNA, 14379 bp, synthetic construct
  source 1..14379: mol_type = other DNA
  misc_feature 1..14379: note = Synthetic
ttcctgatccgcctgctgttgttgcaggtcgtgcgacgcgtcgtcaagcagaccaaagtcacgtgggacgacatcatagtaggccgggccgccgatgaaagagtccctgccgcggcgtttgtaaagctgcgcgagggtcgactcgacgaaagcgctcgcggcgcccacaagggcgatgacccacatccagaagaccgcgccgggtcccccgacgacgatggccgtggcgacgcccgcgagattccccgtgccgacgcggctggccagcgacacggcgaaagcctggaacgacgagacgtgccgctcgccctccggaccgcttccggccgactcgcccagcacgcgcatcatctcgcccagcaggcggaactgcacgccccgcgtgcgcagggtgaaccacacggcacaccccaagagcgccgcgaccagcacataggtccacagcacgtcgttcacgccgccgatccaacgggaaatagtctccatcagcatactttacacgatccgacagcaaagttaatgctaaaacgcattttccgccggacattcgccggaaagatacggcgcggcacgaaaaaaacaccccgcctgcgcaggggcgtccgtcgtcaccgcgcccgcagggtatactccccggcccgctccgtaacggccttctgcaactccccgaggccgatttccggcccggagaactccacggcggccaccggagggtccagcgtcacgaccgccttcacgccgtcgagggcgttcagcgcatgttccacatgcatccggcaatgattgcacgtcatgccgtccacgataaattcctttttcatcttttcttcggtttcaaccggttcgtcatgttcacactcatcgccgatccgccggcgtttcagccgcaagctgttggccacgacgctcacgctgctcaaggccatggccgccccgccgatcatcgggtcgagcagaaacccccagaggggatagagcgccccggccgctacgggaatggcgacgaggttgtaaatgaaggcccagaagaggttctggcgaatcgtccgcacggtgagttgcgacagccggatcatctccgggattttccggaggtccgacgagaggatcgtcaccatcgcggtatccatcgcaatgtcgctcccccgccccatggcgacgctcaaatcggcctgcgcgagagccgcgctgtcgttgatcccgtcgccggccatggcctccgtccggccttcggactgcaactgccggacgaatccggccttttcgtgcggcaggacgcccgcccggaaacgggtgatcccggctttccgggccgtttcacgcgccgaaccggcgttgtcgcccgtcagcatccagaccgtgattcccagcgcgtgcagccgggcgacggccccggccgacgagggtttcagcgcatcggcaagggcgagcacggcgagcgtccgctcctcgtcggcgaaccaaactacggtcttcgcctcctgcatccacccttcggccagccgttgcagacgggcgtcgggcacgatgccgtggcgggacagcagcgcgtcgttcccggcataccaggtccgcccctccgcgacgccccggacaccctgtccgggaatgctttcgaacccggtcacgggaacgtcccgctccccgccgagcgattcgacgacggcctgcgaaagcggatgccccgagcgtttttcgaggctgaacagaatccgccgcgccgtctccgacccttcggcccacgcagcgtccacgaccgacggacggccttcggtgagcgttccggtcttgtccagcaccacggtgtcgaccttccgggccacctccaggctcgcagcgtccttgacgaggatgccctgtccggcgcccttgccgatcccgaccatgagggccgtgggcgtcgccagacccagcgcacaggggcacgcgatgatcagcacggtcaccagcgccagcagcccgcgggtgaagccctcctccggcgcgaaaagcatccacgccgcgaaggtcagcacggcgaggacgatgatggcgggaacgaaaacgccggcgatccggtcgacggtccgctgcacgggggccttgctgccctgcgcatcccgcaccatgcggatgatccgggccagcaccgtgtcctgccccaccctgtcggcccggaaacggaacgcaccgttgccattcatcgttccggcgaacaccgccgcaccctcctgtttgcagacggggagcggttccccgctgagcatgctctcgtcgacatacgacgcgccttcggccaccgtgccgtccacggcgatgcgttcgccgggatgcacggcgaccagatccccggcgcgaagctccgcaacgggcacggagcgttcgcccgaaggggtgatcaccgtgacggttttcggttgcaggcccatcagtttcgcgatggccgtcgtcgtgccgcgcttcgcccgctcctcaagcagccgccccagcaggatgaaggcgacgatgacggccgccgactcgaaatagacgtgcggctcgatgcccctcgacagccagaattccgggaaaaacaggttgaaaaggctgaacagataggcgattccggtactgacggcaaccagcgtatccatgttggccgccccgtggcggagctgtttccaggcgttgacgaagaactcccgtcccagtccgaaaacgaccggggtggagagcgcccacacggcgtatttcacggccggagcgtccatgaacagcatgcctccggccacaatcggaagacaaagccccgccgcccaaagagtccgccgtttgagcgcccggtaatgcgccgcacggacgtgcgccgcctcgtcctccgccgggccttccgcgtcggtcagcaggtcgtaaccggccgcctgcacggcccgcttcagcaccccgggagagcactcccccggacggtagtccacccgcgccgtagcggaagcgtagttcacatgcgcagactcgacgcccggcaggccgttgagcgccttatcgacccggactgcgcacgaagcgcagctcatgcctgcgaccgggaacgtattcgtgacgatcttactcttttccatgggaacaaaggtaaggtcccgacacgctccgggtgttacagaattatggatatgatttatacctacacttcatccagcggtttcaggccgcgtcctttcagccggcggaattcagtgggcgacatcccggtctgggcgcggaactgggcgctgaggtgcgccacgctcgaataacggagtttgtcggcgatctcgctgacggtcaggtcgccgtaggccagcagttccttgacccgctcgatccgctgggcgaggaagtatttctcgatgctgatgccgttgacctccgaaaagagcttgctcaacgcactgtaatcacggtggcagcgttcgcgcaggtaatccgacaggttgactttcgaggcatcttcgctgtaatgcaccaattcgatcacggccgtccggatctgctcgatgaggcgcatccggctgtcgtcgatcagttcgaacccgtaggcttcgagcagtttgcggaacgcctcccgctgctcccggccgggcttctcctgcacgacgaccgttcccagtccgacatcgaggggcgtgaaccccgctttttcgagcagccgggtgacgaccagaatgcagcggttgcaaaccatgtttttgatatgaaagacgttctcccgttccataaccgcattcgttttatccgtaaatataacacaaaaacgattccgtcccgccgaccgtcttccagcctttcaggttccggccgttgaaaagcgtcggccacgggacctgcgctccgacgaaggtgcagggtccccaacagtgcaagagtctctttttcctatcagtcgggcagttttgatcgtacgaatatagtctatttttttcgggtcttcagcctgtccccctgcaaaattaacctctgacccgctccgtattccgaaaaagtttcgtaacttcggcacagcaaacccatagacgaagccatgaaacatgcgcacatcctgctgctgctcccttgcggcatgctgccgccgctcgccggggcgcagcgcacggagccgcccgaccggttcgacatcgcaccggaataaccaccccgaaaacaagcaaaccaaccaaaaacaaccatgaagaaaaccgcaatcaccctctttttcctgcttcaggccgcgtgtctgttttcgcagatcccccgcccggaatatccccgcccgcagttcgagcggacggactggatcaacctgaacggcgaatggacctacacgttcgatttcggcgcaagcggcctggaacgcggctacgccggctcgaagggattcgacggcaaaatcatcgtgccgttcgccccggagagcaagctctcgggcgtcggccacacggacttcatcggccgcatctggtaccagcgtacgatcgacattccggcagactggtcgggacgcaacgtgatgctcaacttcggagccgtgtactacacctccgaggtgtatgtcgacggccgcttcgtcggccgccacttcgggggcagcacgtcgttctcctacgacatcaccgcattcgtgaagccgggcggcagccacagtctggtcgtcttcgccacgagcgacctgcgcagcggcaaacagactgccggcaaacagtcgctgcaatacgcctcgcacagttgcgactacacccgcacgacaggcatctggcagacggtgtggatggaggccgtggctcccgaggccctcgcacgcgtccaaatgacgaccgacatcgaccagcagcagctgatcgtcgccccgcagttcttccgggaaagcccgaacacgctccgggtgacccttcgggacggcggcaaggtcgtcggcacgcggcaggtccgggcgtcgaacagcagcgtcgtcgtcatcccggtcaaaaaggcccggctctggagtcccgaagacccgttcctctacgacctgacctacgaggtggtcgcccccgacggccaggtgctcgacgccgtgaaatcctatgtcgggatgcgcaaggtccacatcgaaggcaacaaaatctacctcaacaacgaaccctattaccagcggctggtgctcgaccagggtttctaccccgacggtatctggaccgccccgtcggacgacgccctgcgccgcgacatcgagctgggactggccgccgggttcaacggcgcacgcctgcatcagaaggttttcgaggaacgctactattactgggccgacagactcggctacatcacctggggcgaaagccccagctggggaatggatgccaacgacgtggagacggcccgcaacttcctctccgaatgggccgaatgcgtggtccgcgaccggaaccacccctcgctgctgacgtggacgccgatgaacgaggagtggtggcccgacaacacgcagttcccgcgcttcgcctccgacgtctacgacctgacgggacgcctcgacccgacgcgccccgtcaacaccgtcagcggcggcgccgtcgtcaggaccgacatctgggccgtccacaattacgagcagaacccggccaaactgaaagagaaaatcttcagcgacggcacgttcttccatccccgcctgcggacgacccgcgaccagacgcgcaacatcggattcaacgaggtgaaggcgaccgcaaactacgcctggccgcagtacgatggctcgtgcccctacctggtcgatgaattcggcggcatcaaatgggtgaaggaccaggagaagcaggccacggattcccagaccgaatcgtggggttacggacaggcgccccgtacgctcgaagagttctacacgcggctcgaaggccaggtagacgcgctgctctcgctctccggacaggtgtggggctattgctacacccagctcacggacgtggaacaggaacagaacggcatctattgctacgaccgctcggccaagttcgacatggaccggatcaaggccattttcagcaaacgcccggaacatcccgcccgataacgcgccggacagccgcccgcccgaatgaagcgcaccccgaaatccctttccggattttcggggtgcgctttttatccggttcgtcatcgtccgcccgcggcagagcctcgtgcacgaatgcgcccggaaacagaaggcgtcgctgaatttctattcgcgtgttttcccggtttcagagtctcgatataaagtattcctgcatattccaacgatatgcccttgatgaacgctgcaattggagatgcttcatgtcggtgcgtcgcacggcgagtggcggacggtccgacatgcgaccttctgttttcggcaccatgaactcccgaaggcaaaaagccacagcgccggcacactccgcaatagcaaccgacggtttttaaattattcacgaaatataaaaaagtctccacggagtacgcggagacaataggttgaaaaccttcggcatatagccttattgtgataagatgtagaattcttacaccacaaatatagtaaaaaaagatgaatttctgcaattttttatttaattttacagaaaacactttcttcatatggcaaaagtattgggtttggaccttggcaccaactcactgggatgggcccttgtcgatgaatcggagaacgaatatacgctgattgacaaaggtgtagacattttccaggagggagttgcccgcgacaaaaacaatgaaaaacctgccgttcaggatcggacgagcgcccgggcactgcgccgccactatttccggcggcgtctgcgaaaaatcgaactgctcaaaatactcatccgttacgacctttgcccgccgttgcccgaggagctgttgaccgcctggcaaaaagagaaacgttacccgcaggacaatgaattcctccgttggcagcgaaccgacgacaatggggatcgaaatccttaccacgatcgttatgtagccctgtccgagcggctcgatctcgggaatcgcacacagcgctggctgcttggccgggcgctttatcatttggcacagcgacgcggattcctcagcaatcgcaaggaagcaggaaatgagaaagaagacggcacggtcaaggagtgtatcaaaaatctgtcggctgaaatagcagcggcagggtgtcggtacctcggagaatatttctacggactgtaccaacacaaggaacgaatccgcgacaaatacacctcgcgcaacgaacactacctggccgagttcaatgccatctgcgaccggcagcaattgcccgacgaatggcgtaaggcgctgcatcgggcaatctttttccagcgcgacctcaaatcgcagaaggggtcagtcggccgatgcaccttcgagccgacgaagagtcggtgccccgtttcgcatccccgttttgaggagttccggatgctgtcgttcgtcaacaacatccggattacaggaccgggcgacaatgctccacgacctttgacacaggaagagttcgagacgattcgttcgctcttcttccggaaaagcaagccttatttcgatttcgaagagatcgcccgcagaatcgccggcaaagggaaatatgcctgcaaagaggagcgtacagaagctccttatcgtttcaatttcgcccgcacggccaccgtatcgggatgccccgtcacggcatcgctgcaagcgatcttcggagacgactggattacggagattcgcagcctttacctgcttggagcaggaaaaaacgaggaccagatgttgaatgacgtatggcacgccctcttttcgttcaacgacgaaggtcggctgcgtagctgggcctgcgaaaaattgcaactcacggatgaacaagccaaagcgtttgcagccatcaaactcccgcaggattacgcggcgttgagcctaaatgccatcggcaagattctggtctatctgcgctgtggctatcggtacgacgaggcggtattcctggccaacctgcgggcggcacttccgaaggaggtctatgccgacgaaagccgtcggcatgaaatcgaacaggacatcgcctcgctgctgcttgactacaagcgaaatccgtataacaagttcgattcaaaggagcaccgcattgccgactatttcagcgatcatggattggatgcctctcgtctgatccgtctttatcatccctcgaaaatcgagacctatccggatgcgcaacccaaggcaaatggcattctgcaactcggctctccacgtactgcgaccattcgcaacccgatggccatgcgggccctgttccgattgcgcaacctgataaacacgctgttacgcgaaggcaggatcgaccgagacacgaagatccggattgaattcgcccgcggactcaatgatgcgaacaggcggaaggccatcgagcagtatcagcgggaacgggaggttgagaatcggaaatatgccgaagagatccacagccagtatgccgccgaaaccggccgcgagataaaaccctcggacgacgaagtgctgaaataccggctgtgggaagaacagcagcacgtctgtccctataccgggcggcaaatccgcatttcggacttcgtcgggtcggctccggatttcgacatcgagcacacgctcccgcaggctcgcggcggcgatgactcgcagatgaacaagacgctctgcgaaaaccggttcaaccgggagacaaaacgggcgaaactgccggccgagttgtccaaccatgtcgagatcatggagcggatcgaatcgtttggttggcgggaaaaaatggagagtctgcaaaagcagattgaagcccaggttcgcaggagcaaaagcgcagcgattaaatccgaaaaggacgacgccattcagcgccgtcactatttgcagatgcaactcgactactggcgcgggaaatacgaacgcttcaccatggccgagattcccgaaggattcagcaatcggcagggagtcgacatcggcatcatcggcaaatatgcacggctctatctgaagacggtttttgaccgaatctatacggtcaaaggttccacgaccgccgcgttccgcaagatgtggggactgcaggaggagtatgcccgcaaggagcgcacgaaccacgtccaccactgcatcgacgccatcacgatcgcctgtatcggccgccgggagtacgaccgctgggcgcaatatgtcgccgacgaggagcgatacggctacggcgaaagcggcaaaccccgcttcgagaaaccctggccgacctttaccgaagatgtcaaggcggcggccgacgaactgctcgttgcccaccacacgcccgacaacatgaccaaacagacgcgcaggaagttacgggttcgcggccggataaagttgaatgccgacggggaaccaatctaccagcaaggagacacggctcgctgccggttgcatcaggataccttctacggcgctattaagcaggatggagagatccgctatgtcatccgcaaatcgctcgcgcagttacagccgacggacatcgacaagattatcgaatgaccccgcccaggctggtggccaggcccaaagtgacgccggaggcaaagccgatgttcttggccagatactgctgccccagcaccaccagagaactgaagggagcgtaaagcgtaaagcccagaaaaggcagcaaagcccaggcggcccagaccgagccagccaggctgaaggccagcaccacgggggccaccagggtataggacagccggataatggtgcggtagccgtatttgtccgaaagcaatccgccgaaaaagttgctgaccacgccgcaggtgcagaaaaaagtcagggccagagccccggccgtgcgcgactgccccagcacattgacccagtagaggggtacaaaggtattgaagccggcaaacaggatggagcgggccacaatggccacggtaagtttggaaaattccggccagttgttgacgcctggggcctccgtgattatggccccgccgccggacgggacgcgcatgcgccagatgagcgtcaggagcaccgaagccatgaccacggcaatggcggcaaaaatcgtggtgccgcgcaggccgaatacgctcagaatgcccgtggccagcaacggccccagcacaaaaccgctgttgccgccgatggaaaagatgctcagccccgtccccttctgctcacccgaaaccttattggcgaagcgcgcgccttcgggatgaaacagggccgcgcccacgccgcttacggcaatggccagaaaaatggcccagtagctggacataaagcccaccagggcaagaccgccgccggccagcaacacgcccaacgggatgaaccagggcttggaaaaccggtcggccaacagtccgaacacaggttgaatcaatgaagaaaggcaggaataggcaaacatgagtccgcctgtggcttggtagctcaggccataggccgaacgcagaaaaggcagcaccgccggcagcgcgccgccgttgatatcacaggaaaggtgccccagcgaaacaagaagtatcttctttttgtccatggccgcaggctacacgaaaccgacaggaaaacaataccagagaagtctggtcttgcgtctgcgccgaacaggccttcctcctttccctttgcgcactgccgcaaaagcgtctgctggccgtgcagccgtgaaaaaaaacggacaaagttcagggcccgccgtggctctttggggctgcatcaaaaaccgtgtgggaaattggcccgacgggcttgacttttgggccgcgctggggcaaataaacctttcccgttttggaggttgaccatgtacgcgattatcgagaccggcggcaaacagtaccgcgtcgaagaaggttccaagattgttgtggaaaagctcgcggctcagagcggcagcgagatttccctggacaaggtgctgctgctgggcggcgatgcctgcaaggtgggcgccccctatgtggacggcgcggccgtcaccgccgaggtggtggcccaggggcgcggccccaagatcaaggtgttcaagcgctggcggcgcaatgattcgcgcaaaatgcgcggacaccggcaggagtgcaccaccctgcgcgtcaaaagcatcaacggctaactttcggggttgaccggcccgtcctgtggcgcgcgctttgcacagcggcacgcgttgggccggtgcggcaatggccgcgccccttgccgacctggtgtcggcctttctgggaggctcttatggctcataaaaaagcaggcggctcttcgcgcaacggtcgcgacagcgccggtcaacggcgcggcgtcaagcgtttcggcggtcagaacgtgctcgccggcaacatcctggttcggcagctgggcaccaccgtgtaccccggcgccaatgtgggtatgggcagggatttcaccttgtttgccaaggtggacggtgtggtgcgctttgaaaaatatctgcgcaagcgccgcgtgctcacccgcgtgcatgtggaagcgcccgaaggctaaccttcgccgcgcagcacttttacgcgccgattgagggaaggggccgcacagcctcttccctttcggtgtttgttttttgcactattgttgtgattttgagtaatctggccgcggccggacatgggccagtgcccggtgcggcaggttccgcagccgtgctgtttgcgcttcggtctggcggttgcccgccggacgtccgcggtaaaggcgcaagcctgccgaaaaatccgcaacggtcccggcctgagacgcgggcacaggttgtccggtgcggctgcccccgcgtcccggcggaaggatggttgtatgcgttttgttgatgaagcgcgcattgaagtgcgcgcgggcaagggcggccacggctgcatctccttccggcgcgaaaaattcgtgccccgcggcggcccggacggcggcaatggcggcgacggtggcagcgtgctgctcaaggccgacggacgtctgctttctctctatgatttccgtctcaagcgcctgtatgaagcccagagcggccgtcctggacagggcagccagtgcgacggcaaaaaaggcgaggatttggtgctgcatctgcccgtgggcacgctggtctatctggaggaccaggcaggcgaacgcctgctggccgacctcagcgaccccgaagccctggtgaccgtggccgcaggcgggcgcggcggcaagggcaacgagcacttcaaatcttccaccatgcgcgcgccacgctttgcccagcccggagaaccgggcgaaatccgccagttgcggctggagctgaaaattctggccgacgccgggctcatcggtttgcccaatgcgggcaaatccacctttatcagccgcgtttcggcggcccggcccaaaattgccgcctacccctttacgactctgacccccaacctgggcgttatgatcaatgatgtggatccggacaagcgcctggtgctggccgacatccctggccttattgagggcgcgcatcaggggcaggggctggggctgcgcttcctcaagcatgtggagcgcacgcgctttttggtccacattctcagcgccgaggacatggacgacgccgacccttgggccggcttcaccctcatcaacgaagagctgcgccgttttgatccggatctggcgcaacgtcgccaggtggaggttgtcaacaaaattgacctgctgacgccggaacaactggcggccctggaggcccgcgccacggccgacgggcggcgggttttcttcatttcggcccgcgacggcctggggctggagcctttggtggacgaactgtggcggctgcgcgacagcgcagaaccccatacgcccctggtgcatccgcaggagtccgtgcaggtggcggatgaagaatttcctgaaattgaggtcatctacaccagagagtaactgctcgggcggcagcctcccaaggcggtccagacccgcaaaggacagctttatgacgcggattgccgattggcgggaagaacgcgcccgcactctggcccaggcccgggttgtagtggtcaaggtgggcagcgccgtactggctgacgctcacgggcttaacgtcgccgtgcttacggatttggccgcgcagctggcggctttgcgggccttgtccgtgcctgggttggccgaacctcggcgcgtggtgctggtttcctccggcgcggtggcagcggggcgcgcggccttggccgcccatgggcagcatgtggataccgcgggcctggccgcccgtcaggccgccgccgctgtggggcaggggcaactggtgcgcgcctgggacaaggccttttacgcccacggtgtgcctacggcgcaagtgctgctcacccgcgacgatctgcgcgctcgacagcgctttctcaacgccagcaacacctttgcggaactgttgcactggggcgtgctgcccgtagtcaatgagaacgacacggtttccgtgagtgaactcaaattcggcgataacgactgtctgtccagcctgctggccaatctgactggcgcggacctctgcatcaaccttacttcttcgccgggtgtactggccgccaatccggagcacaacccgcaggcccctgtgctggatcacattgacgatgtggccgccctggacctggcccagctctgcggcggcaaaacttctgtaggcacgggcggcatgtattccaaactgctgggcgcgcgccgcgccgcacagatcggcgtgcccacctatattttgcccggccgcgagccccaggtcattctccgcgccctggcggccgccggagtctgcacaacgcctgcgggctacgggccgctggatggcggcacttgggtacaggctgggcaacagcccatcccccgacgcaaattctggctggcctaccagtccgaccccgccggcagcgtgcaggtggacgcgggcgcggccaaggccctgcgccagcagggcggcagcttgctgcccggcggcgtgcatggggtagaaggcgcatttcagcaaggggcattggtgcgcgtgctacaccagggacgcagcctgggcgtgggcctgagcaattacagcgctgcagagctcaaaaaaattatgggcctcaaacgtcacgaggtggccgctattctgggcgacgcccattacccggaggttatccaccgtgacaactttctgctggatgcggtctgaaccgggcgacgcccccaagtccacgccattgctttttcacgccgtataaggtatctagcgtctccggcttgtgcgtatgccaagcctgcggagaggtagcgaagcggccgtaacgcgctcgactcgaaatcgagttaggggttaacagctcctacgtgggttcgaatcccaccctctccgccatttacgcatagtccgctgtt

SEQ ID NO: 525 - DNA, 9416 bp, synthetic construct
  misc_feature 1..9416: note = Synthetic
  source 1..9416: mol_type = other DNA
agggtatggtccttgcccatgccgacgttcaggccgggattgtgggcggtgccgcgctgacggacgatgatgttgccggctttcacgacttcctcaccgaacttcttgatgccgagtcgcttggaatgggactcacgaccgttcttggaactggactgaccttttttgtgtgccatagttgattcctcctgtaattaagcgatagcgtcaatgtggatcttggtgagcttctggcgatggccgttcagcgtctggaatcccttgcgacggatcttcttgaatacgagcactttcttcgccttggcgtcgtcatcgacgacggtggccttcacgacggctccctctacatacggagttccgaccttcacggcgccggcctcgtcgatgaggagcaccttgtcgaactcgacagactcaccattgtgggccgcgaggcggttcacaaagatgtccattccagcttccactttgaactgctggcttgcaatgtcaacgattgcgtacattttactaaaaactttgttaaagttttggaccgtaagcgggccggccatcgtgcctgcctcttcgcggagctcagcggtcatctcattttttggaccgcaaagatacggatttttccgacaattgcaaaatcttttgcgcgattcatttttttttgcgatttttgtttggattgacaattctaaacccgacctatatggcaaacatccctcacatctggaccttcacaccggtcggcggagccgtccgcgtgaaaatcggttccggggccgacatcgcccacctcggagaactggaccgtaaaatgtggaccgtgctcagctgcccggcaaagaacctggaattcgaccagaagacgctggaactgattgacaccgacaaggatggaaacatccgcgtggacgaagtcatcgccactgcccagtggctcaccggcattctcaaggacccggacatcctgcttcagcgcggcaccgaactccccttcaccgccttcaacgaggagacgcccgacggggccaagctcctggcttccgccaagcagatcctgcagaacctcaagctcgagaaagagtccatcgccctcgaggacacggccgacaacgtgaagatcttcgccgagaccaagttcaacggcgacgggatcatcaccccggccaccccggatgacgaagcgctcgccgccctcatcacctgcatcaccgaggtcatcggcaaggcgacggaccgcagcggggccgacggcatcaccgcggaccacatcgaagctttctacaccgcgctcgccgactacgccgcctggcaggacgccggcaccaaggacgtcttcccgttcggggacaagaccgccgacgccctcgccgccgtccaagccttgaaagacaaggtcgcggactacttcatgcgctgcaagctcatcggtttcgatgccgatgccgccccggccgtgggtatctccgtggagaagatcggcgccatcgagggcaacctcgcccaggccgccgagatctgcgaggagccccttgccaagcccgccgccgacggtctcctcccgctggacgccgtgaatcccgcctggaaaccggccgtcgaagccatgcgcgccctcgtgctggaggaaggcaagaaaaccctcaccgaagccgagtgggccgaggtaatcgcgaagttcgccccctacaccgcctggatggacgccaagaagggcgccgaggtggaaggactgggcatcgacaaggtgaaggaaatcctgaaggcggaccagaagggggccctcctgaagctgatcgaggccgacaaggccctcgaggaggaagccctctcgatcgaggccgtggacaagctcctccgcctgaatcacaacttctacgacttcctgaacaactacgtcgtcttctccgacttctacgatcccgagcggaaggccatcttccaggccggccgcctgtacatcgaccagcgctccacggacctgtgcatccgcgtggatggtcccagcccggagatcgccggcctcagcggcatgtacatcctctactgcgcctgcaagagcgagaagctcggaaaggccatgaacatcgccgccgtcctcaccgacggtgacgtggacggactccgtccgggcaagaatgccgtgttctatgaccgcgagggcaacgactggagcgctaccgtcacgagcatcgtggagaatccgatcagcctccgcgaggccttctgggccccgtacaagaaggcggcccgctggatctccgacaagatcaacaaggcagcgaccgacaaggcggccaagggggaaggaaccctctccaacatcacggaaagcgccaccgccaaacccgccgacggcgttcagaccgccaccaaggccgccccgttcgacgtgggcaagatcgccggcatcaccatcgccatcgcagcggtcaccggcgtcgtcacggccatcatcgccgtcctgaagtccctcacctggtggcagtggatcatcctcatcgtgggcttgatgctcctcatctccctgccgtccgtattcatcgcctggcggaaactccgcaagcgcgacctcggtccggtcctcaacgccaacggctgggccatcaacgccgcctccctcgtgagcgtgaagttcggcaagggtctcacccagcttgccaagttcccgaaactcaccgccgtggatcccgccgcccgccgcaaggccgcctggcgccgcttctggctgtgcctcctggccctccttgtcgccgccttctgcttcttcttcttcaccgaccgcctcgccccgtacggtctcccgttccacaagccgcagcccgtggaggaagtcgtcgaggagcctgccacccccgaggcctccccggaggccgcccctgaggccgtcgccgaacccgtcgtggaagaggccccggcggaataaggaaccgcacggcatcatacggcaagcagcgtcgaatgtaatttactgattaccaaactattaaaccaaagtacccggggattttttcccgggtacttttgcaaaatagtcttattataaacaacttacattcgacgcgcaatcaagcaaaaacgtgcctggcggaatgatgccgggcgagtgcgtcaatgctggttttatgcttggtaccgaacgaagaagtatctcttagcaatcaagtgtttacaaacccaccagtaccaatcctccccaaatgcaggatcgtttagaacgaaaggctgcttaattatccagccctaagcactttacagatccggccgtaccaaaccccatggagattacggtatcagattcccgccaatccgacaaagagtccccccattcgacacttaatgctacgccatgttggcgaaacagccaaagaagccacctatcacaaagatgtaaatcctttattgttcatttctcaaaaatagtgtatctttacaaggaaccacttcttggctattattatttgcgataagttgtatgcacattaaggaactctaaaagaagaagataagaattcggaacgaaaaggtcccacggagtacgcgggaccataggataaaatccttcggcatatagccttattgtggtaagatgtagcttacaatgacaaatatagaaatcatattttggaattacaaataatggaaaaggtattaggacttgatctggggaccaattcaatcggctgggcagtcattggtaggaacgaggatgactcctgcatgcttattgataggggcgtccatatcttccaggacggtgtagcccatgacaagagcggggaaaaaccggcagttcaggaaaggacagccgccagggcatctcgcaggcactatttccgtcggcggatgcgaaaggtcgaactgctcaaagtgctcgtcagggaaggattttgtccccacctgtccgatgaggacctcaagaagtggcaaaacgaaaaggtctatcccctcaatgaagactttatgcgatggcaacgctcctacgccgaaccggatagaaacccctatcacgaccggtatcgcgcacttacggagaaacttgacctgaccgaaacccgggaccggtacgtcttgggacgcgccctatatcacatcaaccagcggcgcggtttcctcagcaacaggaaggatgcagcagatgatgcggagagcggcaaggtgaaagaaggcatcagcaagctttcgaaagaaatggccaaagccggatgccgttatctcggggaatatttctatcgccttttccaaaagggtgacaagattcgttgcaaatataccgcccgtgaagagcattacaaggctgagttcgaggcaatctgcgagaaacagaatctgagtgctcgactgaaaaccgatctcgagcggacaatcttcttccagcgttccctccgttcccagaaagggagcgtaggaaagtgcagttttgaaaaggggaagccgcgttgtcccgtctcccaccccaggtacgaggagttccgtatgcttcagcttattaattcggtccgcgtccagagaccatttgaaacggaagcatctcctctgaatgatgaggaagtccaatccataaagtccttgttcttcaggaaaagcaaagcagattttccttttgaggaaattgcaaagaagattgcagggaagggcaattacgcatacaaggagaacgggcgtgatgaccagtacagattcaattataggatgtccgtaagcgtttccgcatgtccggtctcggcggccatcatcagcgcgcttggactgcaaggtcccgatggatgggaagaagagctttgttccgtctatacaaaggcggacgggaagacgccggacggaatcctgaatgacgtctggcatgcgcttttcttctacgatgacggaaagaaattgtccgagtggctctctgctgcgctccaactcgatgaggaaaaggcggacggtctggcgaaattccgtctgtcgcagggttacgcggccctcagtctgaaagccatcaacaaaatcctgccctggctccgtcggggacacatctacagtgacgcagtcttttatgccaatcttcctgcagtacttccttccagcgtaacgcaggacacggccaagatggccgatgtgttcgaaaacgtgagaacccttttggaagatttttccagggatccgttgagcagggagtccagcaaagtcaagaacatatcagactacctccttggggtgtccgacggtgtccatacggagaagctgtatcatccttcgatgatagaaacgtaccgtgccgtcatgccggatggacggggacaggttcatttgggctcgccacggacggaagcattcaagaacccgatggcaatgcgtgccctcttccgactcagggcccttctgaaccggctgcttgacgagggaatcatcgaccctactaccaagatcaatatcgagttcgcccgggagctgaacgacaccaacatgcggaaagccatcgctgactggcagaaagatatggaggaacagcggaagaaggatgctgaggctatccgcagcatcatgggagacggatatgtgccgtccgaggatgaacttctgaagtatcgcctctacgaggagcagaatcacatctgcctgtataccggtcgtcagatttcgccccgcatgtttcttggaggcgtctctgagttcgatatcgagcatacgatccctcgttcgcggggcggcgatgactcccaggcgaacaagacgctctgcgaaaacaagttcaaccgggaaatcaagaaaacgcagattccctccgagctggtcgaccacgatgtcatacttgagcggattgcaggatggaaagagaccatcgaggaactgtcaaaccaaatctcttttcagagaagaaaagcccggggcgcccagacaaaagaagcaaaggatgccgccatccgccggatgcattacctgaagatgaaactgaactattggaaggggaagtacgaacggttcacgatgacgaaggttcccgaagggttctccaaccgccagggcgttgacatcgggatcatcggcaggtatgcccgcctttatctgaagacactcttccgtaaaatatatgtcgtaaaaggtgccacgacggcggctttcaggaaagaatgggggctccagaacgagtattcgaagaaagagcgggtaaaccacgcgcaccactgcatcgatgcggtcactatcgcatgtatcggaaagaacgaatatgacagatgggcccaatatctgaggaaggaggaggattatcagttcgggaaagggccgaaaccccgttttgaaaagccctggccaaccttcacggaggacgtccttgccatcccttccagcctgattgtttcccactacacacctgacaatctgccgaaactggacaagaagaaagtgcgtgtccggggtgtcatccaaaggaactccgacggcgaacctatgtatgcccagggacatacggcgagggcccttctgcataaggatacgttctatggtgccattcagaaggatgacgacgtccgatatgtcgtgcgcaaacccttggattccctcgatgagaagaaggatgtcccgaaaatcgtcgatgatgccgttcgggagaaagtccttgctgccatcgctgagcacggaagtctcaagaaagccgtggcggagacaatttggatgaataaggaaaagggagtgcccatccgcaaggtaagggtatatacgccgaccataacatcccccattgccttgaagccgcatcgtgacgaatctgacaaggagtacaaaagaaactactatgtcgccaatgacagcaattactgtatggcgatatacggtgacgataaaccttccttcaaactgttcaacgcactttctgccgtgaatcacttcaatggaaaggatggaacgtggatcgatgaggtgaatgagaaaggacagccgctgcggtgtatcctccggaccggtacgatggtgttgctttatgaaaagagcccggaagaactgtatgcttgttcgcaagaggagctttctttgcgtctgtacaaagtaacgattctttcttcgatgacagttcagggaaagtatcgatatggtactattaccctgaaacatcatttggaagcccgtccatcaacggaaataaaagagaagaaaggtctttggagaattgacgaagacttccggcctgttattggattgaatcataaccaaactaagttccttgttgagggcgtggatttccacttgaccgtgacaggaaagatatttttcaagaaaaaaggcaaatgataaaacgaaccctcattttcacgagcccgtgccgcgtttcctacaagaacgggcagttggtcgtggagaatcacgagacaggtgagcaaaaaaaggcaccggtcgaagacctgggggttgttctcatcgagaaccagcaggtcagcatcaccgtccctgctctgaatgccctatcggccaacaactgtgccgtggtcttctgtgattcaaagcacatgccctcctccatgttgatgcccttggattcaaattctgtccagggagaaagataccgagaccaggtggaagcgtcattgccactcaagaaaagcctgtggaaacagatagtgcaaatgaagatccggaatcagtcttcactgctgacaaaagtgggacgcgacggtggaaaactgaaaccgttctatactaacgtcaaaagcggagactcggataatagggaagggattgccgctaagatttattgggacgaactgtttggagatgagtttgtcaggtctaggaccggtcctgaccctaattcgcttttgaattatggctattccattttgcgcgcagccatggcacgtgcaatcgtcggctcggggctgtctccttcttttggccttttccataagaatcggtataatgccttccctcttgctgatgatcttatggagccgtacaggccatatgttgacgcagtggtatatcaactgctgcttgatgaaaagacagagttgggtcccgaagtaaagcagcgattgcttcgtgttctttttgccgatacggtgtttgaagattgtacacggcccctggaaattggattgtcgacgacaaccgcttcattggcacgttgtttttcgggcgaagggaaggaactgtctcttcctcggttttgacaatgattgaggaaaaccgactgaatgcctaccgggttatgtggcttttcgttttctttgatttgccggtgacgacaaagaaagagcggaagtcggcatcacagtttcggaagactttggaaaaggatggatttacgatgatgcagtattcggtttacatccggcactgtccatcgaaggaaaaccgggatgtgcatgtgaaacgaatcaaggccgcagttcccgccgtagggatggtcagtatcctttcagtgacggacaaacagtacggggatatcgttaacatttgggggacaaaggagaaaaagttactcgaaactccattacaattggaattgttttagatctttgctattttggaaagcgttacataaggccacttccttgatggaatgcgcggttttttattctttatatccgcgcaatatgctgattataagcgtattgaaaggttaaggttgtggtttgatgtagcgagcgtataaggaacaacttatgtatcctgccattatttgtgagattagttgtggtttgatgtagcgagcgtataaggaacaacaggaaagcaaacgaagccgtgccaaaagagttgtggtttgatgtagcgagcgtataaggaacaacaaaaagaaaaatggataagttgtaccaagagttgtggtttgatgtagcgagcgtataaggaacaaccacgggcgactactcctccgcatcgaacacggttgtggtttgatgtagcgagcgtataaggaacaactcttgcgggtgacgaccacggccatgcgcggttgtggtttgatgtagcgagcgtataaggaacaacatgcggagcagttccgcgacgagtccgagagttgtggtttgatgtagcgagcgtataaggaacaaccatttcagaagacatcgcagatggccaaagttgtggtttgatgtagcgagcgtataaggaacaaccaggttcaactctgccaacggcgtcgagcagttgtggtttgatgtagcgagcgtataaggaacaaccgagtacgactaccagtgaaataatccatagttgtggtttgatgtagcgagcgtataaggaacaactgaccacgcttaggagaatcagaaaaagaagttgtggtttgatgtagcgagcgtataaggaacaacgcggtttggtcgttggtggtgccgggcttagttgtggtttgatgtagcgagcgtataaggaacaacaggccgacaagtccgagggccatactcttgttgtggtttgatgtagcgagcgta

SEQ ID NO: 526 - DNA, 8638 bp, synthetic construct
  source 1..8638: mol_type = other DNA
  misc_feature 1..8638: note = Synthetic
ataatcaaatggttttaagtttgaaaaataccagctacaaaagtataagcatttatcggataagttgttacgcaaaacgcagcagaatggtgacaaatagcccccgaaacaaaaactttcaatggattggggcggaaatcgggctggacaaacaaaaaactcccgaaaaacgaattgttggattacgcctttcgggagaaaaatcagagcatctgtcgttctgtcgtattgttgtactgacttattgaattactgacttaacgggtgaattatgtcagtcattcatctacgagaagtattcggctttggatatgcctttggtgttcagcgaaaagaagacgcttgttttctcttttcgcaagtacagtctttcaagaacggcattgcgcacctgcttcgccccgtatgtaccgatacggaacgcaagggcaataaccgtttcaaggctgtaaacctccatgctgcacctgtcggatattcggatggtgcgctttatctcatactcgttcagaactccacacttgcaaagtgcctttatccctgccttgacggtcggggtggttactccgaacaagtcgcaaagctcccactcgctcatggaggttgcctgtatatcggtcggcaggactactttcccgtactcgtctatactgatgatgttcctttccatatcctatgccatttgggtgtttccgaacgattggtttaacttatctccgaacatggtcaggtcgtggtctatcttttgcgtggttatcttcgcataaagttgggttgtgacaatgttcgtatgtcccaatacacggctgacactttcaatcggcatacctttactgagggcaagggtggcgaacccatgtcttgagcaatggaatgaaattgctttcgtgataccacactcttttatcatctttttcagcggtttgcagatagaccaatagttcagattggggaataccgatttatctgtttggtacggctcgtaacgcttgataatctgcaaaggaatatcaagcagttttacttggaacggaatttttgtcttgtgccgtttggatataatccacttctctccgtttacctccacgatgtcatcggtagtcagttcttttatatccacgaatgagagtgccgtgaagctggcgaacacgaagatgtcacggatataggacagcttgctgtccgcaaactcgtgtgtcatcagtgttttcagctcgtcttccgtcagatactcacgttccttgatgttggggctgatgtggaactgcgcaaagggatttcttgggataagaccgttgaagtgcgcacgcatcaccacacctttcagccacatgcagtttgtccagatgcttccattctgcaatcctctgtcagtggataggaacacggcaaactccttgatgaagtcgggagtaagttcaagcatggacaggtcgctgcgcttgtagttcgccttgatgaacgctgccacatggtttcttgcccgaacccttgccaaataagttcccttgacacggtctgtacccacacgcttttggaaagtggtgttatccttgtcaaacgctccgagcagtgtttcatactcgctgcctatgccctgataggcattgcgcaccatttctgccgtaacgtatgcctcacggtctgaaatgcgctggtaatgtttgatgatttgcgccttgatgttatccaaagcgaggttgatttccctcgcttcggaactcttgcctttggctcggttgcctttcgcatcccaaagggctttcgggatggtccgcttgcagctgaactgtgccaccgaaccgttgattgtcactcgtcccatgatggggacaataccgtttttctccttgctgccgttcacgtagaacagcactttgaatgtacttcttgccatactcgttttttgtttgcaaagttaaatatcaacgagttataccttgatacgcaaatcggtgacaaacggtgcaaaagcatcctacctctgttaaatcttaccttttctcgggtaacgatttgaaaaccgttctctttctatattctgctttttattgtgttttacgctttttcatcttgtcatcgtttgtcaccgtaacgacattgatgttaagacgtttagcgtcatttctcccatttttcgaggttattccagcatttttttgtaaatttgcggataaagcgaagaaacctatggaaaaagtattgggaatcgacctcggcaccaactctgtcggttgggccgttatagagcgggaaggagatgcacgccgcctcgtcgacaaaggcgtaagcatatttcaggagggcgtggcgcgcgatcagggcgtcgagaaacccgccgtacagcaacgcaccgaggctcgcgcgcttcgcagaacataccgccgccgtcgcaagcgcaagatcgatctgttgcgggtgctggtgcgccacgaattgtgtccgccgctcaccgacgaacaactggaccgctggcaatcacacaaaaagtatccgctcgacgacgctttcatcgcatggcaacgcacggacgagacgagcgacaagaatccgtaccgcgaccgataccgcgcgctgaccgagagactcgacatgtcggtcagggccgaccgttacgcattaggccgcgcgttctaccacatggcacaaagacgtggtttcctgagcaaccgcaaggatgagaccgaaaagagcgaaggcgacgtcaagcaaggcatcgcgtcgctgaccgaggcgatgcgcgaggccggatgcgaatatttgggtgaatatttctatcgtctctaccgcgacggaggcaagatacgcggcacctacacgtcgcgcaacgaacactacaaagcggagttcgacgccgtatgtcggcgtcaggaactgccgcccgagctcaccgaagcgttgcgaaaagccatattccatcaacggcctctgaaatcgcagaaagggtcggtcggcaaatgcacgttcgagaggagcaagagccgctgtccgctgtcgcatccgcggtacgaggagttccgcatgctctcgtttctgaacaacatacgcatcactactccgcacgacgacaccacaccccgccgcctcgtcgccgaggagcgcgcagcgatcatgccgctgttcatgcgcaagagcaaaccgatgttcgacttcgaagatatagccaagcgaatcgcgggccgcaaaagcgcatacgcctacgacggcgacgcgagcgaggcgccctacagattcaactaccgcatgtcggactcggtagcgggatgtccgatgacgaccgcgctcaaggagatattcggcgaagactacatagcgacgatatgcagcctctacactttagccgacggcaagagtcccgaacgcatagtcgacgacgtatggcatgcgttgttttggttcgacgacgaagacaaattgaaacagtgggctgccgatcgcctgcgactttcggacgacgatgccgcccgtttcgccgcgatatcgacaaagcagggatacgcgtcgctgagcctcaacgccatcgacaagatactgccctacttgcgcaacggatatcgttacgacgaagcggtcttctgcgccaatcttaaagccgctctgccgaccgacgcgcggaacgatgaatcgctccgacgcgagatcgtcggagatgtggcggcaatcgtagccgacttcaggccgaacccctacatgaaaggcgacaccaaggagagccgaatcgacgaatatttgcgccgacgcggcatcgaagccgacatgcgacggatctaccacccgtcgaagacggagacctatcccgacgccgaacccaatgccgaaggcatgcgcctgctcggatcgccgcgcacctcgtcggtccgcaatcctatggccatgcgcgccttgttccgccttcgaacactgataaaccggcttttgaacgacggtcgaatagatccgtcgacgaagatcaacatagagttcgcgcgcgggctcaacgacgccaacaagcgcaaagccatcgaacgatatcaacgcgaaagggagaacgagcacaacaaattcgccgacgagatccgcaatctgtacggtcggccgatagatccgagcgagaacgatattctgaaatacagactttgggaagaacagaatcacatatgcctctacacgggtcggcagataggcatcaccgatttcatcggttccgataccacgtgcgatatcgagcacacggtgccgcgctcgcgcggaggcgacgactcgctgcaaaacaagacgctgtgcgacaatcgctacaaccgcgacgtgaaacgaggcaaattgccgtcggaattgcccgaccgcgacgccataatggctcgcatcgaaacgctcgggtgggcgcagaagatcgaggatttacgcaggcagatcgagagagccgcgcgcaactccaagagcgccgcaaccaaagaggataaggacaacgccatccaacgacgtcacaaactcaggatggagttggactatcgggtcgggaaatacgagcgtttcacgataaccgaagcgcccgacggcttctccaaccgtcaaggagtcgacataggcatcataagccgctatgcccgcctctacctgaagacggttttcgaccgcgtatataccgtaaaaggcgcgacgaccgccgaattccgcaagatgtggggtttgcaggaggagtatgcgaagaaggagcgcacgaaccacgtccatcattgcatcgacgccataacgatagcctgcatcggtcgcaaggagtacgacttgtgggcgcaatacgccgccgaggaggagtattatcgttactgtaaagggcgcaaacccgtattcgaaaaaccttggccgaccttcaccgaggatgtaaaggccgcgaccgacgaactgttggtggctcaccatacgcccgacaacatgcccaaacggacacgaaagcgtctccgcaaacggggcaaagttcaacacaacgccgcaggcaagataaaatacgcgacgggagacagcgcgcgcggatcgttgcacaaggatactttttacggagctatcgagcgcgacggcgtaatcaaatacgtcgtccgcaaacgcgtggccgatctcggaccgaaagatgtcgaaaagatcgtcgacgaggcggtaaggcaaaagatacgggatgcgatagacaagttgggattcaaagaggccgtcgcgagtacgatatacatgaacgaggagaagcgaataccgatcaatcgcgtcagaatcttcgtgccatccgtcacatcgcccatcgagttgaaagagcaccgcgacctctccgcaaaagagtacaaacggcactaccacgtagtcaacgacggcaactattgcatggcgatatacgagggcgccgataaaaagggcaagccgaaacgttcgttcgagatcgtcaacaatctcgaagcggccgaatatttcaagagaggcgccgaccgcacgtcgcgccccgacctcgtgccgcaatccgacgcaaacgggtacccgctcaaatgtatattgaagacgggcacgatggttctcttttacgaaaacacgcctgccgaactctacgattgctcgacgaaagagctgggtgcaaggttatataaactaaccgaattaagctccatgacagtaaacaacaaccgttacggattaattactttcagacatcatcgagaggcgcgccccgcgaaagatctgaaagccaaaaacggagaatggaaaaccgacgaagagtacaggccgcgcataaaaatacttcacactcaactcaacgctttcgtcgagggatacgatttcgaactgacggtcgccggcgacataatattcaaacgtacgcgccatgattaaacgaaccctcgtcttttcgacgccattctgtctgagcctcaaaaactcgcagatgataatcaatacgcgcgagatgcccgacatgaaacgcagcgtcccgatcgaggacatcggctgcgtggtgctggagcatcaacagaccaccgtcactctgccgctgttgaacgctttgtcggacaacaacgcggcggtaatcctgtgcggcgagaaccgcatgcccaacgcgatgttgttgaatctcgactccaattcgacgcaaggcgaaagctaccgtgcccaaacagacgccagcgaacctctaaaaaaagggttgtggcgtcaggtcgtcgaggcgaaaatacgcaatcaagccgcgttgctcgactctttgggtcgcgacggcagccgtctgaaaccgctctacatgaatgtcaaaagcggcgacgcggacaatcgcgaaggcatcgcggccaagatctattggtcggagctgttcggccgtgatttcgttcgccatcgcgacggcgactcgcccaacgacatgctcaattacggctattcgatcctccgcgcagccgtcgcgcgcgcattaatgggttcgggactgtttcccgcgttcggcatattccaccgcaatcgttacaacgcatttccgctggccgacgatatcatggaaccataccgtccgttcgtcgaccgaatcgtgcatcgcctccatgctgaaacccgacgtgaactgaccaaagaagtcaagggcgaattgttaagggtactctttgccgacacccgtttcgacaagacgatgcggcctctcgatgtgggtctcacgttcacctcttcgtcgctggcgggatgtttcgctggaacccgaaagaaaatagcttaccctatgctcgaataaaatttgataatttcgtatgtccgaaaaccgtcttaacgcctaccgagtcatgtggttattcgtattcttcgacctgccgaccaatacaaagaccgagcgacgtcatgcggctctgtttcgcaaggcgttggagaaagacggttttaccatgatgcagtactcggtttatgtacgacattgcgcatccaaggagaatatgacggtacatatcaaaagggtacgcaaatcgatgccgccgtcggggtacaccagcatgctgagcatcacggacaagcaatacggcgagattcgcaatttctggggcaaggtcgaaaggaaaaagcccgacatgcctcaacaattggaatttttttgatacatttgcaaatagaatcgatataatcgcatcatttccgcttcttcggatcgcgcaggcacattttcgggcaaccgatttaccgcataaacagcgcattatcaaccgataacccgcccgaagttgtggtttgatgtagaatagaaatataacacaacgttacgggattgtcttcgacgccacacacggttgtggtttgatgtagaatagaaatataacacaacctggagaatgtcgaaaagatgacctatacggttgtggtttgatgtagaatagaaatataacacaactaattgttccaaacgttcacgcacacggggttgtggtttgatgtagaatagaaatataacacaacacacgatacctcagctcgcggtcgcttctcgttgtggtttgatgtagaatagaaatataacacaactctaaagttttcagccgctaccttaaggcagttgtggtttgatgtagaatagaaatataacacaacctttcacccactgcggactttctttctcctgttgtggtttgatgtagaatagaaatataacacaactctttcattcggcgatggaatgagcgggttgttgtggtttgatgtagaatagaaatataacacaacgatgagctgccaagcctgaaacagggcgcggttgtggtttgatgtagaatagaaatataacacaactggaacgtcgcaatattctacgcggtgacagttgtggtttgatgtagaatagaaatataacacaacccccgcgacctcacgtggtggcaacaaacggttgtggtttgatgtagaatagaaatataacacaactttacagagcctacggcgagtgagactcaggttgtggtttgatgtagaatagaaatataacacaactggcgaatttttcaaaagtttcgtctaccagttgtggtttgatgtagaatagaaatataacacaacgtaatgtaacatactgatctttaatgtcatgttgtggtttgatgtagaatagaaatataacacaacgccagtaggcttgccattttcatcaactagttgtggtttgatgtagaatagaaatataacacaaccgacagagaggttggcgtttgcacctataggttgtggtttgatgtagaatagaaatataacacaacgcaaaagaaaaaagagaccactgcgaaaacgttgtggtttgatgtagaatagaaatataacacaaccctcggcctttcacataccactggtaagcagttgtggtttgatgtagaatagaaatataacacaactataaatggagtttttggaagagtagttcgttgtggtttgatgtagaatagaaatataacacaactacgttgaagtaatgaatcaccataaaggcgttgtggtttgatgtagaatagaaatataacacaaccattcgcttgaaaataagccgatattcttgttgtggtttgatgtagaatagaaatataacacaacatttatcattcagtcgcggctacgcaggcggttgtggtttgatgtagaatagaaatataacacaactacgttgaagtaatgaatc

SEQ ID NO: 527 - DNA, 8613 bp, synthetic construct
  source 1..8613: mol_type = other DNA
  misc_feature 1..8613: note = Synthetic
actcctcaaaaagtttccgtaacggtatttgccgtctgatatatcgcaaaacattgcaatagcttctcgcaactgcaatgtttctgcaacgttacccaaacatgtctttttgaatttctattttttatctcactgtaatccagtgggatatatttttatgtgggtgtgtattgctgcattggtccatgttttggcctatatcataatgaaacctgttgcgcaacatggtgtaattaacggaattattgcactaaaaacagaattcattatgatacagatagacagggagacatttcagatgatgctccaccagataatgaaacggtttgacaggtagacgacagactgaaccgcatgaacaggcagacggccgcccttgagggtgacaagctgcttgacaaccaggatatgtgcgaactccttggtgttaccaagcgtacacttgcacgctaccgccagaagaaactcgtcacatactatatgatagacggacgtacatattacaaggcttcggaagtccaggacttcctgagcaggaaaggaaaagtactgccggcaaaaatcaaaaaggaactcggtattcaatcctaatcaaacggcagtatggaaattatatgtattgacaaacggacatttgacgaactggttgtccggctcagcatgattgagaaaaaaggtatcggtatatgcagtccggccaaagacgcgggactgaaaaaatggatggacaatcaggaggtgtgcggggttctccgaatatccaagaaaacacttcaggtatatcgcgagaaaggactgttgcctttcactcggatcaagaacaagttcttctacaaaccggaagatgtacaaagcctgttggaatcaagttatcacccacaaaaaagaaagccatgagttacgatcttataaacagaaaagaccagcggattgatactattttcaaagggctggaaaacatggagcgcatgatagacgcaatacggatggctccgaggcccgcatttcacggtgattatttcctcacggacgaggaactttcaaaactgttgaaagtaagccggcgtaccttgcaggaataccggaccctcggtgtgataccttactaccttgtacaaggaaaagccctttacaaagaatcggacataaagaaagttcttgacgacgcttataaaagatgcagggaagaacagcgatgggtatgaagcaaaagtaaaagaaacggcctctttacaaggtcgtttctttgttgtcggacaattggtatccgaatctccttctccgtttcctgacaataacatcttcttgatacaggccgggaatccgatccattccggctgctttcagccgtttcatgtcctcgtccactttcccgtcagtcactttggcgtaaagctgcgtggtttcaattcgcatatgacccatcattttaccgaccgtttcaattgggatgcccattgaaagagttatatgggttccgaaattatgtcgtgccgcatggaaaaccaacttacgccctataccgcaaatttcggcgatgcgtttcaagtaacgattcaacgaactgttggaatacatggggagaagctttccttcaggaaccatatcacggtatttttcaatgatatgaaacggcagttccataaggggtatttcaaaatcaacccctgttttcttgcgagaactcctgatccaccaggtaccgtcttccgcgagagagagattttcattcgtcaacaaacgcatgtcgctgtagggaatacccgtataacaggaaaacaggaacatatctctcacatgataaagaatctgatcatggagaggtgttgtcataattctattcaattcttcagaagtgagatatttctgttctggtttcggatgtaccggttcatatccgacaaacgggaatactgttattataccatccgcgatggcttctccgacaattgttttcagttgcacggtaagattgactattgtacctgaagccagacaacattccgtacgcagatacaagtcatatttttcaatgaaggaacggtccaatgcggcaaaagggatatctgacagcttatattgcacctgtaaaaaacgtaccagatgattgtaggaattgcggtaaaccctcaatgtcttttccgtacgattgatcccaacacgtttctcgaaatttctaatgaaaagtctgaaatagctcaatagagtttcctgttccgaagccatacccaaaagttgatgctttacatcctctgctgttacatcctcacggattgcagattgttccgcatagatgccgagcgcggcagcacgtatttcatccagtctgttgtttatgtctcttgccgcagcgcttttcccacaggcacgtccagataaccacaaagactgtggcacacgaagcttgacactgaatgctgtttcagagtacttgccgacaataagccgtgccattacgggacaatttcccctggcatccgcctcgctctttttaaggtagaacgaaacctttacatctgtctgattcataacctgttccattgtttgcaaaattaacggagacagagttaatcatcggcatgtaaaatatcgtcaaacatagacaaagatggcaccattgactttcgtatcttatatttttcttttaccgaaaaaataagtatcttcgctgagtcaaaatgatgaaactgcgttctttacggacggaacagaagtgactattcaaacggattaatgcaaccggaatgggcaacggataggtagcaatttttctgcttaactattcaaaaaacggcttcaaagcacacatttacaaatgcggaataatgctgcgtatctccctgaaagcccaatagtttacattattcttcctaaatccatccgaaatcgggcgagtttctgtatatttgttcaaaatattttgtcttatggagaaaattttaggtttggatctcggcaccaactccatcggttgggcaattataaatagagacgaagactcccgtacactcgtaaatcgaggtgtttgcatttttcaggaaggcgttgctcgcgacaagagcggtgagaaacctgcggtacaagatcgcacgaatgcccgtgccctgcgccgtcactatttccgtcgccgcttacgcaaaatcgaattgttacaggtgctcatccgtcacgacctgtgccccgcactctccgatgccgaactcgaagagtggcgggctcacaaaaaattcccgctgaacgacgaatttatcctttggcagagaaccgacgacaacgccgacaagaatccctatcacgaccgttatcgcgcattgaccgaagaattgaatctctcgacacaacacgaccgttatacactgggacgcgccctgtatcatttgggacagcgtcgcggttttttgtccaaccgcaaagaagcgggtaaggacagcgaggacggaaaggttaaggaaagcatccgcgaactgagcgaagagatgcatgccgcaggctgcaactacttgggcgaatatttctaccgtctgtatggcgtagaacaaattcgcaagcactatacggcacgcaacgaacattaccttgccgaatttaacgccatctgcgaaaagcaacacctttcggaagcgttgaagaaggagttacatcgcgccatcttcttccaacgtccgctcaaatcacaaaagggactggtcggcaaatgtaccttcgaaaaacgcaagagccgttgtcccgtatcgcatccccgatttgaggagttccgcatgttgcaattcatcaacaacatccgcatccaaaccccgtcagacgaagatccgcgatctttgaatcaggaggaatacgaaatgatcgagcccttgttctaccgcaaatcaaaacctcatttcacattcgaggagatcgccaagaaacttgcgggaaaaggcaaatacacctgcaagggcgaccgcacggatctgcccgtacacttcaatttctccgcgacaaccaccgtcagcggatgtcccgtcacggcacagttgaaagatgttttcggcgacgactacatcgcgggaatccgttctctctatatgttgggcgcaaacaaaaccgaagatcagattctcaacgacatttggcacgttttgttctcgttcgacgatgacgagtatctgaaggagtgggcaggacgtaatctgcaactcccggaagaggatgccgaaaaattcgtaaaaatcacgcttccgcaggattatgccgcactgagtttgaatgccatcaacaaaatcctccccgatctgcgtcgtggttatcgctacgacgaggcggtctttatggccaatctgcaaaacgtgcttccgcccgaaatccgcacggacaaacaacaagtggatcagatccgcaaaaacatccgcatcgaattggaggacaatgtacaagcaggacatctgacccaagaaaaggttatcatcaactatctggaacatcaggtcggtattgacaagcggcacatgcaacggctttatcatccgtcgatgatcgagacctaccccgcggttcatcccgacgacgagggacgaatccgcttgggatcgccccgcatttccgccatccgcaacccgatggcaatgcgtgccctgttccgtatgcgtgctctgatcaacgaactgctcgacaagggtgagatcagtcccgcaacgaagatcaatatcgaatttgcccgcggtctgaacgatgccaacaaacgtaaagccatcgaaaattaccaacgtcaccgcgaacaacaacgcgatgagtacaaaaaggaaattatcaaactttacaaagccgagaccggtcgggagattgagccttcggaaagcgatctcttaaagtatcagctttgggaggagcagaaccacatctgcccctacacgggtaaaacgatttcaatccgcgactttgtcggtagtgatgtttcgttcgatattgagcacaccattccgcgttccatgaacggtgacgactcgcaaatgaacaaaaccctttgcgaaagtcatttcaaccgcgacatcaagaagggacaactcccttcatcgctggccaactacaacgaaattatggcgcgcatcgaaaccttcaaatggcaggaggagatcgacgagttggagaaacaaatctccaaactcaaaatgcgcagtaaatctgccgccacaaagcccgaaaaggacagtgccatccaacgccgtcacgaattgcaaatggagttggactattggcgcggaaagatggagcgtttcaccacgacgcaggctcccgaaggtttcaccaaccgtcaaggtgtcgatatcggcatcatcggccgttatgcccgtttgtatttgaaaacggttttcgaaaaggtttacacggtcaagggagccaccacagccgaatttcgcaagatgtggggtttgcaagatatttacagcaagaaagaacgcgtaaatcacatccaccactgcatcgatgccatcacaattgcctgcatcggtgccaaggaatatacggaatgggcgcactatgcttccgccgaggagtattatcgttgggggcagggtgcacgtccttctttccccaaaccgtggccgaccttcaccgaagatgtcaaaaatatcggcgaagagttgcttgtggcacacgacacgcccgacaacatgtcaaaaccgagtcgcaaaaaactgcgtaagagaggtattatatgttccaataaagcgggtgaacccctatacattcaaggcgatacggctcgcggagtgctgcatcagcagaccttttacggtgcgatcaaacgcgatgacgagatcaaatatgtcatccgcaaatcgttggatcaaatcgccaagaaagatatcgccaacatcgtcgatgaggtggtacgccagaaagtccaagacgccgtcgagcaatacggagaacgcatcctgaaagattccggacacaccatttggatgaatgaagaaaaacggattccgatacgcaaggtacgcctgtttacaccaagcattacccaaccgattcatctcaaggaacagcgtttccgctcaccccaaccccacaaacgggattattatgtcgccaacgacagcaactactgtatgggaatttacgagggaacggactccaaaggcaaaaccaaacgcggattccgtctggtcaataatttggaggccgccagatacttcaacgaaaagcgcaaaggcaactcgttatgcgatcttgtacccttgtccgacgaacacgaatacccgctcaaatacattctgaaggttggcactatggtactcttctacgagaatacacccgaagaacttttcgaagcatccgaggaagaactatccaagcgtttgtataaagttacaggtatgagttctacgacagtagatcaaatttataattatggtagaattatttttaaacatcatcaagaagctcgttccgcaggagaattaaaagcaaaaaatggtttatggaagattaatgaagactatcgtcccgttatcggcataaatcacactaaattcaatgctttagtcgaaggctatgatttcgatttgagcgtcacgggaaaaataaccttcaaacacgtactctgatgctgaaacgcgcgctatacttctcgacaccgtactgtctgagccttaaagacaaccaaatgatcatccatacccgtgaggctcccgacatgaaaaagagcatcccgatcgaggacattggttatgtgattctggatcaccagcaatcctccataaccctacccttgctcaatgcgctttccgacaataatgttgcagtgatcctgtgtggcgataatcgaatgcccaatgccatgctgatgaatttggattcgaacaccacacagggagagagtttccgtgcgcaaatcgaagcaagcgaacctttgaaaaaaggattatggcgacaagttgtcgaagccaaaatccgcaatcaggccgccctgctcactaaattaggtaaagacggagacaaactaaagccctactattcaaatgtcaaaagtggtgacacggacaatcgggaaggaatagccgccaaaatctattggaacgaattgttcggggcagacttttgtcgcaatcgggacggatccgctcccaacaacctcctcaattacggctacaccattctccgtgcagctgtcgctcgtgcattgatgggatcgggactgtttccccaattcggcatattccaccgcaaccgatacaatgcttttccgctggcagatgacattatggaaggctatcgtccttatgtcgatgaactcgtatataaattacaccagcaaggcgtcacgaaactcgacaaagaagtcaaaggagaactgcttcatttgttatttatggacacccggtttctgaaaacgcaacgtcctttagatgtaggccttagcatcacttccgcctctcttgcaaaatgttttatgggaatcgaaaaaaagatcaactatccaaaactcgaataaatgtccgagaaccgtttaaatgcttaccgaatcatgtggctgttcgtattttttgatttgccgaccaataccaaaaaggaacgacgcaatgcgactcagtttcgtaaagccttggttaaagacggatttacaatgatgcagttttctgtttatgtacgtcattgtccttccaaagaaaatatgaaagtacacattatgcgagtccgtcgcaacatgcctccatcgggatataccagtatattgagcgttaccgacaaacaatacagcgatatccgaaatttctggggtaaaatcgagcagacaaagcccgaaatgcctcaacaattggaattattttagtatcttcgcttttagaaccataaaaaataacatcaagtccacttccccggctgcatcaaagtgatttttcatacgccgaatcaagtataaatcacttattatcacacgcataacataccgaggttgtggtttgatgtagaacaagaataagatacaacgcgagcgaagccatgagaggtatttactcagttgtggtttgatgtagaacaagaataagatacaacttctttttgcgaacacttgacaatcgatatgttgtggtttgatgtagaacaagaataagatacaacagcctctggttggtctgaccgtgtatactgttgtggtttgatgtagaacaagaataagatacaaccaccagtagttaccatggattcgtaatcaggttgtggtttgatgtagaacaagaataagatacaacaggaaatgcggtacgatagtccaccggttggttgtggtttgatgtagaacaagaataagatacaacaccaagttaccgcgatgaagcggttatcagttgtggtttgatgtagaacaagaataagatacaacgatccgcgaagaactctgatacccctgaatgttgtggtttgatgtagaacaagaataagatacaactctcgagggtttgcgttgatcggcattggggttgtggtttgatgtagaacaagaataagatacaactcgatcgaaggattacctacacgattgagagttgtggtttgatgtagaacaagaataagatacaacaataacctaatccaaaaggttccggcaagggttgtggtttgatgtagaac

SEQ ID NO: 528 - DNA, 6709 bp, synthetic construct
  misc_feature 1..6709: note = Synthetic
  source 1..6709: mol_type = other DNA
gtggcctgcgccgtcctcagcgaccgagctggccgcaagcgaccagatacggccgtttttctccattctcgtgtgcgcgcttccgccgcggagcgcctgctcgaccgcttcgagggcagtttggcgcgaatgggccggtgcagtctggcagaactgcgctcggccgagagtctgggcatcgcccgagccgccgtactgtccgccgcgctggaactgggccgcaggctgagagccgagcaaagccggtcgctcgatcaggtacagaccgaccgcgacgtaatcgagatgttccgtccgctgatcgccgagctgccttacgaagaattctgggccctgtatctcaactcgtcgaaccgggtgctcgaccgtgtacgcatcagtcagggcggcgtatcggccacggtcgtcgaccaccggctgatcgtcaagcgggccgtcgagaagctggcccacgccgtgatcctcgtgcacaatcacccctcgggcagcgaactcccgagcgaggaggaccgcacggtgaccgagcgcgtcgcgcaagccgtctcgctgttcgacatcgcgctgctcgaccatatcatcgtcacgtccggcccctgttacagtttccgcaacgaaggctttttcgacgatagagattagcctcctctcggaacatttccatcgaaatcgctcaaaacgtcttccggcacggtatcccgtgccgttttttttgatttctgtcgttccgtttgtgctctccgattcggcttcccgacctccttcatctcgttcggttccggacaagaccggccctgtccgatccaatccgcagcccggcggccacgcttaaatccgctcttaagaaaccaaaccccgatcacaaaaaagtctccacggagtacgcggagacataggtataaaaccttcggcctatagccttattgtgataagatgtagaactcttacgtgtcaaatatacgaaaaaaatcttgcgattgcaaaattttatttaattttactacaaacagacaccgatatgacaaaaatattaggattggacttgggaaccgcctcgatcggatgggctctcgtagagcggaacgacacggaatatgccttgctcgaccaaggtgtagacatctttcaggaaggcgtggcacgcgaaaagaacagcgagaagcccgccgtgcaagaccgaaccgcagcccgcgccctgcgccgtcattatgcccggcgacgattgcgcaagatcgacctgctccgtgtgctcgttcgccacgacctctgtcctgctctgaccgacgaacaactgaaagattggaaacagaagaaaatctatccgctgacggacgaattcatccgctggcaacgaacggacgaccgcacggacaagaatccctaccgcgaccgctacaaggcgctgaccgaaacgctcgatctcgacacgcaaagggaccgttacacgctcggccgggccttatatcatctggcgcagcggcgcggattcctgagcaatcgcaaggatgccggcgacgaaagcgagagcggtaaggtccggcagagcatcgagggcctgacggtcgacatggagaaggccggatgcgcctacttgggcgaatacttttaccggctttacgcccgaaaagagaaaatccgtacgaaatacacctctcgcaacgagcactatctggccgaatttcgggccatctgcgaaaaacagcggctcgccgacgatctgaggaaggcattgcaccgcgccattttctaccaacggccgctgaaatcgcagaagggatcggtcggccgatgcacgttcgaaaaggacaaaagccgatgcccggcatcgcatccgcggttcgaagagttccggatgctctccttcgtcaataacatccggatcacgacgcccgacgacccggaacctcgtccgctctcgcgacaggaagccgaaacgatcctgccgcttttcacgcgcaaaaccaaaccgcacttcgatttcgaggagatcgccaagaagctcgccggcaaaggccgatacgcctgccaaggcgaccgcggcgaggcgccctatcgcttcaacttcgcgcggacagccaccgttacgggatgcccggtcacagcttccctcattgcgctgttcggcgacgactatctgacgaaaatatgcgacctgtatacgctcggggccggcaagacccgagaacagatactcggcgacgtatggcacgcgctcttctcgttcgacgacgaagaacggcttagcgcgtgggcaaagcagaaactgcacctctccgacgacgaggccggacgcttcgccgccatccgcctgccgcaggactacgccgcgctgagcctccatgccattaacaagattctgccctacctgcgggttatcgctatgacgaggcggttttcgtcgccaacctcaaggcggtgctgcctccggacatctactccgacgaatcggaacgaaacgctatcgaagccgacatcgccgcgctgataaccgatttccgacggaatccgctgaacaggggaacgaccaaggagcaatgcgtccgcgactatctgcgcaactgccggggcatcgacgaaaaacgcctcgggcgcctctatcatccgtcgatgatcgaaatctatcagacggcgcaacccgatgcgcagggcgtcctgcaactgggctcgccccgaacgccggcagtacgcaatccgatggcgatgcgggcattgttccgcttgagggtcttggtcaaccggttgctgcgcgacgggaaaatcgatcgcgaaacgaagattcacatcgagttcgcccgaggactcaacgatgccaaccgccgcaaggctatcgagctgtaccagcgcgaccgcgaggccgaacgcaaagcgtacgccgacgaaatccgccggcaatacgcctcggaatcgggccgggagatcgaacccaccgacgacgacatcctgaagtaccgtctgtggaaggagcagaaccacatttgcccctacacgggcaaacggatcggcctgtccgacttcatgggcgattccgcgcgtttcgatatcgagcataccgtcccccgagcgaggggaggcgacaactcgcaaatgaacaagaccctctgcgagaaccgcttcaaccgcgaactcaagcgcgacaagcttccgtccgaactcccgaatcacgccgacgtcatggcaaggatcgacgaactcgggtggccgaaggaaatcgccagcttgcaaaaacagatcgaaatacagaggcgcaagagcaaaagcgctacgaccaaatcggaaaaggacggagccatacagcgccgccatatcctgcagatgcgactcgactactggcgcggcaagtacgagcgcttcacgatgacggaagttcccgacgggttcagcaaccggcagggggtcgatatcggcatcatcggcaagtacgcgcgactctatctgaagacggtcttcgagcgaatctatacggtcaaaggcgccaccacggccgaattccgccggatgtggggattgcaggaggaacacacccggaaggaacgtgtgaaccacgtccatcactgtatagatgccattaccatcgcttgtatcggcaagcgggagtatgaccgttgggcgcggtacgtctgtcaggacgagcggtaccggaggggcgaggcggatagaccgcagcccgaaaaaccgtggccgacctttaccgaagatgtccgggcggtagccgaagaactgctcgtttcgcaccatacgcccgacaacatgcccaagcagagccgcaaacggctgcgcgtgcggggcagggtccagaagaacgacaagggcgaaaccaaatacatgcagggggataccgcccgcggcgccctgcatgagcaaactttctacggggctatcgagcgcgaaggcgaaatccgatatgtggtacgcaaatcgctcgaccagttactgccgaccgatgtggataaaatcgtggacgaaacggtgaagcggaaagtgcaggaggctatcgaagcattcggattcaaggaggcaatggacccgcagaagcatactgtctggatgaacaaggataaaaatgtaccgattcggaaggggcggatattgaccggtgtgaaaaatccgattctcctgaagcctcatcgcgatgtatccgttaaggagtataagcgatattaccatgtcgtcaacgacgggaattactgcatggcgatttacgaaggcagagacaggcagggcaggttgaaacggacgtttgaaatcgtcaataaactggaggcggcccgttatttcaaacggagtgcggaccgggaatcccggcccgatttggtaccgctgtcggatgtcaacggttattcgctcaagtatctcttgaaaacggggacgatggtgttgttttatgaaaattccccggacgagttgtatgaatgttcggtcggagagttggctaaaaggttgtacaaggtcgtgggaatggcgcaggatggtcgtgtccagtttctgtttcatcaggaggcacgggaccggaaagccgttacggcggagtgtggaatgggaatttcggttttcgatgcacgccatcctgctccgaagttgaggataagagtttccaattttaaaatgttcgtcgaaggctatgacttcgaactgacggttacgggggaagtaaaattcaaacggtaattgcttcatggtgaaacgcgcgctgttcttttcgacgccttatagcctgagtcttcgggacaatcagatggttatccgtacgaaggaggcccccgacatgcagcggaccgttccggtcgaggatatcggggtggtggtgctggaggaccgacagacgtccgtgacgctgccgctgctgaatgcgctctcggataacaatgcggccgtcatcttctgcggcgacgaccggatgccgaacgccatgctgatgaatctcgattccaaccggacacagggcgagaactaccggacgcaaatcgaggcgagcgagccgttgaaaaaagggatatggcggcaaatcgtcgaggcgaaaatccgaaaccaggccgccttgctgcagaagttgggcaaagacggggagcggttgaagccctattaccggaatgtccgcagcggcgatgcggacaaccgggaggggactgccgccagaatttactgggcagagctgttcggccgggatttcgttcgtatgcgggagggagatgttcccaataacttgctgaattacggatatacggttctgcgggcggccgtcgcacggtcgctgatggggtcggggctgtttccggcgttcggcattttccaccgtaaccggtacaatgcctttccgttggccgacgatgtgatggaaccttatcgtccttttgtggacgaattggtgtacgggctccgtatgcagggcgagtcgcaactgacgcaggaggtcaaggggaccctgctgcggatactgttcgccgatacgcgtttcgagaaggtgatgcgtccgctggatgtcggcctgacgtttacggcggcatcgctggcgaaatgtttcgctggaacgcaaaagaagattgtttaccctttgttggagtgacaggatgtcggaagtccgtttgaatgcatatcgtatcatgtggctgttcgtgtttttcgatttgccgaccaataccaaaaccgagcgtcgtcatgcgactcagtttcgcaaggccctggagaaggatggcttttcgatgatgcagtattcggtgtacgtgcgtcactgcccctctaaagagaatatggaagtacatctccgtcgggtgcagaagtcgatgccgcctgccggatataccagtatcctgagcgttacggacaaacagtacagtgagattcggaactattgggggaaaagcgaacgggcccggcccgagatgcctcagcagctggaatttttttgatatattgctctttgaaatacgaaattacatccgaccaacttccccggtgtgcggcaggacgttttatgcatcggtgtcatatgtgtaacgtgcagaatatgaattactgccatgcgcgaggttgtggtttgatgtagaattggaatgagaaacaaccgcatatggcatggaataccatgggaagaagttgtggtttgatgtagaattggaatgagaaacaactgcgcattgtcggccacccgcgcatcgccggttgtggtttgatgtagaattggaatgagaaacaaccggcaccgctcaggtctttagacgcgaccgttgtggtttgatgtagaattggaatgagaaacaacacgggaacattatgttttcgaaccgctgctgttgtggtttgatgtagaattggaatgagaaacaactcgcggcgtggaacggttcgcgccctgggtgttgtggtttgatgtagaattggaatgagaaacaacggcgattctgtccatatttactagtaatcgttgtggtttgatgtagaattggaatgagaaacaacccgtgcggcatccgcacccaatccgctcgaagttgtggtttgatgtagaattggaatgagaaacaacatatcttcaatctcctgttcggccgatggagttgtggtttgatgtagaattggaatgagaaacaacaatggaaaaggcactatcgcgtatcagcaagttgtggtttgatgtagaattggaatgagaaacaacgtggagagtgtagaggtggtcatcagtgaagttgtggtttgatgtagaattggaatgaga

SEQ ID NO: 529 - DNA, 5081 bp, synthetic construct
  source 1..5081: mol_type = other DNA
  misc_feature 1..5081: note = Synthetic
cggcttgctttccttcgattgcttcgcagagggcgggcagtacgttttcttccacgccgaagacaatgcactccgggtggtcttttttcatagaaagcatcaattcctcgttgccgttttcgatttcatagaggtcgtatgccagttcgacatactttccgggttttacagtttccatataagtgattaaaatttaatttgttacttttttagtgcctgaattttgaatgtaaaggtacataattttttggaaaaacttttatacaactctttgttaataacaatatttgtcgtacctttgttcccactaaaacctcgatacccgggtggcggaattggtagacgcgctagattcaggttctagtggtgtaacaactgtgtcggttcgagtccgatctcgggtacaaacaggctgataatctaaagattgtcagcctgttttttttgataagcggcttttggataaaaaaagtctccacggagtacgcggagacgtaggttttgtcaaccttcggcatatagccttattgtgataagatgtagaaaatatcttatgtggcaaatttactataaattccgtaccggacaaatttttttggtatatttacagaaaaattttttcattgaaaacacaaatatcaatatagcatggaaaatattttaggaatcgaccttggaacaaattcaataggctgggcaatcacagaaagacaaggagagggatttttgctaaaaaaaagtggtgtcaatatttttcaagagggggtggcgcgtgaaaagaatgaggagaagccttcggttgcgcttcgtacagcatcgcggggtataaggcggcattattttcgtcgtcgcttgcgcaaaattgaagtgttgaaagttttggttaaagccaagctatgtccgccattgaccgacgagatgctcgaaaagtggcggtatgaaaaaatatatcctttggacgaggcttttatgaattggcagcgcacaagtgacaacgaggacaagaatccgtaccatgaccgctatgaagctttgactcgggagcttgacttgtcgtgtgtatccgaacgctatttgcttggccgggcgttgtatcatctctcccaacgtaggggatttttaagcaatcggaaggatacgacagaagacagcgacggaaaagtgcagtcgtccatcgaggagattgacatggaaatggaagctatgggatgcgagtgtcttggtgaatatttctataggctgcatctgtcgggggagaaagtgagaggaaaatacacgtcgcggaattctcattatcgcaaggagtttgaagcgatttgccggaagcagcatctgtcggatgagttgtcggaggaacttcgccgtgcgatatttttccaacgccccttgaagtcacagaaaggcagtgtcgggaaatgtacgttcgaaaaaacgaaatcgcggtgttcggtgtcccatccgttgtacgaggagttccggatgcttagcctgttgaataacatccgaatcaggacacggaatgacagcgactatcgtccgctgactgaagaagaaaggaatcggataaaaccgaaattcttcagaaagacgaaagataggttcgactttaaggaattggcaaaggagctgtgcggaaagcggattagctacggatttcgtgatgataaggaggatcttgacgtacggttcaattatcggatgtcggccagtgtgtcgggatgcccggtcactgcaggactgatggacgtgtttggagaagactggctttcttcaatgtgtagcgtttatcaattgtcggcaggaaagacagaggaggaaatccttcaggatgtgtggcatgcgctgttttcgtttgacgacaatgagcggttgagaaggggggcggagcttaaattgcaacttacatcggaacaaagcgataaattcgcgaaaatcagaatcagtcgtgaatatgcatcattgagccggaaggccattgctcgtattcttccatatcttcggaccggtctgcgttacgacgaggctgtgttttgtggaaacctgcagggggtggtgcctgcttacgtatggacggaccgcgacaggcgccggctggcagaaggcggtgtcgtaggggtgttgtcgaatcttagggacaatccgacgatgagaggaaaaaccaatatgcaggtggtttcggactatcttcgcgaagtatttcctgacgaaacccttcgttgtgaacggctctatcatccgtcgatgattgaaacttatcagaaggcggagccgaatgactacggacttcggctgttgggttcaccccgcacgcagtcggtgaagaatccgatggcaatgcgtgcgctgttccgacttcgggctcttgtcaaccaattgcttcgtgacggcgacattactccggaaacgaagattaacattgagtttgcacggggcttgaacgatgccaataagcggaaagccattatggcttatcaggaagaggcacgtaggcgcagggaaaaatatgcggatgcaatcaaggagttttttcttaaagagacgggaaaggaaatactgccgtcggaagacgatgtcttgaaatatcaactatgggaagagcaagggcatatatgcctgtatacaggcacgaaaatcgggttggcggattttcttgggccgaatccgaaatatgatatcgaacacactgtgcctcgttcgcgtggcggcgacaattctcaggaaaacaagacgctgtgtgacaggcgatttaaccgtgagataaaaggagcaaagctcccggctgaattggcttgccatgccgaagtgatggatcgggtcgaggtggagtggctgaagaagattgatgccttgagcgcacaaatcgcccggaagaaagggggaggaggagacaaggcctcgaaagacaggcgcatcgtggaacgccacaggctgacaatggaacgtgactactggcgggggaaacttcgtcggtttaccatgacggatgtccctgaaggattttcgcttcgtcagggagtggacatcggcatcatcggcaaatatgccaggttgtatttgcaaacggtattcgacaagacgtatgtcgtcaaaggcgcgacgacagcggcattccgcaaaatgtgggggctgcaggatgattattccaaaaaagagcgtgtcaaccatacgcatcattgcatcgatgccattacgattgcctgtatcggaaaacgggagtacgacagatgggcgcaatacgaacgagacagcgaacggtatgagagaggtttgggcgaaaagccttcgtttaaaaagccgtggccgacattcacggaggatgtgaaatcgctggttccgagtctgcttgttttccatcacactcccgacaatgcccggaaagcgacgcgcaaacttgtccgcatcagagggaaggtgaggaagactgccgacggtcgggctatggttgcgcgaggcgacagtgccagattgtcgctccatcagcagacgttttacggcgcgatactgaaagaaggcgaagtgaagtatgtggtgaggaaagcactgtcgttgttgcaaccgtcggatgtcgacaggattgttgatccggaagttcgtgccaaagtgcagacagcggtggaggcaaaaggttttaaggaagcaatggccggagaaatctggatgaacgaacagaagcgtatcccgataaagaaagtgcgcatatttacaccgaatgtggttgcgccgattcgtctgaaaaagcatcgggatgaatcggtattcaaccataagaggcattatcatgtggcaaacgatggaaactattgcatggctgtctacgaaggaacggacaataagggacaacgaaaacgtacgtccagggtcgtgaacaacttggacgccgccggctatttcaagaggaaagcgcggggagaggatggcgacttggtcccgatgtcggacgattccggaaatccgttgctgtggatactccggacaggtacgatggtgctgttctatgagcattcgccggaagaactgttcaattgtgacaaatcagaattgtcgaagcggctgtataagattgtcggtatgagtactatgacagtttccgggcgctatcagtatggcatactgacattgcgccatcatcaggaagcccgccaatcatttttgctgcctcgggcaaagaaggggctttggaaggaaggagaggactatcgtccgcttgtcggagtgaataataaccaattgaattttttggtttcgggatatgatttcgatttgagtctgacaggagaaataaaattcaaacagtaggggcagatgcagaaaagagcgttgtttttcacacagccgtatatgttgagcctgcgcaactgtcaattggtcgtggcgactaaagagatgccttccgaacaaaggacagtgccgattgaagatatcgggtatgtgattttggaacatccgcaaataaaggtgactttgcctcttttgtcagcgttgtcggaggcgaatgtcgctgtagtggtatgtggggagaaccgtctgccttgcggaatgatgctcaatcttgattcgaatgcgactcaaggtgagcggtttcgagcgcaggcggccgtgagcgagcctctgaagaaaaacctttggaaacaggtggtcgaggcaaagattcgcaatcagggacgacttttgaacaagttgggcaagcgcggcgaattgctgaagccatattggcaaaatgtcaaaagtggagatgccgacaatcgggagggcattgcgtcgcgcatctattggcaggagctgtttggcaaagattttgtcaggatgcgtgagggtggtccacccaacagtctgctcaactatggatatacgattttgcgggcggctgcggcccgcgctttgatggggtcggggttgcttcctgcatttggcattttccaccgcaatcgatataatgcctttccattggctgacgatatgatggagccttatcgaccgtttgtcgacgaaatggtttacgaaatgtggcgctccggcgcatccggcctcgacaaggagaggaaaggccggctgatgggtgtgctttttgtggatactcattt

SEQ ID NO: 530 - DNA, 8915 bp, synthetic construct
  misc_feature 1..8915: note = Synthetic
  source 1..8915: mol_type = other DNA
acgaactatccggatgtaaagctgattgtattactgattgacgagcgccccgaggaagttaccgacatgcaacgtagcgtcaaaggcgaagttatatcatctacatttgacgagccggccgcccgtcatattcaggttgccgaaatggtaatcgaaaaggcaaagcgcctggttgaggcgggtcaggatgtcgttatcctgctggattccattacacgtctggggcgtgcatataatactgttgtgccaagcagcggcaaggttttaaccggtggtgttgatgcgtatgcgttgcaacggccaaagcgctttttcggtgcggcccgtaatatagaaggcgggggcagtctgactattatcgcgacggcgttggttgataccggctctaagatggacgaagttatttttgaagagttcaaaggtaccggtaacagcgaaattattctggaccgcaagctgtcggacaagcgcgtatatcccgcgattgacattactaaatccggcacgcgcaaggaagatttgttggtgggcaaggatatgctgtcgaaaatgtatgttttgcgccgcataatcaatcctatggggacgctggaggcgatggagttcctgttggataagttgcgtatgacaaaaacaaacgcggatttctttagcgcgatgaaccagtaaacaaaacgccccaaacggggcgttttttataaagggctgttatatcatgcgtttttatttttttgcgctggcctgtgcgggggcgggcgctttttattttattggacgcggtgtcggtgatgccgaatgccgggcacgggttgccgcacaaaatgcggatgccgccgtcgcggcccagatggttgtaattcaaaaacaaaggagcgctgatgaggctgctgttaataccggtattggcgatattcgtcgtatcttgcgcgaaaaatacacaattgccgaataatgtgtgcgtaccggtgtcatgtgtgccgatatatggtcgggcgggggactggggcgtgattagtgatgaattggcgcgtaatatttaccgacataataaaatgtgtgaggaaatgcaataaggctattgacaaaagaatagttttgtctatagtattagtatgaaacctcaggaacaaaattcttcatcagttgacacacggcaaaagcattcggcgctgaccaaactggtccggcgcaaatggtggcgttttcctgaattggtgtactcgattttatcaaactgtgatgttgcaccttatttcggctgtatgccgccggagttgcgggcgcgcgtaccaaaggagcggctgggggatatcacatataaatttcatgtttatttagagaattttttaaccaacaatgtttgtgatatcttgaattctttcgaagggctgacatactatatggatgaaataggccgtatgtttggttcgtcctgtacgatagaggtgggggccataaactatgcgggtgtgcgcatatgggccggtaagtttggtgttgtctgtcagatgtcttttccggaaataggtgccaaatatgcgttgaaaatatttgttcccataaagaaagaggatgattatggcgcacatggtgcggattatgagattacaacagcatttgccgccgcctgtgccgagccgcgtgataatgcacgcgtatatatgggatcattgctcaatcagccttatattctctcactgtgggagggcgacgtcatagatggcaaataccgtaaaaacgagaacgaaatatttgttaccgatgcatcagaggtagcgcccagaaattatcgcaaagggcgccgtatagattttggtgatacatatcagacgacatatggtgcggccagctatcgggttcgcaaattatatcgtcaaataaaaaacttcgcccacagtcaagattacaattcgctgtgccgtctggcacagttggcggtcggcgccgcgccgaccgccacagatattagccgggcatttgaactggttcggcataattccgaccaaaatattcgggattttattgaccgcgcccatggccgcgcttattgattcgcaacaatcccgacaagttcgcgaacggcggcctgggccgcggcgtcgcctgtgggggcgtattctacgaattcaaaactgtgcgcatctgaaaattcacgggtcaggcggcgtgcggcatacatgctgataccgtctggttccggaaccagcacatctttaaaatattttggatcaattgcatcaaaatcaaaagatactataaacggccggccgtccaagcggcggcgaatttccataattgcatcatccaggtcgccgtcggtctgcagactgtcggcggtgcgcataaatataccattgtcacgaacaaaagcgatttcagacggctcatatgagcgcgaccccaaataaaacagattttccggacgcagggcagggaactttgtctgcagtgacagccagcgcgtgtcgccttcgcccaggttggcgcgcacgtttgttccatgcggtgcaccggatgcctctgcctgagagctttctggtgtatgtatatccaaatgtgcatcaatatatatcaggcacaggtcttcgtcgggcattttatccgccatggcggcaaaatggccaaagttaacgctgtggtcgccgccaatcaaaatatggcgatcggtcggcgttgccgaataaacctttttatgtatttcaaatgcatcgccaaaacggtccgccatgcattgtgccgcatcaaccggcgcggatgatatcattgtccagttcgcgtctggaaacatttcctgtaccgcggcggggccacgggcggggcctccctctactatatttgcggttgcaccgcggctgtattctacaccaataaaactagtcactgtaactctccactatgctttcggcggcatttttgatttttgccaaacctgattcgtatgttgcgcagtcgcgcgatatttctgagcgatatgcatcgcgcatgtttgacgccatgtatgcgcatccgcgcagatgctggacgcaatagtcgtggcctgttgcaaatgcctgttggccgcgtacgcggctttccgtgccggcccagtttatgttcagggcattatccaaattaacccatgaattatcgccggtatatttaccgatagtgtccatccagtattggttcatttcggcatccgtccatgcattattactgcgcaggcttagaatctgttttatcagactgtcgattgcaggctggtattgtgcgtctatttgcgccagcttagaactgcagtaacagcggttatatgcggtcttttcccgctggcagtatcggttcatacattcggtatagtcggccaaacagcgtgttgacggcaggctggttccagtgtttagcgccgcggccgcggtggcatttgccgccgcattgacggtctgggatgcgtagccgcgactcgagcgcatggttgatgtttttgttccggaacgcgcgacaacgcgtcgtgtcgtgtttgtgttctggccggcgacaggtgccgtgcgtacagagtttgtggttcccgcccgcgccgccggtgtggcgctgcgcgcggcactgcgggaaacgacccgccgcggggcggacagttcttcggtttttgttatgacgtttatcgggttggagccctggtttggtgtgacgcccgggttcaggtccgttcgcatctggttgtttaagtaagggtacatgtaattatagttatatgccgcattgggtgatgcggtcgcggcgcgtgccccagtgttgcgcgtggtaatggccgccccagggcccgttgcccccagcaataataaaaatacagaaaatatataccgcataaccattgtatacatattgtagaatattttaagaatacgaaacaagtataaaaatttgcaattctaaaaaagactggtatactttcataacatatatcggggcgtagctcagtctggtagagtgcttgctttgggagcaagatgtcgcatgttcgaatcatgtcgccccgaccacgctttaataaaacgggtgccaaccggcacccgttttattaaagcggtgtgcaaattcaagcgctatgaggatgcgagtttagaatacatccgcattttaatatgcgctgtggcgaaataaatcagcatgtttattatagctattccccgtgacgatgccgtgataatggggatgtaaaaaagcccgacaagcgggcaatagaggatgttgttgccaacagagccccacagagtatttctttattgtagattgctttccagttcagtctttaatttagaaatacattgtgtattgtagttatacgaattaaaatgtcaagaaaaaggcaaaagatatgcggatatttggttttgatttaggggttgctagtattggttgggctgttgttgacatagacaaggaaaacgataatccagaggcgggacgggccgctattggaaaaatacagcaatccggggtgcgcatttttagtaaagctgaaagtacagatggttcttcgttggcggcacctcgtcgtgaaaagcgactggttcggcgtgccttacgcagaaaagcgctgcgaatgaaagaaattcgcgcattgttagaaaatagcggactaggtagccagaatatcgttgttaatgctgatgatattgatgtctgggctttgcgcgcgcaagacgctttttgccgcaagttgtcggcgcgtgaactatcgcgtgtattgattcatatggcgaagcatcgcgggtataagtcaatgcgtaaatccgcagaggaaaacgataaagaaacaggaaaagtactcgtttcaattgctcggaatcgcgaaagtatgggcgaatataaaacaatggctcagatgatttataagagtaattgtgatggggcgagaaaatatcgtaatggtgacggagtatatgataattcaattccgcgcgaagaaatagaacgagaactgaattatatatttgatgcccagcagaaatatggggtttttactgaagatttactagaacaatacaaaaaaattgcatttcgtgtacgcccaatacagtcggttggtaaaatggttggtttgtgtacgttagagccaaattgtctgcgtgcgccaaaagaatccccaacggcggagttatttgtggcgttgactaagataaataatatgaaaattgttatagatggtgaggtgcgttctgtggatgacgcagaacgggcagctatattagaattgctaagcaagacgcaaacggttaaatataagacactacataacaaaatatggaaggggaaagatgttgtttttcgtggtgtcaaagaagaatctcaagatttttattccatgacgggatggcataaactaaaaaaaatcatggatgaggccgatatggctgatacgcgaatgcttgaccggattatgaaggttgttgccacccagaaagatgacagtgccatagaaaaagaattgcgccgcaagaaggtaccagaaaagtatattgtcgaattaaagaaactatgtacgtccaagttcataaatctgtcgttacaggcactgtataaaatagttccagaaatgatgcgtgggttgacgtatgataaggcttgcgatggggcgggctatgattttaaaagtaaagtctctggagaagtaaaggctgacaatggatgtatcgcagagatttcagaatggacacatgtcccggttgtaaatcgtacggtcgcccaatttcgcaaggtttataatgcgctggtgcgtaaatatggtataccagaccaagtaaatttggaagtcggtcgcgaattaaagaataattttgacgaccgtaagaaaatagaacgtaaacaaaacgaaaatcgcgataaaacagaaaaagcccgagcagagtatgaagcattaatcagccgcaaagtcacaactaaagaagttttaaaatacaaactttaccaagaccaaggcggaaagtgtatgtattcgggtgaatcaattgatttagagcatctggataactatgaagttgaccatattttaccgtattcgcggtcattggataattcttatatgaacaaaattcttgttaaatatacagaaaaccagatcaaaggcaacaaaacgccatatgaatattttggcaatactctacgatgggatgatttcgttgtacgcgtatctgcaaccaagaccttgggggcacgtaagatttataatctgctgaataaagattttgaaacaacagaagatgattttcgcaaacgtaatgcaaatgataacgcctatgccgcccgatatgttagacaggtattaaataccgcatttccagacctgcgggttgacgtgcgtgctggggcattgacgcattatttacgtggtcaatgggggttggaaaaatcacgtacagaatcggacaggcatcatgcccaggatgcaattgttattgcctgtgcaacgccgggtatggttcgttacttatcaacgatatccggattgtttgaaaataaacgtaatgagaaaggtaagccgtggtggaataatttgaaacaaaatattcaagagccgtgggctggtttccgcgcggatgtttttcggtctgttgatgacgtttttgtttcgcgtacggtgcgtggcaaggcaactggttcggtgcataaagatacgattaattcaccaaaatctagtaaggggagtttaattttaccgcgtgggcgagctgataaagaaaacatgttccgtatggatgtctttaagaaagacgggaaatatgtggttgtgccaatatttgtagcagacacagttgataaaaagcgtcaagatatattttatccgcaaccggctaaggcagaacattcggttgcaattgatggtacgtatgaatttgttatgactctgcacaaggaggattatattaaaatcgtaacagtggacgataaagtatatgaaggatatattattcagtgtgatatgccgcgcgggaagtttgttttcagaaattctgataattctgcagtattttctgttaaaacagatacgtttgagccaggtgattttattgttatagatggtaatttgtgcaaggttatggattatttggcaggtaaattgcgtgctctatctccgaacggcattgttgaagaagtagaggcggtaaaaaagcaaacgcgtaagggtaaacaaatacaaactattgataaatatgaaaaacgcagtaagcagaaaacaataaacataggtacggttaagaatctgcaaaaatttcagattggcgtgttaggcgacatgtcagaggtaaaatctgggcatcgtgcacctgtttgtgctataaaattgcaatcagaaaaaagaaaaggaaggaaacagccaaaaaggaataaaaatgggttggcgaatccttcaactaacgaaaccatgtaaattatcagtaaagcaaaagcaattattttatgaatcagatgataccaaaataacgattccgatagaggatttatcggccgttgttttggagactggatttgtgcaactaacagggcatgttttggcagagtttgctacaaatgatgtagttctgattacgtgtgatgcgtaccatttaccatcgggaacgtttttcccatttcatgataactcacgttattcagaagtggcacatattcaaatttctgccagtgaaccattaaaaaagcgcgtttggcaatcggtggtacaacaaaagattctaaatcaatctgccgtattgtgcgcattaggaatagataatgtgctaagtgaaatagtcaagcgagtgcaaagcggtgatagtgataatcgcgaagctcacgcggcgcaattatattggcggttactatttggagattttacgcgtcgcgatgatgcgaatattataaataaggctttaaattatggttatgccattgtgcgtggctgtatggcacgcaacattgttgcgtcgggattgttgccttgttttggtattcatcatgataatcaattaaatcagtttaatctggttgatgatatgatggagccattgcgtccatttgtagattattgtgtagcgaagttagatttatccgagtgttcggatttaacgccaaaattaaaaagcaaactaatatcagtattgttgtgtaatgcaaatatgaatggtgaggccatatcattacttaaatgtgtggaaataatgtcggcatcattggccaagacattaagacaaaaggattatcgtttattatctttgcctgtatttgatttttctatgttggatgtgggagattttaagtaatggcgcaatatggggaacgatttatgagaatgatagtattttttgatttaccaacactaacaaaacaagatagaaagcgagcatctaaattccgtaacgctttattaaaggatggatactatatgatgcaattgtctgtttattccagaatttgtaagggtatggcacaggttgaaaaacatgtcggacgcctaaaatgcttgattccgccaagcggaagtgttaggctaatgacagtaacagaaaagcagttcgctgatatggaaatattggttggcgaatcgaaaaaacaagaaaaaataggtgcaaagcagcttgttatgttctagtttttctttaaataattgcgaaataacccgctatattcagcgggttatttcgtttgtattatatcaatgccaattaggaaagcaatctacaacggtagaggttatataatgatgacaagaaatattatatcaatgccaattaggaaagcaatctacaacagtttctacggattattactgttcttctcgattatatcaatgccaattaggaaagcaatctacaactgtcgcgtcgcgaatttcctcaacggtcttattatatcaatgccaattaggaaagcaatctacaactgtcgcgtcgcgaatttcc

SEQ ID NO: 531 - DNA, 7019 bp, synthetic construct
  misc_feature 1..7019: note = Synthetic
  source 1..7019: mol_type = other DNA
gaaacctcaggaacaaaattcttcaccagttaacacacggcaaaagcatacgtctttgacgaagttaatacgtcgtaagtggtggcgttttccccaaggtaaattgaacccaatttacagcgaatgctcggttgcgccttattttggctcgatgccgccggagctgcgtgcatgcctgccaaaggaaaaactgggggaggctacgtataaatttcatgtttctctagagaactttttgcgtgctaaatctgaggaaatacgtcattcgcaagacgtgaatatttactatgttgatgaaataggccagatattcgggactacttgtatcatagaatccggagcaattaactatgccggtgtgcgcttgtgggctgggaaattcggtttggtatgtcaggtatctttcccggaaatcggtgcccggtacgcattaaaaatattttataaaatagaagaggattacggcggccacggcccatactgtgaaactacaaccgcattcgccgccgggcatgcagagccccgagataacacgcctatatatatgtcatcgttctgcgaggagccttatatgttatctatgtgggcgggcagcgtgtatgacggacgtattcgaaaaaatgaaaaccagatttttagtacctgtaagtatgaaattgcgccgcgaaactatcgccgggggcgccggattgattttggcgatacatttttaacaccatacggtgcggccagctatcgggtgcgtaaattatatcggcaactgaaaaatgccgcccagacccatgattacgaaagcctgcgccaactggcgcagggggcgtccgccgctgcgccggccgcccaagatattaaacaggcaattgatttgctgtggcgtagcgccggaataaatgttttggcaataattaatcagtctcaggcgcgcgcctactgattcgcaacgattccaaccagttcgcgaacggccgcctgggccgcggcgtcgccggttggggcgtattctacaaattcaaagctgtgggcgtctgcaaattcacgcgtcagacggcgggcggcatacatgctgatgccggcaggttccggtaccagtacgtctttgaaatattgcggatcaatcgcatcaaaatcaaatgatacaacaaatgggcggccgtctaaacggcggcggatttcagtaatcgcatcatccaaatcaccgtcggtttgcaggctgtcggcagtgcgcataaaaatcccattctcgcgaacaaaggctatctcggacggttcataggaacggctggctagataaaatagattttccggccgcagggcggggaacttgctctgcagtgacagccagcgcgcatcaccttcgcccagtttggcacgaacatttgttccgtggggggctccggatgcctctgactgagaactctctggcgtatgtatgtccaggtgcgcgtcaatgtatatcaggcacaagtcttcgtccggcatttggtccgccagggccgcaaaatgcccaaagttcacactgtggtcgccgccaatcaatatgtgacgcgtgtcaggtgttgcagaataaatctttttatgtatctcgaacgcatcaccaaaacggtcagccatgcattccgccgcatcaaccggcgcggatgatatcattgtccagtttgcaccggggaacatttcctgaaccgctgccgggcccagggccggtccgccttctactatttttgcggtcgcgccgcggctgtattcaactccgataaaattagtcactgtaactctccactatgctttcggcggcgttcttgattttcgccaaaccagattcgtatgttgcgcaatcgcgcgaaatttccgcacggtatgcatcacgcagatttgatgccatatatgcgcatccgcgcaagtgctgcacgcaataatcatggccagttgcaaatgcctgctggccgcggacacgactttccatgccggcccagttaatattcaatgcattatccagattgacccaggaattatcaccggtatatttgccaatcgtatccatccaatattgattcatttccgcatcagaccatgcatttgtactgcgcaggcgcaaaatttcctgaatcaggctgtctatggccggctgatactcggcatctatccgggccagcttcgaactgcagtagcagcgattataggccgttttttcacgcaagcagtagccgttcatgcactctgtataatccgccagacagcgtgtcgagggcaggctggtcccggtgttaagtgcagccgcggttgtcgcatttgttgcggcattagttgtctgggatgcgtcaccacgggccgaacgtatattcgtgcgatttgtcccggcgcgtgcaacaacgcgtcttgtgctattgccggtgttgctgtttccagtagcgcttggcgtggcacgtgccgtgccggatgttgcggcgcgcgcagatgttgttccggttgtggcgctgcgtgcggatgtgcgtgataccacgcgtcgcggtgcagataactgttctgtctttgttatgacatttatggggttcgaaccttgctctggtgtgacacccgggttcaggtcggttcgcatctggttatttagatatgggtacatataattatagttgtatgccgccgcaggtgatgcggttgccgcacgggcaccggtattgcgcgtagtaattgccagcgcatgtcccattgcgctaagcgatactataacaatagaaaaaatccaccgcttaaacattgttttttattttagaaattttaatgagccgaaacaagcataaaaatttgcaatcttgaaaaagactggtatactttcataacgtataacggggcgtagctcagtctggtagagtgcttgctttgggagcaagatgtcgcatgttcgaatcatgtcgccccgaccagtgtttctaaggctctcaaaccttgttctttttttgtcggatttgaaaactcaacaaatcatcaattttatatttacgattcttaataaatatgcgcaacagcgaaaaaattggcttgttcagcacattcgttacaagcaccgataccgtgataatgggaatgtaaaaaagcccgacaagcgggcaataggggatgttacaatcaacagcaaccccacagagtatttctttattgtagattgctttccaattcagtctgtaatttagaaatacattgcgtattgtagttataggaattaaaatgtcaagaaaaaggcaataaacatgcgaatatttggttttgatttaggaattgcgagcatcggatgggcggttgttgatatagagaaagaaaataacaatccggagacagggcgtgctgctgttggtaaaattcaacagtcgggtgtacgtatttttagtgttgcggaaaatcctaaagacggttcttcattggcagcaccgcgtcgcgaaaagcgttcaattcgtcgcgcattgcgcagaaaagcgttgcgtatgaaagaacttcggggcgtattggaaaataatggacttggtaatcagaatattgttgttgatgctggtgatgttgatgtctgggcgttgcgcgcagaagatgttttctgccgtaaattgtcgccacgcgaactgtcgcgtgtgttgattcatatggcaaaacatcgtggctataaatccatgcgtaaatccgcagaagaaaatgataaagaaaccggaaaagtgctggcttccattgcactgaatcgtgaacggatgggcggatataaaacaatggcccagatgatttacaaaaataattgtgatggcgcgaaaaaatatcgcaatggtgatggtgtatatgataattcaatcccacgggaagaaatagaacgtgagcttgatttgatatttgaagctcagcataaatatgggatgtttacagcggatttattcgaacaatataaaaaaattgcgtttcgtgtacgcccaatacagtcggttagtaaaatggttggcggatgtacgttagagccaaattgtttgcgtgcgcccaaagaagccccgacggcagaattatttgtggcattgaccaagataaataacatgaaaattgttatagatggcgaaacacgttccgtaaatgatgaagagtgtgcggcaattttagacttattgcgtaaaacgcaaacggttaagtataagacactgcataataagatatggaagggacaagacgttgtttttcgtggtgtcaaagatgaaacgcaagatttctattctatgacagggtggcataaattaaagaaaatattggatgatcccgatatgtctgatacgcgaatgttggacaggattatgaaggttgttgcaactaagaaagatgacgcagcgatagaaaaagaattgcgacgcaagaaaataccagaaaagtatattgataaattaaaagcgctatctacgtcgaaatttataaatctgtctttgcaggcgttgtataaaattgtgccggaaatgatacgtgggatgacgtatgataaggcttgcacggcggccggctatgatttcaaaaataaaatatctggtgaagtaaagatagacaatgggtgtataagggaaattgcagaatggacgcgcgtaccagttgttaatcgtacggttgcccagtttcgtaaggtgtataatgcgctgattcggaaatatggcgtgcccgaccaggtaaatttagaagttggacgcgagttaaagaataactttgatgatcgtaaaaaaatagaacgtcaacagaatgaaaatcgcgataaaaatgatagtgctcgaacagagtacgaaacgctgacaggacgaaaggcaaccgccaaagatgcattgaaatacaaattgtatcgtgatcaaaatggcaaatgtatgtattctggcgaagcaattgatttagagcatctggataattacgaaattgaccatattttgccttattcacggtcgttggataattcctatatgaacaaagttttggttaaatatactgaaaaccaagccaaaggtaataaaactccatacgaatattttggtaatgccacgcgttgggatgattttgttgggcgtgtgtctgcaaccaagacgttgggggcgcgtaagatttataatctgttaaataaagattttgaggcatcagaagaagattttcgcgaacgcaatgtaagtgacaatgcgtatgcagcacgttatgttcgtcagattttaaatactgcctttccagatttacgggttgatgtgcgcgctggggcattaacgcattatttacgtggtcagtgggggcttgaaaagtcgcgcacagaatcagaccgacatcatgcccaggatgcgattgttatcgcctgtgcaacgccagggatggtgcggtatttatcaacaatatcaggattgtttgagaataagcgtaacgagaaaggaaaaccgtggtgggataatttgaaacagaacattcaagagccatgggaagggtttcgtactgatgttttgcagtctgttgaagatgtattcgtttcgcgcacgatacgtggcaaggcgacgggctctgcacacaaagatactatcaattcgccaaaatctggtaaaggtagtatgattttaccgcgtggacgtgcggataaagataatatgttccgtatggatatctttaagaaagatgggaaatatgtggttgtaccaatatttgttgcggatacagttgataaaaatcgccaagatatattctatccgcagccgcctaaggcagaacagcctgttgcaattgacgacacttatgaattcgttatgactttacacaaggatgattatatcaagattacgacagtagatgataaagtatatgaagggtatataataaagtgtcaattgccggccggtcagttttttattagaaattctgataattctgcggtattttctgtcaaaacagacacttttgaaccggatgatttgattgtcataggtggaaatttgtgtaaagtgatggattgcgaatctggtaaattgcgcgctatgtgtcctaatggtcttattgaagaggttgaggctataaggaaacaaactcgtagcggaatagactctaagaaacaaattaaaacaattggtaagtatgagaagtgtgatgtacaaaaaacgttaagtgtcggtacattcaaaaaattacaaaaatttcaaataagcgtgctgggcgatatatcagaggtaaaatctgaacgtcgcgcgctggtctgtgctataaaatcgcaatcagaaaaaaggaaaggaaggaagcaacctaaaaggaataaaaatggggtggcgcatccttcaactaacaaaaccgtgtaaattatcagtaaaacaaaaacaattattttatgaatcatatgataccagaacaacgattccgatagaagatttatcggttgttgttttggaaacgcgctttgtgcaattaacagggcatgttttatcagaatttgcagcaaatgacgttgtcgtccttatctgtgacgcgtcgcatttgccgtcgggaacttttttcccgtttcatgataattctcgctattcagaaatggcacatattcaaattgcagccagtgaaccattaaaaaagcgcatttggcaatctgtggtacaacaaaagattctgaatcaatcggatgtattgcgggcattggggacagaaaatgcattaggcgagattgcaaaacgtgtacaaagcggtgatggtgataatcgcgaagcttatgctgcacaattatattggcggttgctatttggtgattttacgcgccgtgatgatgcgaatattataaacaaagcactaaattatggttatgccgttgtgcgtggatgtgtggcacgcaatattgttgcgtctggtttgctgccatgtttggggattcatcatgataatcaattaaatcaatttaacttagttgatgacatgatggagcctttgcgtccatttgtggattatactgtagcaaagttggatttgtcagaatgttcggatttaacgccagaattaaaaaacaaactaataccagtatt

SEQ ID NO: 532 - DNA, 24065 bp, synthetic construct
  source 1..24065: mol_type = other DNA
  misc_feature 1..24065: note = Synthetic
cgaatggaaaagcctgaaaacaaccgcatttccctgctttggcacgcgaattcggcaggtttgctctggacaaaaagggatcggttgggtattcggcccgcctcttcaacaatggacatcaaagcagttttcgggttggggggccagccagcgcgtaagaaaaggacatccggcatccgggggaaacggtgcctggacccatggtttttctgattcttcaagcgttgaccggccgataaaggaaacgaagaccgtccgtaggtacggggggtcacgaggtttgggggaagaggttccgctcgcttcaccaaaaaccatcgcagtgcatggatgcacgccgacgggtaagcgcttcacctggaccattggggaatggccagccgcgatgtcgctccccacgccgcatcgcaacagcaacccaccactgcacggtcacggaagcaagcagacgcctcgccgccacgcctggggaggaatgcatggcgatgcttgtcgagtcggatgtgcagcaattatggcgggactatcgggcggaacccaccgtggaacgccgcaatcaattggtcgaacagtacctgcctctcgtgaaatataacgcggaacgcatctgggcgcgattgccggaaggggtggaattggatgacttgatcagcgcgggagtttttggactgctggacgccatcgaagcctttgatctggagcggggagtcaaattcgaaacctactgtgtgccgcgcatccgcggtgcgatgctcgatgaattgcgaacgatggattgggtgcctcgactcgtgcgcagcaaggccagcaagctggaggccgctcgcaagtcgctcgaggccaagctaggccggccgccgcgtcccgaggagttggctgagagcatggggttgaccatcgatgagtttgaaaaacatgagagtgacgccaacgccgtcggcctggtcagtctgaataagaaatggtacgagaccgacagttacaaagacgtgcgcgaaatcgatatcctcgaagataaacgcgccgaagaccccacccgcaagctgcagaaccgcgatttgatgcgtctggtcacgcgcggtctcaatcgcaacgaacgcctcatcatcatcctctattactacgaagaaatgaccatgaaggagatcggcgcgacgctggacctcagcgaaagccgcgttagccaaatgcactccagtatcatcggtcggctgcagcaactgctctcatcccgcaagcccgaattctgcaattagccttggggcaacgggacgaaagggtccttatccatctgacattgcaaaccggccgccagtaccgtgcggccggttttcttttgttcaggccagatgcaagaccggcagccagaacttggcgatgttgaaatagatgatgatgcctgtcacgtccacgaaggtggccacgaaggggctagaggccaatgccggatcgacgcccaaggatttgaacagcaatggcagcaaggaacccacgagcgttccccaaaggcaaatggccgcgacggcttgccctaagaccaaggctaaatcccaccgattgacggcttgaaagcggaccttcacgcccggcttgaagctccagcgcgcatcctcgccttcttgtgtgtattccggtgaacccacggcgtcgtaatgcacgcgcatgggtcgaatggttttgatccccgagtattgaatggctccgggagcaaattccatgacgccctgatggtccttgggaggggaagcccccttgggcaacatgacttgcaaacccaaatggcaaatctcttcgtcctgtaaaacctctccgggagtgagggcggcccggatatagccaatcccccccagcgtgatccccaacagcacccccatgatcaattcatgccgaatcaccttccaccagtggcgatggtcgacgtgccccagcgccatggcgcgcgtaacgagcgtggccgcctgagcgcctgaatttccccccgtggaaatacatagggggataaacatgcttaaaacgacgaccgccttgatcgcatcctcgtagtgggccaaagctgtgaaagtgaacaactccgcgccaaacagacatgccagccacagcgctcgcttgcgccacagcgtcacgaaactgacttccagataattttccgccatggggaccacgccgcccatcttttgagcgtcctcggtggcctcggcgacgacgatgtcgatcacgtcgtcgtgagtcacgatgccgaccagacggtcttcttcatccaccactggcatggccagcaaatcgtagcgggccagggctttggcgacctcttccttgtcatcggtgactttcacccggatgacttccgtctccatgacgtcgcggatcagcttgtgccgaggggagagaatcaggtcgcgcagcgacaccacgccgagcaacttcctcatctcatccaacacataaacgtagtaaatcgtttccttttccggggcttgcaagcgcatgcggtcaatggcgtcattgatcgagatgttgccaggcacccaggcgtagtccgtggtcatgatcgcgccggccgagttgatctcgaacttggtcagcgtggcgatgtcgcggcgatcagcctcatccaccaagcgcagcagcgactcagccacccggggcatgagacggcgcaacagattgacccggtcgtcatgggacattttctcgatcagtttggcgacgcgctcccgccctgtcccctccaccatttccacctgacgctccagcgggaaatactcaaaaatggcggcctgattagcgatggtggtagactcaagaaacttccatatctcctcatccgaaaactccgccagcgtgtccgcgatctgggcggggtgcagcgtttcacaaaaggccttgatgccctcggtgtcttcctcgtccatcaacaggcgaacttctggcgtgaagagtggatcggacatgccccacctcgttcatggtgaatgcggttcagtcaccttccttactgcatcctagttaatcctggttggcttgttcacccctgcttggcggagtcatggcatcgcggatgctgagccatccaggcgatcgccgtcggcgtggtgccgcagcagccgcccatcagcgacgccccggacgcgaaccatgcctccatcgcttgccaccaagattctttatcgagcggctggacgatgctgggcttgacgaacaaaggcaaatcggtgagttggcgatacaagactaactggtcggtatagacgctcaggggaggattcggcccacagttcactcccaaagccaaaagatgtccggcttgcgattggacccaccgagccattgcagccatcgcctggtgattgttcgacaacatattaggaacaaaggaggccataaacgggatctttatccgttccttacaccggttcataaatgttccgacagcatccaagtctgtctgggtttccaatagaagcgcatccaccttttcaaaactaagcgcagccgccatcatccgcgaataggcgggagcatcatccgggtccaacgtgcccaggcatcccaaacggtaggtcgcgggctttgtgctctcgaaaaggagcgtttcggccaggcgaatgcgatcgcggatggcctcttccacttggtctggatcggaaaacggccccaaatgtgccgtaaagctgttcgttgatagacaaacggcaccagccgcttcgtagtcacgatgaatggccctgacaacgtctggatggctgtcattccactcatgcgactgattgtagcgcggatgccagccgcgctgcatcaggagcgtgcccatggcgccatccatgaggagaacccgaccttgctgttgagccagttgaatggcttgagccaaggcaggccgaacgaatggcatgaggatcccccctggcagtaatcggtgacatgataagcgtaaacggccagggaatgtaggaatgaaccacctatcggagggccgatggttgatgattcaggcgccgtatttgctcaatcggcccgcatgagccatggccatgatcatcagatccttggccagaaattgacccaatccgccaaacaaacaggccgactcgctgaaagcctggacgttgtcggtgcggcagttttccgcgagcaacagcgtgggcacgggatgccaactgtggcttttcattttactaggggtgctgtgatcacctgtaaccatgaacacgtccggttccagatcgcggatggccgggatcacttgatcgagagcttcaatcatctgcaccttggccgcgaagttgccgtcctctcctgtgctgtcggtgtacttatagtgcaggaagaagaaatcatactccttccacagggcctgcaaggtttcgatctgttccttgagcgtgctgcctgtctcggcgacggtcatgccgaccaggcgcgccagccctttgtacatcggatagaccgcgatcgccacggctcgcagtccatagacttcttccatggtttcgatgcgcggatagcgcgcgaacccgcgcagcgtcaccatgttcgtgggagcctcgtccttgaggatgcgccctgcttccgaaatgaactggttaaacaactccgctgcgcgctgcgaaggcgcatcccgccccaaggctttgagcggttcgtggcctacgatttggggatcggtgtcgttgatttgatcgcttaggtcttcaccgcgaaggaccacgacgaagcgatgctcccgaacgggttcgacaaacacttccacgcctgggatgcggatcgactgcatcttctggcacatctgcacacatcgttcggtgctgggccgccccgctctgcgatctacaatgcgcccatgatcatcgatggaacaaaagtttccacgtgccgcgacgtcttttggtccgacaggaaaattaatgccgagcgcttcgaggatgccccggccgatgttgtactgcaagggatcatagccaaataggcccaaatgacccgggccgctgccaggcgttatccccaggcggatgggaatacttaagccgcaaacgccatccctggccgccgcatccaaatggggcgtccgtgccgtctctaattccgtggagccaccgggcgtcggcggcaatcctcccaagccatccgcgacaagcaggacgattttactgtcattcttttcgatcaaggggcgaatcaagtcgtgattggtcatggcaagaactttacagatggatgattgcttcactctcacagaaacgttaagttatgagtagatggcgttttgaccccaaagtcaagccgcgatcacaaagtgatgtcattattttatccatcgggtcgaaaagtgcgaccccgaggctcttatgcaactacaagacgaaaccattagcttcaattaccaaaacgccgttgtacagccgcgtgcggatgaggaatggcggctgcaaactgaaatgcagttgcagcaactcattacgcctgtccggctcaaggcgttaatgccgcaattgatgcaggtcaagacgcaggtggccacggagcgcgacctggtggatcccccgccgaatcttcgccccttggacgcgggctttatcgaccatcccgacaaattgttggtcgacctccgccgcaacaaggaaaagagcgagttgggccgcattcaaaccaccgccgctcgactacgggatcaggtggacaaagtcgtttttctgggaatcggcggttcgtatctcggcgcccgcgccttgttcgaagcacttcgaagcacctatcacaacgagctgccctacgaaaatcggctggggattccatgtatttattttgaaggaaacaatgtcgacaacgacagtctgcaggatctactcgaactcttgcaaaatacttgtgtcaatccggatgagcctaaagaacgctgggcaacgatcatcatcagcaaatcaggttcaacgctggagaccggcgccgcattccgcatcatgcgcaaagaggtctccgaactttacggacccaaatccgaattgcttaagaaactcatcatccccgtcaccggcgtgggtgaaaatcccatacgcaatctgttccattcgatgggttatcaggacgatgatattttcaccatccccgatcgcgtcggcggccgcttttccgtcttcacgccagccgggcttctccccgccgccatcatggggctggacatcaaggccttgctgctcggcgccgtgagcatgaccaagcaatttctagaggaacccttcgagcgcaacctggtcctgcaatacgccgcggtcacatttctcatggctgaggaattgaataaacccattcgcggcttggcgctgtggtccaaaaagctcgaggccttgggattgtggcacgaccagttgatcgccgagagcttggggaagcaaggccgcggtccgacgcccgtcagttgcgtcatgacgcgcgacctgcattcccgaggccagcagttccaggaaggccgccgggataagttcatcatcaacgtcggcgtgaaaagcgtgaaatccgcccccttggccgtgggcatgtccgatcacaatgaagacaacctcaacgaatacagccgcaaaaccttgcccgtgattatggaagcggcccatcgcggcaccgtggaagcctattccgagacggttcggcccaccgccgacatcatgatgccgcaaatcagcgagtttaccatggggcagatcatgcaaatgttcatgctcgccaccgtcgtggaagggcgtttgatgggcctcaatccctatggccagcctggcgtcgaagcctataagaggaaaatgaaagccatcctgcgcagccaacaaaacctgaacacgcaaaacgtcgccgtggatcgccctgccagtcaggctcacattgacgcaaccacgagaaccacataacttgtccggcatgaacaatcactcccgcttttttctggtcagtcatggcaacgccggtttgctggtcccatgccgaagtatgatatcgtggcagcgtcatgatgaagtgatggttcgcacctcccgcggacttgaacccggcacgatacgcagcccctggcgactggactccgattccagcttaggcagcttcaaccccggcgacatccttggcgctatgacggatgattttcgcggccgatggacgcaagcttgccttcgagcggagaaggcattgtccgaagcgcagcgctggactgaaaaactccgcttacccttggaagtgatcgacgtggaacccgtgctggaaccgttcgccttgatcctccaccttttgcagacggccaaagccgacccgcgcgatctcgtcagccgcctgtccaaatcctttgccgcgccgattcacattcatgacctaacccagccgatgcctgaattcaaccaagaggatgactgtggttcatgtcattctgaatcgggggggtgctcgactgatgggtgcggcagcggctgcgcgtcggggtgcgcttccggctgtggcacgcagggttcggatgattttgagcgtgattggcaggcctattttgccgcgcttcggacgaaaatggaaaatcgaaagatcagcttgcccatgtgatgtccgtagccgtgtttgaaatcgcgccattcgagcagctggaccattcaatggcaggccatctttggctcatcatgcgacatcggagagagagatgattgtgcatttggtgccgttgggcggcggtcagagcattgagttaacgaaaccgatcaacctggtcggccgcaaggaaggctgcgacattcgcttggggcataaaagcgtctccaagcagcattgcatcctggtgcagtcggaagggatgctgatggtgcgcgatttgggcagcacgaatggcacccgagtgaatggcaaacggattcgtcgggcggccttggtggaaaacgatcagttcaacgtcgcagccatgtcgtttcgggtcaagtttggccaaacccccgcgcccgctccggtacagatgaatgacgtcacccagcaaatcgatgcttcagaagtcgatttactcattcggaaaaccaaaccccacgacagcatggatcaacctggggatgtatctcccgccgtcaaagtcaatgccttgcccgacgaattcacggtcgtccattcagccgatggcccggttgaagctggatgagtcgttaactcgtcgggcgggattaatcttccgcttcataatcgcgctgaaagacttcctggatcaaccccgtctccttgtgctcatgacgatccatcgcttggaaccaatggtgcagtgcagcatgcgtctgtgcgatggtcgcccgattctgctccagggattcgatcatgcccaatagcgcttgatccagatcttgatgctcagccgccaattcgtggatgatccgctctcgattcggctccagacgttgcacgtccgccatgtagccatcctcttcctcgaaatggaaatgctgtcgtaaatccttatggagatgccgcagcttcttcagccattcccctcgatcctcgaccgcacccgcctcggacatctttttaagttcatccaagtccttgttcagccgggcatgggcttccgccagggcggtgattttcggtgaagccatggagcacctcttgagcatgatgggaggataagttgccattcttggattgctggggtcgttactccgtcttcttgaaaagatcaagaaagcggtcttcatattccttgaagacgccatgcttgtccagttcctgtttcaattcaaaggctttggcgcgatccttggccgcctgttcgaacagcgtttcgatgcgctggcgagccgcgggggagatcttttcctcttcgatcggttcctgcaggtaagactcctcttccattcccggcggccgccccatcgattcctccatcttcgacagcaattcagagagttgctggttcatatgctcggcttgctcctttaattccgtgaaatccaagtcgatgctgacgatcgccgcgaagacttccaaaatcgccatcgacgccttgggaaacggaagctggctgaagacgtggggcaattctcccagcaagcaaagtccatgcagcccctgctcctccgccacaccaagcagcacgccgtttaatccgccgatgtggccatcctcgaggatttccaactccaattggcggacttcgttcaaatcctcggcatgggtcgccgccgcgaacacccgcgaccgctgctcgggccgcatctgcgtggccatggcggcaaaggtcacgatccgctccacgttcaattccttggcgtagtcgatcaatttgcggcagaacatgtacttgccaagcgggggttgagcctccccgacaaaaagcacaaggtcgtgcttctcttgcggatccttccaaaggaaaaagcgattgcgcggccgtcggcccgtttgaatgacgccgcttttgacttccacgtgatcgacgtcgaagagttctccggtttcgaactccgcgatcaagttcatgtccaacttggagagcaggtaataacccgcgctgatggcgacgtgccccatgccaggccataccgcgatgagccagggatgatggagattcaaattctcggccatgatgattccttgggcgaagggaaagcgacagcctcaacggccaatcccaggaaaacgccgaccacaaggcccattggccagggatcgactattcctcattgtagacagcaaagcccatgccgggaaaaagaaccgcccccacaaatggcaaatttcaccccacaggtaaatgacatacattccccttaccttttggcgaagttcgtgggtttaggtgaaaaagaaactgcgatgtgtaaggttatcgcagaaaaaaagccgcaggtcgtttgtgcgagctgcggcggtcgccgataggcggtgcctgcgatttactcttgttgcgtaaaaccgcgggccaggatcgattacactggacataagaatatggtacctttcataatcatgtcaagaaaaaacctcgttaggggcgtgcaccatggcgacttctcttggactcgacgtcggctccaattccgtaggctcggcatggattgactttcagacgggccaaatcacggccggtgtgagcgtcttccccgctggcgtggatgagtcggaggataagcgcggtgaaccaaagaacgccaagcgccggatgacgcggcaaacgcgcattacgctagctcgccgtgccgcgcgcaaacgaatgcttcgattgaagcttatcgatgccggcctgttgcccaaaagcgctactgaattcaagaagctgctcgaagaaacggatccctgggagctgagacggaagtgtttagatacggagttaaagccgcatgagtttgggcgcgtgctgttgcatctggcgcaacgacgcggtgcgcttggactgaagattgtggatgagagtgatgaggacggcaaagccggcgccaaggatgatggcaaagtgaaagcggctatcagcgaggtaagagccaaaatgaaggcgcggagcgcgcgtacctttggcgagttcatcagcatggtgcaggccgagcgtgtcacgccgatcacaactgtggatcaccggccagaaaaggctcgcaagggtccacgcgaatggcgtcttccagtccgcaacaaagctggtagttacgagcactgcgcggatcgcaacatgctccgtgacgagttcaagaagctgtgggacaaacaaacggaactcggcggcccacttgccaaactgcttaccgaagacctacggctggtgttggacaacgaagcgggcgacgccgtatggcggcacaaggggctgctcttcggccagcgtcgaaacacttgggacttgggtacgctcggccgctgcgtgctggagccgacggagcgctgtgtaccccacgcggacaggtacgcctcgcgctacctcgtcgccgaaacgctgaacaatctcaagattatagaatggggcaaactccctcgcgctttaacgcccgaagagcgtgacaaaatcaaggattacctgagcggtccgttaggggtggagaaaggacgcaaagtgaaaggcgtccttctgccagataagccaaaaatgaccgtcaacgtaacggacttgcggaaccttatgggctggggcaaagcgaccaagaccacccaattccgcttcaatatcgagtctgacccggatcgcaccatcaacacggactggttcagccgagaaatcatccacggcgcgatcaccctgcaaaaatggaacgcgatgtcgtctcgcgtccaagaaggcaccaatcacgccatcctcaagtatgatccggacgtggaaggcgatagcgaaaagctcaaagccggcgttatgaactggggaggcttggacgaaacccaggcggtggcgctggtggcggcatggaagcgccgaccacgacccgacgccaagcgcctgaacttaagccgccgtgccgtgcggaaccttcttccatacatggaagagggattcgtgctggcggatcgaaactccgaggagccgcttcggtggtggagcatcaaggatcacgcctttgacccctatcgccatcgctggccaactcaaatcgaggcccgtaagctgatcgcgcagaatcctaacttcaaggatgcaacgaccggaaagacgcttgacgagcacgggcgccggcgatacgccacgggggccaaaggcgccaccgcccgcgatcggcactacatgaagaagcatctgctgaagaaaaatggcaatccgctttatggtccggatggacttacgctccacgaaccaccgcccgcgccgctggtcagcaaccctgtcgttcgcaaggccatccatgaggtgcgacggcatctggtcgaacacttgctcgcttcgggacgaaagccggacgaggttcatattgaactctcgcgcgaagccaagatgggcaagaaggacgcggatcgcttgctgctgcgaaaccgcctacgcaatcgcatccgcaacagcatcattgccgatctgaacttggattcattaagttcgacgcagcagcgggcagccgtcgatcgcgtcgtgctatgcgtccagcaggctggcgtatgcccactctgcggcaaagatgggttgaccgcgttaagtgccgcgaagcgcgagggctgtgaaatggctcatatcataccgcgagcgtgcggcggccacaacggactggcaaacatcatcctcgcccatgaaaagtgcaatcgggagatggggcggcggacaccccgtcaatactgggatgtgatcctgccgggcaaattcgaggaagggctgcgttttgtttcggcaatctatcaagacatcgaacggcctaaattctcggaggtcaagagcttaaccggcgattcgctttggaattgctatttcacttcgaaagacgaccgagccaagctagaacggttttccaaggacatcaaggacgaagacattcaaggcatgaccctccgccaggatgcggccaccaagtatgctgcccgtcaagttatgacctatctggccgatgctttttacgagggcgagggacttccagaacgcggtggcagaaggcgaatcttcaccaccgacggcatctggactagccgactgcgcagggaatggggcctgtttttcgatccacatgagtttaaggccaagggcctgaccaatgaggcggaacaagaacgcaaggaaaaagaccgcggcgaccaccgccaccatgccatcgatgccgtcgtgattgcgctctgcactcgacaaatccaaatggaatgggaagcgcgcgaaaagcaggcggataccgaaggtctggacacagcggatgaggagacgatggccgcgtatcgccgcgagcatccgattaaaccgcccgcgccgttcaaggatcgtgaacaaatgcgcgaagccgtcaagaaggcgctttttggcactgggtttgttgagcgacccgtctgtcaccgacccgtgaagcgcaaaatgattggagcattacacgaggagacgctctttggcccggtactggattcgaatggtgaactaacggaatgttatacagccaagaagaacgttttagcactcgatcccaatcacttgcgaatgccgcgccccgaaacggaaaaagaagccattgagcgcctggcgttgcggcggcagcgagagcggaaggtggacgaaaaggctgcccggaagtgggcgcgcaaagtcgtggcctctaagggatacaagccggccatcgtcgatccaccgccaggaaaaagcggcattgtacgtgacattgccctccgcacccgcctccggcaatgcctcgaggaagtaaatctcaatcccgacgacttcaccgacaaacaactcaaaaagacggtcgaatctggtgcactcaaacaagcatcaggcgttcctattcggaccgtcgtgttgttacgaactatgtcggatccagtagtaattccgcgaaaacagacagaatatgagagtgggcgaactgataaatccaacgatccagcttcccagcgcgcttacgtcggtggcaacaaccaccacatcgaaattcgcctcaagcttgataagaaaggaaaagaaacctggtcagggacgatggtaaccgccttcgaggctgcgcagcgcaagctcgccaagctccgcgccatccaccaagccggcattcccgacctgaaagcgttccgcaagctgcccaaggccgaacgagccaagttcacgccgaccttacgggaaatcgaagaggcgcatcccatggtggatcgctccgacaaccaagaagggcagttcgtcatgagcctcagcgagggcgagacacttttcatgaaacacaagcagaccgacaaggttggctatttcgtcgtggccaagttggataagccgcaaagcatcgtcgtcgtgccccattgggacgcacgcgctgccggggaacgcaaggacgccgagggcaataaggtgccgaattccaaacgagatcaattcgctgtggttccaaacgacctgaaggaactcgctccccctggccacccccacgcggtcaaagtccgtgtcagcccgctgggagtcgtcaagatacttcagcgggattaatctcggccctacaaccctttttctcgatccaaaccgaatcagaatgcaatcggaatgaatacaaggatgcgggtgatacttgcaatggaatggagttcgtgttcctctgttcctaggaatgcatccctcgccatgaaggcggcttgatttccctcgatttgggcaagccgtccatgatcaagcgcacagttgaaatctccaacgaaccctttcatctggccgttcaactcgaccaattaaaactgcaccgtctcgatggttcacgcgacgtcgccgccagcattccttgcgaagacattggcctcgtgatcgttgatcatgccagtgtgtcctattcccatgccgccttggctcgactgatcgaatgcggcgctgccatcgtcatttgcgatcgtcggcatctgccttccggactgttgctccccatggccgagcacacggaagtcgtgtggcggctacatgagcaaatacatgcctccaagccgaccctgaagcaaatttggcggcaactggtgcaagctaaaatccgcggccaggcagcaaatgtggatgaccccgtggttcaaaggcgattgctgaccatggtgcggacaatccgatcaggcgacccggaaaatttcgaagcacaagcagccaaatggtattggcctgcctggttgccggattttcaacgcattccggagaatgggggatggcttgaacccgcgccatttcgacgggacacagatggcaaggactccgtgaacagccagctcaattatgggtatgcaattttacgagcggccgtcgcccgggccttggtgtcggcgggattgcacccagcactgggaatcaagcatgctaatcgtgccaacgccttttgcctggcggatgattttatcgaaccgtttcgccccttggtggaccgcgccgtgcgtgatctgttccgatccggccacatggaattggatcgctattcgaaaacgaccttgctcagtctactgaccacaaccgtcaacatcgaaggcaacacagggccgctcatggtggcgtttcatcgattggctgcttcctatgtccgctgtttgcaaggcgaatccaaaacgcttttgattcctgattggacggaaccagccatgttagaggccgttaccggagatggctcatgtacgtaagcgggtatcgatttatgtggttggccgtgatgtttgacttgcctgtggacacgaaaaaagcacggcgcgcttacacgcaatttcggaatggcttgatcaaggatggatttacacgcatgcaatattccgtatacattcgccattgtgcgagtcaggagaatgccgatgtacatattcaaagagtgcagcacatggttccggacgatggcgaggtccggatcattacgttcacggacaagcaattcgagcggatgcgcgttttttggggaaaacggcgcaaaccgcccgaacgcatgccgcttcagctcgaattattctgattcacaagctcgcaacttctgtgatcagaataacttgcgggcgagatagtgtaatcgatcctggcccgcgagcaatccgcaacagcaattgatggctgacgacgacgacgaatagtgtaatcgatcctggcccgcgagcaatccgcaacacttactcgaaagcctaggatactctgaccagtgtaatcgatcctggcccgcgagcaatccgcaaccgcgggacacgtcgccccgcgtatgatcaagtgtaatcgatcctggcccgcgagcaatccgcaacaagagagcgagacgagcggcaatatgattgagtgtaatcgatcctggcccgcgagcaatccgcaaccgtacttatgcgattgtgtgcgcagctcagagtgtaatcgatcctggcccgcgagcaatccgcaacagcaattgatatcgagcgctcaacgtgtgaagtgtaatcgatcctggcccgcgagcaatccgcaacaagcggcggatttctgcttcaacaagacatagtgtaatcgatcctggcccgcgagcaatccgcaacccgaaactatacacagagcgcgggccgctgagtgtaatcgatcctggcccgcgagcaatccgcaacgctctaataatttgtcgttgcttcctctggaaaaaaagggaacaggctagcatttttctcattaataattaaatacttttcattgtgtcaacaactctcaggccaaggatgttaatcaggagagctgttgtgccgtcgtcaacgcagaaaaggctgaacaatgtcccagaggcccaaggcttgtagttcatcctcgatccgctcaggggaggcatcgcgaagggttttgatgacctcttcgacaagcagttgagcgaagagccgccgcgccctgctgacctgcttgcgaaaggaatccgcgcggacgcgccggtggatttgctcggaaagccggtcggccaagcgatgcgaaggctcgttgggatgcttcatgaccaaccgcaaggctcggtagtaaagagcttgatcctgttcgcgttgcgaatgtttcaaggccagccaagcgcgatcgaggaggcagcgccgccattccgcgagccaagttgcatcggcttcctcctcgaccaggctagggaccgttggttcataatcacttgcttccatcgtggctcgaaggcgcttttgcttgcgcagccgtgacagtgcagcattgcgaacggacgttttgagataatcccgaaagcgaccatattgtgggtccgcattggaaaacccattcttcacgacgcagagaatgaagtcgtgacaagcttcttccacttgatcctcatctcgcaagatcgctcctaaataccgctggatcgctggagcataacgcatcacaaagtgcatggggtcatggatgcgcgaccaatgtgtggtgatcagttccagtcgatcgtgaatgggaaaaccacgtgaatccatgagttggttcatgggcatctccgcttttgggaagtctgcctggctgaccaagctaggcaagcataattcacataatatcgtgaattttcatgccataccatgacgattcgtagagattccgttaattccggtgagccggcaagagtgcagcggcctgggcgatcaacttcaccatttcttcttttgctgtggaaagcaaatcagtatttaatcaagtagtacttccaatcgaagtggactcgtggagaaacaccgaatgtcactttggcgcgcgggttgggctttgggtttatgcctgggactttgcatggtctccatggctctgaacatgccgatggatgatctcaagggcgagatcaagtgcgatggttcgagcacagtctatttgatcaccgaagcgatggtggtaaacttccgcaaggaacaccccaaggtgaacatctccgtgggcatctccggaaccggcggcggcttcaagaaattctcagctggcgagacggacatcagcaatgcatcacgagtcatcaagccccccgaaatcgagcaatgcaagaaaaacggcatcgagtatcttgaactccaagtcgcctgggatggcctgaccgtcgtgattcatccggacaatacctgggcggagacgatgtccgtggaacaactcaaaaaaatctggcatccggaatcagcagtcaaaaaatggagcgacgtggaccccagttggcccaatcagccgatcaagctctacggcgcggggccggactccggaacgttcgacttcttcacggaagccatcaatggcaaggaaaagttgtgccgcacggatttccaggcgtcggaagacgacaacgtgatcgtcaaaggcgtcagcggcaataagtacgccttggggttcttcggcatcgcttattttgaggataacaaggacaagctcaagtccgtcaaaatcatcaatcagaagggtgatgatcccatagcacccaccttggagacggtcatgagtcgaacttacaaacctttatccagaccgctcttcatttacgtgaaaaagacctccttgaaacgtcctgagatccaagcgttcctgcgcttttaccttaaccgatcggacttggtgaaaaattccaagtatatccccatgaatgcccgtctgcaaaaccgggtccaagggatgttggaagaagccattcgtgaagcgaatgcccattagtcgccttatgcaagcggcccgatcttggcgatcaagccccgtcgggcccttgcatttcatggacgtttcgtcgatgatggccaacacaggttagaatttctctctcgtagaaacgctctgcgaaatgtcactatgtcccaaccgtccaaatccgctcgttcgccgacccattacctgaggcactggtggaagcgctgtgtggaatcagtgatcgagtggtatctcttcacatgcggcggcttatcgatcggcattaccattctgattgccgtgatcgtgatcaatggaaccattcagttttttagcgatcccgacgtcagcatttggtactttttcaccggttcggaatggagttccgggttcgaaaacgccaaatacgggattttgcccctgattagcggcaccttcatggtggccctgatcgccggcgtgattgccgtgccgatcggtttattgacggcgatctacctcagtgaattcgcctcccccgcaatgaggagttggatcaaacccattctcgaactgctggcgggtattcccaccgtcgtgtatggatactttgccttgacctttgtgacgcccctattagcgtcgttgggaccggtcaattggatcggacaaccgcaaaatcaactctccggcggcatcgtggttggcatcatgattctcccaatcgtggcctcgctgagcgaggatgcgctgcgcgcggtgccgcgctccttgagggaaggatcgatggccttgggcgccaatcaattcgagacgacggtcaaggttgtggtgccagccgcgttatccgggatcattgcctcgtttatcctggccatctcaagggccatcggcgaaaccatggcggtaagtctcgcttgcggcgaccgagctaaacttagtcttgacccgcgggaagggattgcgacgatgaccagtttcatcgtccgtgccgctcagggagacgtgcaacatggttcgacctatttcagcagtctctttgccgtggctggaatgttgttcgtcatcacgcttttaatgaacgtggtggcacagtggattctcaaccgttttcgacagatgtatcaatgagcacttccaagccgcgcggatctgatccaaacctgaggccattgtccttggcctcgactccgcccatgacctggtcggagtggctgcgagcctcgggaaagcgcatggtgcgcggctgcctgttgggctttgcggtttttgcaggcatctatgctttgactcacgtcgggcaagatgccgtgtggcattggcaagacttcattggtcaaggcgtcacgggcggagccattttcggactactgagcatcttgctctactcactgcgcaagtcacgccatcagatggaccgcttgttccgccatttcgctctcggcgcgacctgtttgagcttgattttccttgcctttttcttctttggcttgacgcgcgacaccattcgctggtttcaacttaccccaacggccattcaagaagcttacgacaaggaaaaacaagaaattgacgagctgcttgtcacccgtaagcgagaactggaacgtgagcgcgacctcgaaatcgcctcggccgacagcgaagaggagaaaaaggaaattcgcgaggaatacgatcaggatttaattccgaaacgcatgaaggaagccatccaaatcgcggccacgcgacaggcacaattggaaaaaggacagcggcaagacaccagtccatggggcttgctcaaacactttctcacgcacggccccagcgataacagtcgtccccaagatgcgggaatcttgcctgcgattttgggaagttttttgatcggcatcattaccatcctcgtggcgctgcccttgggagtaggagccgcgatctatttggaagaataccggcacaagggatggttgaaccgtatcatccaggtgaacatcaccaacttggccgccgtgccatcggtcttttatggcatcctcggcgcctatctgtttgttgaactgacgtttaagcaactgcaaggagaaatgtggactccaggtccgctcatttggttttttggggatgatcgagccaaagcgtttatgcattttgtttttggggagcgcatcgctgcgcggaatttgctcggcggcgggttgtcgctaggtcttctcactttgcccatggtgatcgtgtcttcacaagaggcgatccgtgccgtgcccgtttccttgcggcatggcgctttggccttgggggcgacgaaatggcaatccatctggcacatcgtcctgccccaggcccgcggcggtattctgacgggcgtgatcctggctctttcgcgcgccctgggagaagccgcgccgctggtcatgttcggcgcgctcactctggtcacttacaatcccggcttgctgacgccgtttaccgtcatgccgctgcaaatcttcaattgggcggaacgctccgacaagctgttcctgtacaacgccggcgtggcgagcatgattttgatgatgctcctgttgtcgctcaatggcgtggccatctatctgcgacaaaaagcacgcaaatccatggtcggccattaatcgttccgccctctcgggagtggtcatcagccaaagggatgcttcggccgcaccgcggggtcaaaggtcgattctttattgcgagaatgctcaaacactgcgaatggtgctcaccgaactcaattctggaccatggagaggttccttgaatttgagtccaacaaaatattcaccctccacttgagcgggatcgcaacgcacgacctcggcaattcgaagcacgggagagcggctctccggtccgatcaggcgtatctccgtgatgcggcctggcgccacgttttgcgagacgcgcactaaagccccgcgctcggacacattgatcagttcaagggcgatattaggcgtcgtccctgacatgccgcatcgaagctcggccttgccccgagctttgagtcgaatgcttgtccttttttttcgtccagcaaggtcgtgctcaggtggtgtggcttcacgcatgtgacaccgtgacttgttctataccattgaacgtcaaatcctaagaggaaattgaagcttaacgcatcatgaccaatagcgcctacgtcaataagtcattcatcttgtttatcgcttctcaggtcattctaaaccatgaagcatgttgcacgctagtgcgatccccccaaggctccggttgtcgcagcgtcgatccctcggtaaaatgctattgtcatcctctcgcatcaaaaaggatactcaatctcgcatgtggccgaagctggaagaatctctcaaacgttaccaagaactcgaacgacaaatgatggatcccgccgtgatcggcgatgggccacaatatacaaaagtcgtcaaggaacatggcgccttaaccaaaagcgtgaagccctatgtggattacaagcacattgcgcaagaaatcgagggcatgaaagccgcgatcggcaaggaagccgatgaagaaatgcggcaatacatcgaggaagaactgaaggtccttgaaagcaagcaacaggccctgaagtccaaaattgaagacatgctgctggtcgatcccgctgaggattatgacagcatcatcatggaaatccgcgccggcaccgggggcgacgaggcggctttgttcgccggagatttgtttaacatgtatcgcaaatacgccgaggatcaggggtggaaaatcgagattctcgacttcaatggaaccgacctgggcggcttcaaggaaattagcttcagcgtgacgggcgatggcgtctatcggcatttccgctacgaaagcggcgggcatcgcgtccagcgcgtgcccaagaccgaaacccaagggcgcatccacacctcggccgccaccgtggctgtcttgccagaaccctcggaaattcaaatcgagatcaaacccgaggacgttcgcatcgacaccttcacgtcgggcggcccgggcggccagcatcagaataaaacgcaatcgggagtcaggctcactcacctccccacaggcaccgtggccgagagccgatccgaacgcagccagcataaaaacaaggacatatgttggcgcatgctgcgaacgcgcatttatgaagccttagccgagaaagagcgcgccaaacgtgccgccgaacggcgcaatctgattggttcgggcgatcgctccgaacgcatccgcacctataactttccgcaaaaccgcgtgacggatcaccgcatcaacctcaacctttaccaattagacagcatcctggcgggcaacatgaacgaattgcttcgcgccctgatggaatatgataaaaaacagcaattggaacaactcaccagcgggcaaggcaaggtagcctgagcatgaccgaacagccatggacgcttggccgactcctcgactggacgactgaattcttcacggccaagggcgttgaatatcctcggttggatgctgaagtcctcctcgcgcatgccgttggctgcccgcgcatcaaactctatacggcattcgatgaaatcgcctcggagcaagttcggcagcaatttcgcaccctcgtgcagcaaagagttgacggctgccctgtcgcctacctcgtggggtataaggaattcttttccatccccatgatcgttaatcaatccgtcctgatccctcgccccgacacggaaattctcgtcatggaagcacttcggctgctcaagacgatgaatcagcccaccctgctggacgtggggacaggttccggcgcgattgccgtggccttggccaagaaccatgccgccgtcagcataaccgctttggattgcagtgtggatgccttggcagtagcaaaactcaacgctcaaaaacagggcctcgaggatagaattcagtttatcgagagcgaactatttcaaaaaattccacccggtgcggtgtttgatctcatcgtcagtaatccgccatatattcccaccgaggctttgccacatttgccagtaggggtgagggatttcgaaccacgcgtggccctcgatggcggaccaggcggtttccaggtcattgccagcttgatcaatcaagcccgggaccacttgaagaaaggcggttacttgctggttgaaatcggtgtcgcccaggaacaacctgttcgcgagatgatcggtcaatatcccgaactttcatccccctgtgtcattcaagattattcaggacatccccgcgttctgaagacccaaaaaaattgattcgccctatcggaattccctttcgggttggacttgccttaacgtgaacccatggatattagtaatagtctactttaaaaggggatgtagctcagctgggagagcgcttgaatggcattcaagaggtcaggggttcaaatcccctcatctccacttttatttcagtccgccttcgctgcggcgttttatttcacatagagatttcacccaactcattttgagcaacctgcctgcgccagcgttatgttgcattctcgaccgttgtcttcaatatccatcaatctaagccgatttcattcggcttaaagaagttagccaatctggttgaattcactatttccttaaggttttatcggcgtcactcagtaaattaacttcatcatccttctcttcgttgtgcctcgcgtcatctttcatccgctgttctcccaaccatcatcaacaaggtgttcgtaatgaattgatgacaggaattgctgttgattgagttggccgctgcgccatgcggtcatccaatggatttggccaggtccatttttcttcttcagggagcctcattcatgtggacccatgatgccttgcataacatgattattgacaagctccgcgattataagctcatcatcgtggcc

SEQ ID NO: 533 - DNA, 24047 bp, synthetic construct
  source 1..24047: mol_type = other DNA
  misc_feature 1..24047: note = Synthetic
gggcacgaccggcggtactacctggtgggaaaccgacacgacaaggaacccgacatcaacttctgggtgtcggacgatctcatcgtgtggaggaagtacggcgactacgtgcccgacctgaaacggattcccggctatccaacggccctaccaaggatcggggcgccgaaggtgttctacgatgaggccggtgcgcagtacttgcttacgtggcatacgacgcacgacatgggcaagacggatctgccggagccgtattgggccggccaacggacgatctacgccacctcgaaggacctcaagaccttttccgagccgccgcgcaagctgttccactgggacatggccaccatcgacgtgatcgttcgccgggagggtgagcggtactacgcgatcatcaaggacgagcggtatcccacgctcgactggaccacgggcaagaccatccggatctgcagtgcaccgaagctgttgggtccgtattccgagccagggccgccggtcagcccgaacttccgcgaggcccccacgttgatcccatcgccggatggcaaggcgtggtatctctattacgagcagtatcccggcgttgcgtacgggctgtcggtcgcggccggcctgaaatggccatggttccaggcggccggcgggacctcgcgaccgacgtggaacaagtacagcgtcccggcccgggcgcgccacggctcgatgatccctgtcagtcgcaaggagtacgatgcggtggtcacagcgtttgggcggtagacggccgaccggaggcagcggggccgctcaccgtccctccttgcgtcgaatgtttctcgcaaataggatgacgctggctcaggagggcgacctgggcggctcgcaggtcgccacatccctgcactttgaactacattgacaatgcgaggagaaccatgacacgatcgatcatcttcgcaacactgccgcttcttgcatgcattcaggctgtgcgcgccgaggaatcgcccgccagcgagcccgccaaggtcagccgtccctttgcgtactccgggtacagcaagcctcagtacatgacgtcgcgacggttcggcgagtacgtcccgatgtccgacggtgtcaagctggccatcgacgtctatctgccgaccggaggcaccggggccaagcgattccccgtggtcatgcaatacacaccgtatcatcgcagcacgatcgacccgaaaaccggccaggttgtcagcctcatgcccccggtcttcaaccagttcctcctgtcgtacggctacgcggtggtgtacgccgacatgcgcggcacgggggcttccacgggctggatgcatgacttcatgcctcggatcgcacaggacggcggcgaactggtcgactggatcgccaagcagccatggtgcgacggcaacatcggcatgttcggcgggtcatacatgggctggtcgcaaattgccatcgccggccaaggacgtcccgccctcaagtgcatcatccccgccgtggttcccctcgacggctataccggcgaggtccgtcccggaggcatctactgccagggcatggtgaaccgatggtcgaccggcatgtactaccgcgtcaggaactactacgacccgacgaagaaccgcatgcccgtcacacccgtggtcgacgaggacggcgatggaaagcttacggacgagattccactcgatgccaacggcgatggcagcttcctcgacgagggcttcccgccgaagtactcggacgatgcggctcgcaagcacatctactacctggccacccaggaccatctgaaagactatgactatgcggccgtggcggcaaaggggatcttcatcgacgacaagagccccttggggtatacagcctacgaccttggcccgagcgcgcacgtgcccggcgtgatggcgtccaaagtggcgatctgcaatgtcggcgggtggttcgacggcttcacccggggcacattcgagctgtactgcacgatgcgcgcgacgaatccgtcaaggatcatcatcgcaccggcctatcatgacctccttggcggaccattctggaagtacctcggcgaggacccgatcatcctgaagaacacattcctgctggagctggttcgcatcttcgaccgctggctgaaggggattcccaacggcgtcgacaaagagccgccggtctgcctctacgtgatgcacggtggtgggtggcggctggagaatgagtggccactgaagcggcaggtggtgacgaagtacttcctcggtgccgaacaccaactgagccgtgaggccacgggcgacggggccgactcctacaaggccgacttcacgcacgattcgacgtatggccagaagtccggcaaccgcatgctctcgctggcgggcggcacgccggacgcgctgccgatccgcaccgaaaaggatcgccagtgcctctgctacacctccgcggctctcgaggagaatacggaggtaaccggacacccgatcgtccgcctgaacgtctcatcgacggcggcctacggcgatttcttcgtgtacctggaggacgtggatgccgagggacaggtaatcctggtcaccgagggccaactccgggccgaattcgccgggctgcacgacaacaacaagataatcctccgcggcgccagaaagatcgaggtgttgccgaagctgccctggcacggctacgaaaaggccgactacgccgactccgtcctggccggcggcaagaccgtcgagctggtcttcgacctgcagccgaccgcgtgggtgttccgcaagggccaccggattcggatcgccgtcgcgtgcgcggactacccgacattcgagctgcacccgaaactgagtccgtctaacaagcccgacgccccggacaatgtcgtcccgacgatcaccgtccatcgcgccgagagccaccgttcgtgtattgagctgccggtgattccgaggggatgagaggacagaagcggaggacggcattgtgcgctcgtgcgcagggacgccggtcacagccccaaggtatgccgaagcgccttgtccaccgccgtcatgtcacccagccgaccgatggatctcggtttcaaggatggtcgcaaggttgtccgtcatgatcacggaatcggccaggagtcccatctgctgcccctgtgagcttgaactcgcgacgctcaccctgcttggatggccggctcgcacgaggttgctggtgatcatggcgacgatggtctgcggcatgcccgtattgagatcgtccgccaacacgatcagcgcggggcgccgctttgcggtccgcaggttggagtcggggaatagtacgagcacgacgtcaccgcgtttatagcgcatcgtaggcgtccatgtccggccggttccagtcctcttcgaacgccttgagccgcgaccgcaagtcggcggcctgctctggggcaattccaactgacgcaagatcgatgtgcccttccttcaacagaaacgtcacgatgacccgcgattcggcgtccgccggcgccggttccagcaactcgaccttcccgtttcggtagataccctcaatcgacctgaccatgaggcacctcgtgctcttcttgaccattgctaattatatcccaagcggcgtcggacggacatccacgcagcggccatgcagcgcggcggtgtcccagaaagaccgagatgtcgccgaagctgccctggcacggctacgaaaaggccgactacgccgactccatcctggccggcggcaagaccgccgagctggtcttcgacctgcagccgaccgcgtgggtgttccgcaagggccaccggattcggatcgccgtcgcgtgcgcggactacccgacgttcgagctgcacccgaaactgagtccgacgaacaagcccgacgccccggacaacgtcgtcccgacgatcacggtccatcgcgccgaaagccaccgttcgtgtattgagctgccggtgattccgaggggatgagaggacagaagcgggggacggtcatttgttccccgtgtcacgcctttcccctgtcggcgcccgttatgggcaacaaccgctgggcgttgtcgccgaggatcatcgcctcggcggcggggggcagcttgagccggcggaacttgaggagctgataatcgatgtacgtgaggtcgccgaagcctccgtcggagccgaacagcatgcgctccggccccacagtggtcaccgcgcggcggagctcgagcagcgtcggcccgtcggtctgcatgtagacgttcgggtgtcggcggatcgcctgcagtgcgttttccgcgaggtccttcaggcctccgtggcccaggatcatcgtgcaatcggggtagcgctcggcgagccaggcgatctggaggctgccggtatacggtggcgtgccgtcgtgaaagacgacgaccaaccgcagcccgttggccacctcgaagatcggctcgaggcacgcgtcggtgcacgacaccggctggagccagccgtgcagtttcaggccgcccaggtgcagttgggtgattgcccgctccagttcccgagcggccggtgccccttcgcggggattcaccgtggccattcccacgaaccgatcgccgaacgtgcgctgcagttcggccatttggtcgttgtagcgtcggtgggcctccgactgattctcgagcagggcatcgacggaggagtaccagacccgatcgacaccgagcccggcgtagtgatcgacgacggcctgtggagcgagcggcctcatcgaccatgagctgcccaactggatatgagcatgggtatcgacgacgaggctcatcggcgacctccccaaagcgccggcgcgttgtcgtgcatgatccgccggcgctgatcgggtcccatcggcaccatcgccagcttctcgatctccagcgacaggtcgctctccggcgagtcggagccgaacaggatccgccggggcccgaccttctgaatcgcgttggcgatgttcatcgggtcgatcagcgaggtctccagatagatgttgtccgcctggagcgcggcggggacggcgtcggtccagaggtcggcaaagcccatgtggcccatgacgaagggaacctcgggaaacgatcgcgccagctcggcgagctgaaacggctcggccgtgacaactgtgcccgtatgggcgtagaccggtgcgcgacgagcccgacacagctccagcagcggatgcaccagcggatcgctcagtacgaatccctgcaggtgactgttcagcttcagcccgaccaggccggcgtccaagcagcgggccagttcggcgacggcgtcctcttggaaccagggattaacggccgccagtccccagaagcggtcgggccggcgggcgacggcggccagcacctggtcgttgccctcctggttccgcacggcgacgaactggtcgaccgtacacacaacagcccgctcgacgtcgtgaaggtccatttgacgcagaagctcttcggcggtgatccgcttgcggaggcctgatccgacgtggcagtggctgtcgatgatcgacatgctgctctccataccaccgggcgcggtggcgtgtcaaacgtccatgccctggcataggctgtacatttgggctataaacgcgcgcatctcttccgtcagcgtcttgtccggacgacgaaggcgttgcgggaaccgccgggagactctcgatgaaccttcactgggtcgattgggtggtcgtcctggtgcttttggtcctgctgagcctcggcggctaccttacgcggacgttggtcaagggcgtggccgactatctggtcgccggccgcagcgtgcggcgttacctgggcttgggctccgacgcgatgcagggcttcggcgtctccacgatgctggccttctggcagatgaactatgagggcggcttcgcctcgcaatggtggtacctgctgacgcccctggcggggatcctcatcatcctgaccggctggggtgtttgccgactgcgcgaaacccgcgcgatgacgctgggtcagcttgtcgagattcgctacagccggcgcacccggatcgtcttcggcgcgctgatgtacacggcgggcgtgctcaacatggcgatctttccggcgctggcggccaatttcttcatctattactgcggttttccgcgggagttcgccttcgccggcctgtcgattccgacggccttgccgctgatggtgtttctggtggggacctcggcggccgtctgcatggtgggcgggcaggtcacgttgatcgtgaccgacttcatccaaagcgtcttcttcaatctcatgctcgtggggattgcactggttgtcttccgcacgttcacgtgggagcaggcggccgcggcgtttcaggctgccgacaatgccgaggcgctactgaatccgttcagccccaaggccgccggtgatttcaatcggatgttcttcttcatgttcgtcgcgtacttcatgttctacagcgtgatctcgtgggctcccaactccatgctgatcagctcctcgcgcgacgcccacgaggcgaggatgatgcgtgcgatgctctacatgcggaacctggcgatgatgggactgggactgttcctcctgccgctggcggcgttcgtgctgatgcaccaccccgacttctcgaaccaggccgcccacgtgaggggggtgctcgacggcatcgcgaacaacgaggtccggagcgagatggtcacgccgctggcggccatccagatcctgccgcggggcatggccggggcgttcgcgggcatggtgatcttctgcttcatcacgtcgtttgacacctacctgctggcctgggggggcgtgctcattcaggatgtggtgattccgctgcgcggacggccgttggaacctcgccagcacattcggtggattcgcctatccgtccttgccgtggcggttttcaacatcgttttcagcatgaccttccgccaagtggacaagatcttcatgtggatgggcattagcgcgtcggtctacctcggtgcggccggcgtcatcctcttgggcgggatctactggcgtcgggggacgacgaccgccgcgtggacggccatggtcgtcggcgccgctttgtcgatcggcggcttcttctatcggatatgccgcggcgaggacccgaacgcctgggacgggttggaaatatccttcgggatcgcgctgatatgcatcgtgctctatgggggcgtttcgctgcttcagcggcgacgaacgttcgatctggaggccatgctccaccgccgaccggccccggatggcggtttgccggacgaggagggtttgagccgtagcgcgtcgagcggccgtccgcccgaagggtggctgcggcggttcgttccgtgggctcccgaggttccacgttccgaccgcgtgctcatccccatcatcgtcgccgtcgtcggtctgatcttcgcggggattgccgcgacatgggtctacaatgcccattggcgaccgatcacactgtcgggatgggtctggttctgggagcggtatctttacgtgatgtttgcggcgggcgtggccttcctggtctggattaccatcggcgggatccgcgacctgcgccggatgttccacagcctcaagaccgaagtggttgaccaggccgacgacggaaccgtgggggcccggcgggattgagccggctgagtgtgacgagggacgccggcgaacccggcggtcgttcccttcgctcatgacgtcatacttcgaggaggaatccgaagcgtgatgcaaggtgtgacatgcggctgaattccacggggtttccaacggtaatgacggctggtcgggcaaacaaccccaacccaacgcctcggggaccgacaggccgtaggcatcgctcgggcgggctcgcgacctgatccgcgcaatgaagtctgccggcgaattggagaactcatgatgacgagccgtttgccgatctccatctgttttgttcttgtcttggccaccggcgctcggtccgacgacacggcggcggaggcaccggcggtccccgccgaaaaggccgaacgcatgaaatggtgggtagacgcccgcttcggcctgttcattcattggtcgccatcaagcctgaggggtgcggagatcggcctctcgcgcggcagggaggttccggtcgaggtctacgaccggctctacaaggagttcaacccggtccggttcgatgcgaagcaggtggtgtcgcttgcgagggaaacgggcacgaagtacatcgtgttcaccgccaagcaccacgacggcttctctatgtacgcgaccacgttgagcgactacaacatcatgaacacgccgttcaggcgtgatgtggccaaagagctggccgacgagtgccggcggcagaacatccgtttctgcacctactattcaaacgccgactggtatcatcccgactacctacctcggggggccggcgacaagcggccgccgcaagacgccgacttcgacagatacttcgccttcatgaaagggcaggtccgggagattgtccggaactatcatccggccgtcatgtggtttgatggtgattgggaggatcattggacggtcgagcgcgggcgtgagatttatgccctgctccgacggctcgatccggcgatcatcaccaacaaccgcttgggcaaagggcggaccgccgagtacgggatgacgccgcccgaaaagaccgtcggcgattttcatacgcccgagcaggtggtcgggccggcgttgggtgatcgcaacgtctactgggaatgttgcgcgaccctgtgcgagcgatgggcgtggaagcccggcgaccggatgaagagtcttaaggagtgcatcgacttggtggtgaccaacgcgggccgcgacgggaacacgctcctgaacgtcgggccgatgcccaccggcgaaatcgagccccgtcaggccgaacggctgcgggaaatcggccgatggatgaagcaatatggggagagcattcacggcacccgcggcggtccgttcgagccggccccgtggggcgtcagtacctgcaaggacaaccgaatcttcgtccacgtgctccgccggcccaacgatgcaacgctgaacgtgccggccgtgcggaagaagatcgctgccggccggctccttggcggaggcgaggtcgacgtcaaacaaaccggcgccggtgtgaccatcgccgtttcaccttccggttggcaacaactggacaccgtcattgaactgagactcgattgaatgggtgtgacaagcgacagaccgtcgtcctgttgacatcgtctcggatcgtctcggtcggccgcgcgttccggccggaccttcgacccgcgacgggccgcaccgaggaagaaggacgaagacgccctccgttcgggtggacaaccgctacgtcaaagaccgcatgtcgccggctcagcagcggcggttcttcgaccggatgcccgccgttaccgtgttcagatggaaaggacctcaagcgctgtcggcgtcgaggtaagaacctggagaagttcaagattctcgccgggacgccgatcgccgggcagccgttggaccccattcaccgcgaccgcaagcttcccggggactccgtgggtcggcgggattgccacagtgaatccgactgggtgctcatctacaagctcgaccgcgggcgcatcatgttcgatcgcatgggcgcacattcggacctcttcaagagatgagccgcccacgcgagttccaggcaatgtgccgagtcgcccagaatggtcatgcggcgggttaggcgagccatgccagcggatcgtccgccgcaggtttttcagcaagagcagatgtcaagagctaacccttgagccttagcacgacgccccaggcctgaaacaaaagaagccgcaggccgttggtgcgggctgcggcggtcgcctttcggcggtgcctgcgatttctcttgttgcgtgaaaccgcgggctgtggtcggttacaatagccactatctgattccaaagcggtccaattgtcaaggggcgtttcatggggaattccttcaacgttctcggtctggatatcggctcgaattcggtggggtctgcgtgggtggaccttgggcgaggtaccatcgacgttgggatcagcatctttccggccggcgtcgatgaatcggaggacaaacggggcgacccgaaaaatgccaagcggcggatggcccggcggacgcggattacgctggcaaggcgagcggaacgaaagcggcagctccgtagacgactggtggatgtggggctactgccgcacgaagccgacgccttcaagcggctgctggaagagaccgacccgtggcaactgcgccggcgggggctgatcgaacccctcgcgccgcacgagtttgggcgggtactactgcatctggcgcagcgccggggcgcgctggggttgcgactgccggagccgggcgatcaggaagacggcgcggaccagaatgcgagggaggacggcaaggtcaaggccgcaatcggtgaggtccgcgcgaggatgctccagcgcaaggctcgcacgttcggcgagtttatcgcgatggtccgagacgagcgagttaccacgattacaagcgaggatcgccgacccgaggcgaagcgcaggggcccccgcgagtaccgcggcgcggtccgcaacaaggcggggagttacgagcactgcgccgaccgcgcgatgatccgcgaggagttcgcgaagctctgggacgcgcagaagtcgttcggcgggcagaccgcccagctgctgacggacgacctgcgtctggcgctggacgatgagtcgggcgattcgacttggcggcacaaggggctcctcttcggtcagcggaggcagtcatgggacctgggcacgctggggcgctgcgtccttgagccgaccgatcgctgcgtcccgcacgccgacatgtacgcgtcgcgatacctggtcgtcgagacggtcaacaacctcaaggtcattgagccggggaaggaggcgcgcgccctgacgccggcggagcggcagaagataagagactacctgagcggaccgttgggcatggagaagccccgcaagaagaaaggcgacacggggcagtcagcggagcgcccgaagacgacggtcagcgtgacggacctgcggaacctcatgggctggggccgcgcgagcaacaccgccgcgcctcgtttcaacatcgagaacgatgaagaccggtcgatcaacaccgactggttcagccgggagatcatccacggggccgtgacgccggaaacgtgggcgcagctcccggagcgcgtccgcgaggggctgaaccgtgccatcctcaagtacgaccccgatgacgagagtcacgccgacaagctcaaggcgggcgtaatggagtgggcgggactcagcgaggcacaggccgatgccctcgtcgcctcctggaggaggcgcccgaacccgcacgccaagcggctgagcatgagccgccgcgccgtgcgaaacctcctggtcttcatggatcgaccggagccgtggccagaccccgaacatccggggcaatcacggtggctgacccagatcgaggcccgcaagctcattgccggcgacggggacttcaaggatgtgacgacgggcaagcctctggacgacgaaacgcggcgccggtacgcgacgggggcgaaaggggcgaccgcccgcgaccgctactacatggggaaacacctgctgtgcaaagacggcaaacccatctacggcccggatgacctgcccctggcggagccgccgccggcgccgctcatcagcaacccggtggtgcggaaggcgatccatgaggtgcggcggcatctcgtcgagtacatgacccgattcgggcggaagccggatgaggtctacatcgagctggcccgcgaggccaggatgggggccaaggacgcggaccgcctgcttttcagaaatcgcctgcggaaccgcatccgcaacgacatcatcaatgccttcgatctgcacgccaaaactccgacgcagcagcgcgcggccgtggatcgtgtggtgctgtgcgtccaacagcggggcgtgtgccccctgtgcgggaatcagacggtcgcgacggcgatcacgccgaggatggccgccaacggcgaagggtgcgaggtggctcacatcatcccgaagggcagcggcgggcacaatgggctcgggaacatcgtgctggctcacaccaagtgcaaccgcgacatggggcgccggacgccgcgcgaattctggtccgcgggcaagggcttcgacgccgggatggggtgggtcgagaagacatacggggacatcaagcgtcccaagccgtcggaggtcaagggcgcgacaggaaagtcgctgtgggcttgttacttcacgaaactcgacgacacggcaaagatcgagcagttcaagaaggacatcaaggacatccaggagatgacgccgcggcaggaggccgcgacgaagtacgccgcgaggcaggtgatggcgtacctggccgacgcgctttacggcggtggcggtttgcccgagcgcggcggcgagcggaggatcttcgcgaccgacgggatgtggaccagccggctccgccgcgagtggggcctgttcttcgatcggcacgcgttcaaatccaaggggctgagcgagagcgaggagcacgagcggagggaaaaagaccggggcgatcaccggcaccatgccatcgatgcggtggtgatcgcgctgtcgtcgcagggcatccggaatgactgggagaaccgcgagaaacaggccgacagggccggcgtcaatacggcggacgaggcggcgatggagaactaccgtcgcaacaacccgctgccgcctccgggtccgttcaagacccgcgaggtcttccgcgaagcggtccgcaaggcggttttcggcgacggagaactggagcgcccgatctgtcaccgcgctgtcaagcgcaagctcaccggggcccttcatgaagagacgctcttcgggccggtactggatatggccggcaagccgaccgggaactacaccgccaggaagagcgtgctccagcttgagcccaaccatttgcggatgcctcgccccgagacggagagagagggcgtggagcgcctggcgattcgacgccagcgagaaaggggcgtcgacgagaggaccgcgcgcaagtgggcccgggcggtcgtgtcgtcgcccggctaccgggcggcgatcattgatccgccgccgggcaagtcgggcatcgtgcgcgacgttgcccttcgcgctcgcctccgcaagtgcttgagcgacgaaggacttaacccggacgacttcaagcccggcgaaatcaagaaactcgtggaagacggcaaggtcaggcacgcttccggcgtgccgatcaagtccgtggtgctgctgcggtccatgagcgatcccgtgatcatcgaccgcaagcgcccggagcacgtaaccgggagcatggtggcggacgagaaccctcgctctcggcgtgcttatgtcggcgggaacaaccatcacattgagatccgcgctgcgcagaacggcaagggcgtcgaggtctggtccggggaggttgtcacggcgttcgaagccgcccggcgcaacctgggcaggcttcgcgccctgcgtgaggcggggattccgaggcccgacgcgttccgcaagcttcctcgggccgagcgggcaaggttgacgcccgtcttgcgggccatcgagaaggaccaccccatcgtggaccgatccgacaacgatgagaagggcgggcgattcgtgatgagcctctgcgaaggggaaatgctccagatgagacacaagcatacgcgtgagccggggtacttcgtggtggccaagctcgacaagccgcagagcatcgtgctggtgccgcactgggacgcccgcgccgcgggcgagcgcaagaacgccgagggcgtgaaggttcctcactcgaagcgcgacgacttcagcgtcacgcccaacgacctgaaggcgctcgccccgccgggcaggactcacgcggtcaaggtccgcgtgagtccgctgggtagggtgacggtcctcgatcgggattagccggaaaggaggcttcgccgacatgatccgccggtccgtcgagatcagccgcgaggcgtgtcacctcgccgttcgcgacgagcaactggtcgtgctgcggcggggcggatgcccggaggacgccgcccgaaggatcccgctggaggacctgggcgttctgatggtggaccagcgggagacgacgtacacgcacagcgccctcgtcaagctggccgatcatggcgccgccttggtggtctgcggggcggaccacctcccctgcggcatgttgctgtccctctccacgaacacggaattgctcgggcggctcgacacgcagctctccgcctcgaaacctcggcgcaagcggttgtggtcggcgatcgtcggcgcgaagatacgcgcgcaggcggagaacctcacccacgcgccggaggtgcggtcgcggctgctcgccatgtcgcgccgggtcaggagcggcgacccggataacctggaagcccaggccgcgcgagcctactggcccgcgctgttcgacggtgtgtcgggagtgccgtcgccgttccgacgacgcccgggcgaacgggacgcgccgccgcccaacaacctgctggactacggatacgccgcgttacgggcggcgctggggcgcgccattgtctcggccgggctcctgcccgcgctgggggtgcagcaccgacagcggtcgaacccgttctgcctggcggacgacctgatagaaccccttcgcccgatggtggacgcccgcgtgcggatgctggcatcaaaggggcaagtggcgctcgaccagccgacgaaggcggagatcctgcgtctcctgaccgacaccgtccgcgtgggcgacgcggccggaccgttgggagtcgccgttgtgcggtacgtggcctcgttcgtccgggtcttggcaggcgaagccgaggtgttggaagtacctgttgcggaagccgcatcggcggattctccgtcggaacccgtagaagaggatgatgatggatgcacctgagcggataccgtttcatgtgggtagtggccatgttcgacttgccggtggactcgccttcagcccggcggcagtacgcccgctttcgcaaggcgctgctgaaggacggcttcgcaatgatgcagttcagcgtttatatacgccactgcgccagccgcgagaacgcggaagttcacatgtcacgggtggaatatgccgtccccccggatggacaggtccgggtcctgacgatcacggacaaacagtacgaacggatgcgcgtcttttggggaaaaagacgcaaaccgcccgagtctccgccagtgcagctagagcttttctaggcatggtcccgcgcaacccccttatcccctgggggttgcgcggggagtattgtaaccgaccgcagcccgccagcaacccgcaaccggccccaatgatggctcccgggacctggggggcggaagatcccgacacctgaaatcctgaagtgtcctctcgcctcgtttggtatggcgccccgagtgcaccgtgcgcgaggcgacttccatctctgctacctctcgtgggttctccaatgggggacaacgcgggcaacggaggtacgtggcggattatgccggggcccgaagggcccgaacacgactagccggggacggagcgaagcgcagtccccggggatgcgagatgtgcgaacgggcaagccccgaaggggcgcaacagatgcatcgggcccagcgtccccggttgccgttctattgcgcctcgccggggcccaagcgagcccgccgattccgtcacgcaccccaggcaatgtgccgaaagcgttgcgctggacgccgtcgacgtggggtgacatactgtcttcgggattgcccgggggtgatcgcgaatccgtgatgggggcgagacgataggagagtttggatgcacggctcacgtcccgatggtctgactcgtcgacagtttatcgtgggaagctcgctggcagggccgctggcggcgggctcggtgcttcgcatgttggagtgcgccgggtcccaaaccgcacgtgcggtcgggacccggaaggcgcccgcgacggtgaaggcggtctttctgtacccgttgccggaggattgcgaccagggaaaggccgaggcctcctggcaagaacaccactggcatccctatccggggaaccaattccgtcacgcggaacaacaagagaaattcacgcgaaagatcggcgagatggccgaacgaatcggggtgcggatcgactttgcccccaaggcgctgaaggccgacgcggaggtgaacgcgtacatcgcccagaccaagccggcgcggcccgacgcgacgctgatcctgtgtctgtcgtctgcttcaacggaaaaggcccacaggatcgtccaacaggtcggcgcgccggggatcgtctacctcccgacgggcgcgaaccatcacctgccgcccgagcggttgaccaaggccaaggggctgcacttcattcactcgatcgagaactgggacgagatcgagcgttcgctgcgagcggtgcacgccaagaagatgctttcgcaatctcgcgtggtgcgcgtgggcgactacggcggcgtcacgacgtccgtatacggccggctcggaacggaaatcgtggccattcccgcgggtgagtacaacagcctgttcgactcgatccgcccggacgaggagatgaagcgcgcggcgatgcggttcaagagcgaggccgtcgaggtcaccgatgtcgcggaccacgccttcgtcgatgccttccgggcctacaaggccgtcaacacgctgctcgagcggtacgacgcggacggcatcacgatcctctgtctgatgcttcagcatcgcaagccgtgcgtgggcttttcgatcaacaacggcaacctgaccgcgacgtgcggttgcgaggacgacctgaccgcgacgatgaccctgttgctgaaccggtacctcttcggtcggccgggcttccagcacaactcggagtacgacgagattcggaaccactacttcgccacgcactgcacgtgcgcgacgaagctgaacgggccgagcgcgccggcccagccgtacaagatccgtccgttctttcaccacctgcccaagacgccggcgctggacgtgcagtggacgccgaaaacgcccgtgattctgtcgaagatgctctcggagcgggagattcgctattggtgcgggcgggtgatcgaatcgccgacgtgcccgccgaccggcggctgcgcgacgcgagtcctcgtcgacttcgacgtgaacgacatcaccggcgtctatgtgggcagccacccgattctgtcggtgggcagtcgagacgacgcacggtgttacgggatcttctcaaagctgttcgaggcaacaggcgcggccaagacgtgaccgcgtgtggggtgtcggacgtccgggcggcgcgttggatgaagcccgacaagacggccggcgcaatgcctcggccggacgttgggaccacccgtatcgttcggtcgatcctgttgtgggtcgcctcggcgctacaccttgtccggttccgggtgcgtccatggggcgcgatagggacggcgaaggaggcggttggcctcgtcgtcgccgggcaccagcccctgggccggatcgtaggcgagcgtgcggcccagcttcatggacaggttggccaggatgcacgagatgcttgaaatgcagccctgttcgatgtcggccacggggcggcctctcgatgcgacatttcgcaggaagtccttcatgtgccaacgaatcgccgaggcgcagtgttgttcgaggcccttctcgtccttatcctcggggtacttgtcgtgttcgatgagcgccgtgcccgaggcggccggctctctcttgccctgagggtagtagtcgtacttgaagacgctggccttcaacgtgcccttgtcgccgtggaacgtggcgctccagggatactcgggatcgacgccgtcgccccaggtgcggtgattccacaccacgtgtaggtcgccatagtcgaagatggccgtctgggtgtccggggtgttcgccttgccggccttgtcgaccaggatgccgccggtcgaggtgatccgcttgggccagccgaggtccatcatccagcggaccatgtcgaacatgtggatgcacatgtcgcccatgatgccgttgccgtactccatgaacgcccgccagccccggggatgcgtccactcgcagtaaggccgcatgggggccggaccggtccacatctcgtagtcgagggtgtcgggcgggggtacgtccggcgggttgccgcgggcgcgcatgtgccagtaacagcatatgtcgacgtgccggatggcccccagtttgccctcgcggatgatgcgatcgcgagcctcgatgaggtggggggtgctgcgccgctgcgtgccgacctgaacgacgcggccatacttgcgggcggcggcgagcatcgcccggctttcgaccacgtccacgctggtcggcttctgcacgtagacgtcggcgccggccctgaccgcctcgatcatggggagggcgtgccagtgggcgggcgtggcgatgaggacgatgtccagatccttttccgcgagcatctttcgatagtcggtgtaggttcggggcctcttcttcgagacgtggcgggtggcggcgatgtcggcggcctcggccaacatccgcttatccacgtcgcagatggagacgatctcgacgggggccacctggaccaatcgccagagatcgcacttgccgtaccagccgctgccgatcagaccgacacgcttcttcatgtcggccgtttcatcggcgaaacccgcgcggccggacaataccagcccgcccgcaccccaagcacccattcggagaaacgttcggcgattcatgtgtgtattcatacctgtgcctatacacgcaaaaccgaccgtcttcaacccggaaaggtgatccgccaaggggcaagtttcccctgcccgcgcaaacgcggagcctgtcgtccgccctccgcttgcacacgccacctgcgctgctacgtgacaatgagcgaagcgaggatcgtcacgagcagatccatggtcatggacaccccgcgctgggcgtagatctgaagcatcaccggctcggtgatcttctgaaggcgctcggaggtcagatgagtgagcaacaggcccaccaggtcgacggacgccgttcggtacggcagcggatcctgatagctgtcgacgtggccatcatagtatccgatgttgccgcgcttggagggcagggtctccgtcaagttgagggcattgctctcattgccgtgataggagccgaacatgtcgaacaagagggtgtggatcgactcggcggccatccacgccccttccaggttgttgcgaccgccgtcgttgtagttcccggcgcagtggaagtcccactgttcatcgatcatcatgtacatgccggcgggcgcgtagatcgcactgagtcgcatgatggggcccggccaaagcggaccgccggcgtcggggtccttgagcagatccacgttgctcaggagtttgcggcccaggagccctctggagtagttgaagacgttctgcgacttcctcgaaccgttgtgcccgcccgtcccgacgggggtgcgttcaaactcggggcatcggtagaggttggcgaatcgtgtataggggaacagcgttccgttctgcaccttggcctcgctcggcgtgccaatgtattggtcccaatccgactcgagccagagcttcttcacccccggataccgtgggtcggggtcatgtccggccaggtttggaatgagccattgttcgaaatcggcgaagtacagttcgctgttctgacccgccgggccgaggttggggtaagcggcctccacgccgcacgccctgaacccgacgccgatgaacggcggcacgtcatcgaaatcgcctgcgtagatcagcatggccttggttagttggctgagccgggaggcgcagagggtcgagcgggcctgcgcacgggccttgctcagcgacggcaagaggatcgagatcagcaaggcgatgatcgcgacgacaaccaacagttcgatgagggtaaatccgagtcccctgccgcatctgccgcgcgtcggcctcatgatcgcctccttctgcgagggtccaccgtggcctgtggccatcatatgtcatatgtgtaccgattggtacagacttaatggtacaagcccgttcgtcccccgtcaagggggcacgggaataatcctccttgccgcaaatggcacggggggtggacggtcctccgcccaggaggctgtcgaatcgcggccggcccgcgagccccccatgcagcgttccaggtttcgccacgctataatccgcaccatccggtcgcttcggtggaagtcgaggagcagacgcatgcccatatccaggtttgacaggatcgacccccaaatgcgcgcggcgatcctggaggcagcccgagccgaattcgccgaacacgggtatgagagttcgtcctacaaccgcatcatcgccaattcccgattgagcaagagttccttctactactactttcacggcaaggaggatctctacgtgacggtcgtcaaggacgcgatcgcgcggtttgcggaggcagtcggagagcctagagaagtgaacaccgccaaagcgttctggagcgagtgcgcgcgattgtttcgtctcttctatcatgccggactgaagaacccgctgctgatcggcgtcctcaggagcgtcctggaactgaaacccggccagatggccgaagacctgatggcgcagatcaccctgaaggacgtgcggtggtatgaagggattattcagcgaggtcaggccctcggtgccgtgcggaccgatgcgccgctcgacctgatcatcgaggtctatctggcggtgctggtggcaagggtgaagtggagcatgaagcagttgctcgacggtgcgccgctcgacatcgaggaagatgtggccgacatcatcgacctcctccgacggatggcggcgccggcaaaggcgaaaaagaagaaggcacgaaaatagctcgtatcagatctgcggctccacggttgtaacccgtccaacggcaagaccatccggctcattctcggacgaggtcggtaggccttttccgcgttgccaacagcgaatgcggacggtagagtgtcggcacatacacgctggcgacccgtcaaggagtgacgcacatgagcaggaggcgccgccgaaaagcccaccgttcaagacgttcctttcgacacggttttcagaccgactcgcggctccgatcattggcctctactgattccacactggaactggtgacctacgagcttaccgacgaaccgatggaggaccgtcgttatcctcttattgggccggaggacgaagccctcgttgaagagatctgttcccaactgtgggagaaaggcgcatcgttcgtcgggcctctggaagcactcgtacagaagtaccccgatatcccgaggctatacaactacttgtccgtggcctacaacgccgccggcctgaccgacaaggttaaggacctgatccgtgagacctatcgccgattccccgactacctgtttggtatcaccaactacgggcatctgtgcatttcggaaggacatcccgaggaggtcgcccggattctcaacggcaagttctcgatccacagcctctatcccgatcgaaggcgctatcacatgagcgaaatggcggccttcgtgacactaatggcccactacttcatagccattcatgattatgacatggcgctgactcacctggacatgcttcgcagactgccttcacattccccatcggtgcgccagatgcaggctgcttggaccggcggcgaaaagggtctattgatcgacgggctgcttgcgttgcgccggttgggaatcggcggtaagagggcaagacggtaggtgttccgcatccgcgtcgcccatggggcctgcttgaagtcccgtatcaccgtcgcagccctatcaccgattgacaacggcacgcctcgcaaccaagatcaggagtacagggtccccgggcttcaaggaaacaccatcagcaagtgggcgggcggatccccgccgatcaccgcgccgatcgttgaggagactcgaacatgtatcccagacagacgaccccatccgatggcggaccatccgaaacgatccgaaccgacgaccaccgcgccgagttgcctacgaggcgtcatttctgccgaacggccgcggcggggctcgccgcgacgtgctctcgcgcgataccgacgccggccgccgagggtaaatcacgacaggtcatcgtcggggcccatccgtgggtgtacgccgcgacgcagccgaaatacgacatcacgccgatcctggattcgatcttcgccgacatggcctacgccggcgtcgacgggatcgagctgatgcacaccgcgttgtatccggacgatgcggtccaacgcatcgccggcctctcgaagaagcatcgcttgccggtgatcggcacgtcgttcggcggtgacatgtggaatcgtgccaagcacaccgaggtgcttgccgatgccgaccgggtcatcggacgtttggcgaagctgggcggaaagacgctcggcgtgtccgtgggggctccgccgcagaaaaagaccgacgagcagctcgacgcgcaagccgagctgttgcgaaagatcatgacgctgtgcactgcctacggggtcgtgctgaacctgcacaaccacacctacgaggtgaaagataacctgcatgacctcaagggcacgctcgcccgcatccccgatgtgaaacttggccccgacctgaactggctggttcgcggcggcgtcgacccggtcgccttcatccgcgaataccgcgacaagatcgtcttcctccacttgcgggaccagaaggccgacggcacgtggtccgaggcgatgggcgaaggcgcgatggactacgtcggcattgccgccgcgctcaaggagatcccgttctcaggccacgcggtaatcgaactggcccacgaatcgggcttcaagccgacccgtcccttgcgagagagcctgaagatgagtcgcgagttcgtacggcgagtcctgggctactgagtggggtaggacgcggcagacctgccgaacgaaacctcatggtttttcgatcacggtggaacacgcatcacacggggtaccatgcgggaggcaacacatgagcgacaagatccgctgcggcgtactggggcttggccacggacatgccctggccaaagtggagctgctgcacaactccaaggagtgggaactgatcggcgtgtgcgaaccggatgagaaggtccgttcggagtacgcttcggcgccgcagatgaagggcgtcaagtggctgacccgcgaggagctcctcggcgatgcaaccgtcaagatggtcgccgtggagagcaagacgcctcgcctgctccaactcggccgtgcggccgtcgaggcgggcaagcacatccatctcgacaagccggccggggccaatctgaatgagttccgcgcgctgctcgacgcggcagccagtcggaatctgatcgtgcagatgggctacatgtttcgctacaacgccggcttcgatttcatccgccgcgcggtcggccagggctggctcggtcggatcttctcgatccaggccagcatgtgcacgcaggtgacgccgcaggcccgcagggacctctcctttcactccggcggcatcatgctggaactcggcgggcacatgatcgacatgatcgtcctgctgatcggcgggccgaagacggtgacatccttcctgcggcacgacggggacgaagacgaccggctgaacgacaacacgctggcggtcctcgaatacgaccgcgcgatggtggtcgtcgaaacggccgcgatggagaccgaggccttctcgcgtcggcgattcaagatcagcgggacgcgcggaacgatcatcctgacgccgctggagccgcccgcactccagct

SEQ ID NO: 534 - DNA, 18769 bp, synthetic construct
  source 1..18769: mol_type = other DNA
  misc_feature 1..18769: note = Synthetic
tcgacatgcccagatcctccttgatccacgcccgagactatcgctcgggatggatcgggttctggggggaaggtcagtacgtcttgctcaagctgagccggtcgtcggccatcgtgtcgggcgtgctcgtcccgatcgtgatgctcgcgatgtcgctgtagctcgccgattcgatgactcggcccagattatctagccgcacgaacatgtgcggcgactccggacgcaccgtcagcacacgccgatcccgggcgtcgtacccgtacacagttacgcgctggtcgccgctcgtgccccaatcaccatccgcgtcggccgtgacgctcacgacacgccccgcagcgtcgtacgccgtcacgctcgtcttgaccatgttgtccgagccagaggttgaaccgccggggaatgactgatcgttcgtgcccatccagctctcgatcggccgacccacgccgtcgtacaccgtccggctgatcgttccgtgcggcgccagcacacgcgctcgacgtccaccgttgtcatacccgaaacgcgtcgagtcgtagtgtgtgccctcggtcccgggcagtgctgcaggaatactgatgtacgagcgcgattcgagcagccgagatcccggcgagtcgtacacgccggtctgcacaccgatcagtgtcgccccagagagcaccaacgcctcgatcgggtccgactcggcatggtcgatccagccgctgatcgacgcggtcgtagatccgcttggcagcacgatcgttgccgagaactccacggtgcccgcgtgactccgaaccgaatagctcaccgggccttcaaacgtgccgctcccggagacgaatcgcggcaccgacaacacaacctcccgcccgtcggccaacgcggtccgatgcgtccgcgtcactcgcccgtttggcatggcaatgtgcgtcacgcgaccgagcgcgtcgtgctcgtaggtcgtaacgagatgcaccgcgtccccggtgctggcgaagttgtggctgcccacgttcgggatcgtcacgccgtcaaagacctcgcccgtgccgctccgtgtcgtgtccgcgtcacgcacccgcgccgtgacaaggcccgttgccgggtcgtacgccgtgtacgagatccgtccctcggcgtctcgcgcaaaggtcgtccgcccctgcagcgtcatcgcacgcttggtgatcgcgtcgccgctcagcccgttctgccccgaagtcacgccgggcattgtctgcaccgtcacctccgggatcgatgttcccgtgtgcacgatgtgctcaacggtcgtcaccgggatcccgacctcccgcgcatctcccggggccgtttcgtcgcgataggtataactcgacccgccgagcacccgtgtcaacgcgaccgggcccaggtccagttcccgggtttcatagtccggggacgcgagaaggtacggatctccgtccgtgccgacgcgccaagtcaccaggtccgccataccccggatcaccccggtggtcgcccgctcgatgctcgtcacaagaccgtcggtcgcgctcagcgtaaacttcgaatcctcgtgatcgtacgcgatcacattcgacggcgcgtggatctcgacgacaaacccctcgttgtcgcgctcaatgtacgtggccagcaccaccgaagggctcgcgtccggtgccgcatccgtgaccacgcgcgacagcggctgcccgagttgatccatgtactgcgtgatgtacccgttgccaggcgtctgcacgatcacgcgccggtaccagtccggagcgtacaggcccgtgcccggatgctcgctgttggtggccgcggaataggtgaacacatactcgccgtcgagcccacctgagcagccgcactccccgttatgccagaccgtgatcacacgccgatcgctgtcatactgccagaagctgctcgcgtagggcttcagatcaccttcgctcgccgtcaggaaactcttgttcgtcaggttctgatccagccagtcgtaccgtcggcatccctcggcgtccacccacagccgcaactggtgcaggtgccccgggtttgtcgtggggtggtaagtccccgtgtagtaccggaaatgctgctcacgccgcaccgaaaccccagcggtattcgtcggcagcaccaccgacaccatctggagatcgcccacgctcccgtggtccgtcaccgtcgacgtgtagtacgcgtactcgactcgcgccacctcgtgccagatcatgccatcgaacgattcggccgtcaccgacgccagccgacggatcgaaccgaccgcgccgcccgtcaacgcgtacgtgtaccgacgccccgcgtcgtcgaacgccagcttgatctgacccttcggcgtcggtgacgacccgtcgtagtacccctccgcgatcgcatctccagcatccgtcgggtgcccaacgtacgacaacgcgccagcaacatcctcgatcttccacagctgcccgttggcgatgtcgtccgtggtgttcccgccgaaaaaggtgtatgttgtccctgcgggatcggtgagcacccacaagtcggggtcggcaccgccggtgcccggaacatgctcgaacacacccgtcacgccgttcacgccgcggaacacgttcgtcggctctggcgtctcgtcctccgtgaaaacccgcacgtactccgcgaaactgctgccagacatcagcagatagaccgagtcgctctcgacaccgatctcgggctgcgacaactgcgaccagttcacaccctgcggcccatcgctgtcgagggggctcccgcccgagccgacctgacgccccgcgaacacgcgcccaatccgccagccggggcccgcgctcggcagcagcaggtcggtctgcgcgatatccgatggcccgtccccaagtgcaccccagcttcgaccgcgtgccggttccacgactccccgaacgggttgcccgcaacgcgacgcaccgggccggcgtctccgcgtaaatcgccgtccagccgagccacccggtgcatgaaccgaggccccattttctgcacaacactcggaccggcctcgggatgcgccatcagcatcggcccggcgatctcgccgatcgaggagagcgattgcgacgaggacgccgaccaggcagcccacgccggcaccgccagccccgcgatcaccgccgccgcaagcaccgctctccgacgcgttccgctgcggccaccaagggcgatcctgttcataagtcgtgctccagcaagacgatgcatgaaaacttcatgacgtgaacacaaatccaatgacagcaaactatcgcagtcggccaaaaaaaccaagacagaaaatccaaattcgatataaaaaatgattgacacacaccgtcaccttgcgagatgatgaacgccacgcgctggaatgacagaataaagactgttcaaccagcgtgacattcggaggcactcgtcatgtcaatcgcacgcatagaccgcgccggtgcggcagtccccgtactgctcgccctctccacactgctcgtgctgatcgccgcaatggtgcaccatgatcccgagccgcccgccccaaccaagctacagatggcccgagcgttcgccgccctcgacgtgagccctgaaaacctggccgcgactgggctggacggcaacgcgaccaccgcactcctcagcggcatcgaagccgcgatgcagagcaacggagcccacgtctgcaccctgctcgatgacaccagaaccaagcacgccttggtcgttcaactccgcgaagccgctcgaacgcaagccgccacgctacaggaattggcgaccgcacagagcgacctggaaagcgcccaagcctcgctcgatgccgaactcagccggatccggactgccgcccaaggctcattacctgcccagatctggggtcactggtcgcaactcgccagtccggcacgagccgatctccccctgcacctgcgcacgctcgatctcgatgatcaagcccgcgcacagctccgcgacgctctcaccgcccggcgcatcgcaagccagcaagactacgaactcgatcaagcaaccgccgcactgctccacaacgccaaatcacacactgacgccacaaccatgctcaacaacctcgaaagcaatcttcacgatgttcgagccgcgtggaacagcttcttttcgccatgaggatcgcgggactgtttggatccactccggtaccagtgtgtgcaggcacgcgcgtacgccaaccgggcaagcaaagacgtgatgcatgcacattttgagcatccgtatggcgcgaaggtgtcagcacaaggcggtgcactgggacatctacactggctgccgccgacaccagttcttaatataatgcaaaaattgttatcaattctttcctgctgtatcagcaggctgatgtctcatccgcacggcacctggtgtgggccgcgtcgccctggccgagcgaagccgagccctgccatcgaagtgggcggcaggttctgaatggcgcaagaaaaagccgcaggccgcgggtcagcgggctacggcggtcgtctttcgacggtgcctgcgatttctcttgttgcgtgaaaccgcgggccggggtcgattacacttggaacatattagcccatctgctacccttgtcaagtcctagtgaaatccggattgggggtagcggtgtctcgatatgttctcggcctcgatatcggttccaactccgtcggatcggtctggatcgaccgagagacggggcggactcagaccggcgtctcggtgttcccggccggcgtggacgagagcgacgacaaacgcggcgagcccaagaactccaagcgtcgcatggctcgccgcacgcggatcacgctcgcacgccgggccgaacggaagcgggagctgcgtctcaagctgatcgaggtcgggctgttgcccaaagacgagcccggcttccaagccctgctggaaagcaccgatccgtgggggctgcgccagaagggccttgatgaacgcctggcgccgcacgagttcgggcgtgtgctgctccacctcgcccagcggcggggggctctggggctcaagctcgccgacccggaggagggtgatgaagccaatgacagcgcggccgaggatggcaaggtcagagccgcgatccgcgaggtgcgcgccaaaatgctcgaacgtaaagcgcggacgttcggcgagttcatcgcgaaggttcgcgaggagcgcgtgacgccgatcacgactgaggatcgacgaaagccctccgatcgcaaggggcctcgtgaatggcgctcccccgtgcggaacaaagccgcgagctacgaacactgcgccgatcggacgatgatccgtgacgaattcacaaggctctgggaaacccagaaaaagcttggcggcgagacgagcaagctgctgaccgacaaactccgcacggctctggacaacgagaagggagacagcgtctggcgtcatcaaggcctgctctttgggcagcggcggacgacgtgggacctgggcacgctcgggcggtgcgtgctggagccgaccgagcggtgcgtgccgcacgcggacatgcacgcctcgcgttaccgcgtcgtcgagacagtcaacaacctgaagatcatcgagggcacgagcccgccgcgcccgctgacgcgggaagaacgcgaccggatcaaggggtacctctccgggccgttgggtgaagagaccaagggcaagcgcaaggggcagccgaagcgcacggtgagcgtgaccgacctgcgcgccaagatggccgagtggtacggcaaggaccagtggccgggcggtaccaggcgcaagctctccccctgtcgcttcaacatcgaagccgatgaagaccgcgcgatcaacaccgattggttccggcgtgagatcgtgcacggctccatcggcgaagacgcatggaatgccatgccgacgagcttgcaggaggggttcaaccgcgccatcctgcgtcatgatcaagacgaagaagacgcgaaaaagctcaagagtggtgtgatggcttggggcgggctcgacgaggcccgagccgacaagctcgtcgccgcgtggaagggacgtccgcgcctcgacgccaagcggctgaacatgagtcgtcgcgcggtgcggaacctgctcaccgtgatggatcgcgatgagccgtggaaggatgaccgtagtcccgcgggattcttgtggatgacgcagatccaggcccgcagacacatcgcagggttaggggatttttgcgacgtcacgacgggcaagccgctcgacgacgtgacccgtcgtcgctacgccacgggcgcgaagggcgcaaccgcacgcgatcgatactacatgggcaagcacgtgctcatgaaggatggcaagcaaatcatcgacaaggcgactggtgagccgctggccgagcctccgccggctccgctgattagcaaccccgtggtgcgcaaggcgatccacgaagtccgtcgtcacttggtcgaatacatgatcgagaacggccgcaaaccggacgaggtctacatcgagctcgcgcgtgaagccaagatgggcaagaaagacgccgatcgcgtgctctttcgcaaccgccttcgcaaccgcatccgaatcgacattatcgatgagcagaagctcgagtcgatgacgacgacccagcagcgcaacgccgtcgatcgggtcgtcctctgtatgcaacaggacggcatctgcccgctctgcggcaatcaatccgagcaggcgaagatcacgccgcggatggccgcgaacggtgcaggctgcgagatcgcccacatcgtgcctcgctcccgcggcggacacaacgggctgtccaacatcgtgctcagtcacacaaagtgcaaccgcgagatgggcccacgcacgccccgcgagttctggaacgacggcgagggcttcgaccagggcatgcgatgggtcgagggcatctacggcgacgtccaccgcccgaagccttccgaattgaagaacacctccggcccgtcgctgtgggtctgctacttcaataaacgcgacgaccaatcgaaaatcgatcggttcaaaaaagacatcagtgatgaagacgtgcagggcttcaccaaccgacaagaggcggcgaccaagtacgccgcacgccaggtcatggcgtatctgtccgacgccctcttcgacggcaaagggctgccggaacgagcgacgggctccggtgccgaccaacgccgaatcttcgcaggcgacgggatctggacagcccagctccggcgtgaatggggcttgttttttgatgcgcatcacgcgaaagctcacagcacggatgaagaagagaagcagcaacgccgcgaaaagaatcgcgcggaccaccatcaccatgcaatcgatgcgatcctcacggcgttatgcacgggcgagatccgtgacaaatggaaaaagcgcgaggaagccggagatcaagcatattgggttcacacgcgagcgaacggctccacaggctccgtcgaagactggatggagacctatcggcgaaccaaccggatccgcccgccagccccgttcgatttccctgggatcagcgacgacggggaggcgttggagcgttttcgcgatagggttcagtttgccgtgttcggcgaggacggtttgaagccgatctgtcacagggcagtgaaacggaagctcaccggcgcgttgcacagagcaacccactacggaccggtcattgaaaaggacggaagtcgaagctcctcactagtcactacccgtatcgatgtctcccaactcaaaccggcacacctccgagtccccgagggatgggatcgcctggccgacgcgctccatgatccatcctgctcccccggcgaacagcgatcgatccgtcgccagttggcgtcgctggaagatccagcgcccggccctgggctcgtgcgtgaccgggccacccgcgaccatatccgccggtacttccgctccaagggcctccccctcggaactcccgatgcggcaaactaccgcgtccgcgacggctttaaagacaatcaactccgcaagattctcgccggcggcgtcatcccgctgccctccggtgtacccatgcgctcggttgtcatcacacgagccttctcagacccgatcgtgatcccgcgtactgagtacgattacggatccttgagccgccaagcctcgcccgaacctcgaacactccggatctatgaaggacagaacaatcaccatgtcgagatccgagaaaacgacaagggcaaatggtcaggtgagatcgtcacggctttccaagcggctcaacgcaatctgaccaagctccgcgcattccgcgaagccggcgttccgtcgccgggcgtgttccggaagctcaagactcagaaccgcgagcagtggatggcggaacgccggcgatggcgacccgtcatcgcgcaaatcgaagccgctcatccgctggtgaatcggaacgacgacgagacacggggcggccgctttatcatgagcctgtgcgagggagagatgctctggatgaagcacaagcacaccggagaagtcggctatttcgtcgtcgccaagcttgacaaaccgcagtcgattgtgctggtacctcactgggacgcgcgtgccgctggtgagcgtaaggatgccaagggaaacaaggtatcctattccaaacgcgaccagttcgcggccacgccaagcgacctgaaaacactcgccccgcccgatcagccgcacgcgcgcaagatccaagtgagcgtgctcggcaacgtgacggtgctggatggcgactgaatccggaaacgtcccgtgatcaaacgcacagtcgagatcagccgcgaaccagcccacctcgccgtgcgcgacgggcagctcctaatcctccgcaaggaggaacgcccaccgcgtctctccgcacgtcccgacaacctcgccggatccatcccgtgcgaggacatcgggctgctcatggtggacagccgggagaccacctacagccactcggcattggtcgaactcgccgatcacggggccgccctcgtcgtctgcgggcgcgaccatcaccccgccggcttctacctcccgatcagcagcaacacacatcttctctcgcgcctagacacccagctttccgcaagcaagcccaccaaaaaacgcctctgggcatcgattgtcatcgccaaggttcacgcacaagccgcggcactcccgcccggtgacgcttgtgcgaacgcacgccagaagcttgcgcagctcgcaagcgaggtccgctcgggtgatccgatgaacatcgaagcccaggcggccgccgcttactggccggtgctgttttcgcagacatccaacatcaggcatcccttccgccgccgcgccggcgagcgcaacgcccagccgcccaacaaccttctggattacggctacgccgccatccgagccgcggtcgcccgcgcgatcgtcagcgccgggttgttacccgcgctcggcatacagcaccgcggccgaagcaaccccttctgtctcgccgacgacctgatggagcctctccgccctcttgtggaccagcgcgtccgctggttgaccgagcggggcgacctcgcgctcgaccagcccaccaaggcggaactcctggacgccctcaccaccgaagtacaaaccgaaaaccaatccgggccgctcttggtggctctgcatcgctatgtcgcctcattcatccgcgttcttatgaaagagcagtccacccttgcgatacccaccatccgcgaatcatgatccgtgtttttccaggccggcatggagctctacccacgctctgccgatgcctcctcgcgagagccgcccgagtcagcagcggcatgtcgagggtgatcgtggaactaagtgggtaccgctggatgtgggtgatcgcgcttttcgacctgcccaccgacagccaggcggcccgccgccaatacgcccaattccggaaagccctgatccgcgacggcttccagatgatgcaattcagcgtctacgtccgccacgcctcaagccgcgaaaacgccgaggtccacgcaatacgcgttcagcaagcaatccccccggacggggaggttcgggttttgatcataaccgacaaacagtttgcgcgcatgcgcattttctggggaaaacggcgcataccacctcccgagcctcctgctcagctcagtttgttctagcatatatagtcgctaaagcattgatagagctggatttgcgccaaggtcagtgtaatcaaccccagcccgcgagcaacacgcaacgacgttcggcgcggggcgaccgaaatagaagtgtaatcaaccccagcccgcgagcaacacgcaacgcgggttcgtatcaggcggtcgagcgatcagtgtaatcaaccccagcccgcgagcaacacgcaacggtcactggtgcctcgccgccgtccggcgagtgtaatcaaccccagcccgcgagcaacacgcaaccgccgcccgcgcacgacaacgccgggctcagtgtaatcaaccccagcccgcgagcaacacgcaacggcggcccgacgacgaccgagccggtggaagtgtaatcaaccccagcccgcgagcaacacgcaacgccgggggtgcgccaggcgacgggcatgccagtgtaatcaaccccagcccgcgagcaacacgcaaccacattcgacaacgccattgccgatcttggagtgtaatcaaccccagcccgcgagcaacacgcaacggttttctctcctctggtcaaggggcgggaagtgtaatcaaccccagcccgcgagcaacacgcaacggtgaacaccgcccgacccccgcggacctcagtgtaatcaaccccagcccgcgagcaacacgcaacggggtcggcaggcggcagcacgagccgatcgtgtaatcaaccccagcccgcgagcaacacgcaacgcgtgtcacacgcgatgggtcgagctctgcagtgtaatcaaccccagcccgcgagcaacacgcaacgtgttctgctgctcggtctggcggcggcggagtgtaatcaaccccagcccgcgagcaacacgcaacgcgtccgagccgtacgcgtccgcagcactgagtgtaatcaaccccagcccgcgagcaacacgcaacctcgcggaccatctgcgacaccagctcggagtgtaatcaaccccagcccgcgagcaacacgcaactgcgggaccgccttggtggtggtgtcgggcagtgtaatcaaccccagcccgcgagcaacacgcaacgctctcgcgttcgacgtgccgcctcggctcagtgtaatcaaccccagcccgcgagcaacacgcaacgagttcggagcgtgtcgaggcgagctcacgagtgtaatcaaccccagcccgcgagcaacacgcaactcatgcggcacatgcttgttgaccgccagtagtgtaatcaaccccagcccgcgagcaacacgcaacgagttcttgatgagtgcggcgatgtccatgagtgtaatcaaccccagcccgcgagcaacacgcaacagggcctggtaccggggcgtgtcgctcgcaagtgtaatcaaccccagcccgcgagcaacacgcaacagcggtttgcagcaatccagcgggacgtacagtgtaatcaaccccagcccgcgagcaacacgcaacgtggtgtgcgtgcgagccgtccgcgtgcgagtgtaatcaaccccagcccgcgagcaacacgcaactggcgacgtactcacccacttccaccagctagtgtaatcaaccccagcccgcgagcaacacgcaacagagttgatcggctgatttcgtcggcgtaagtgtaatcaaccccagcccgcgagcaacacgcaacgctgggtgatggatttgggcatggcaggcgagtgtaatcaaccccagcccgcgagcaacacgcaacctccgcgaggatcggcgcggcgaaggcgtcgtgtaatcaaccccagcccgcgagcaacacgcaacatcgtggggcggggcgtgctgggcgcaaagagtgtaatcaaccccagcccgcgagcaacacgcaacgtggagtaccacccactcggcaccagcgccagtgtaatcaaccccagcccgcgagcaacacgcaacaagaccgccgacggggtgccattcatcgagagtgtaatcaaccccagcccgcgagcaacacgcaacgcggaactcgcagcggcgagcccctccccgagtgtaatcaaccccagcccgcgagcaacacgcaacgtcgtcgagttcggggattctcgcgtgcagagtgtaatcaaccccagcccgcgagcaacacgcaactgacgagttcggtgagcacgagaacgtgccagtgtaatcaaccccagcccgcgagcaacacgcaacgagctcctgcaccggatggagggcggcggaagtgtaatcaaccccagcccgcgagcaacacgcaactgctcgccgccgtacgacgacgcgcgggatagtgtaatcaaccccagcccgcgagcaacacgcaactgatccgatcacagattcgagcgagatcggagtgtaatcaaccccagcccgcgagcaacacgcaacccgctccgtgatcgactcgacccacgcgagagtgtaatcaaccccagcccgcgagcaacacgcaacacccagccactcggcgaggcggcctgcgaagtgtaatcaaccccagcccgcgagcaacacgcaacgtgatcctgcaccggatggagggcggcggaagtgtaatcaaccccagcccgcgagcaacacgcaactggtactccgcgccatccgggatctcatgagtgtaatcaaccccagcccgcgagcaacacgcaactgcgggatcggggtggtgcaccgtcgcctgagtgtaatcaaccccagcccgcgagcaacacgcaacagcgtgcgacacgagacgtttgccggcatcagtgtaatcaaccccagcccgcgagcaacacgcaactcgtcggtggatgcgtagccagtgtcggcgagtgtaatcaaccccagcccgcgagcaacacgcaacgatggctcgtgttgagccgccggtttccagagtgtaatcaaccccagcccgcgagcaataggcgacaggatatcttctgaatttaaggcatgtctcgtattgaatactctgccgtttgtgtatcaatagaatctcaaagtcgatcactcaaccaccggcatcatccgaatctggatctctccaccgcatgtcgggcaggtcgcgtgcgtcggcttagtggcctgttgccctgcctcatacgcgcgctcgagcgcgtgctggatggtccagaccgcgaggtcgtggaagtcgagccggtcgctgccgcggcttcggagggtctggagcccgagcgtctcgcgggcgatgcgttgcacggcctgctcgcgcggggatggcgggatgggattcaccggatcgctgggatggctggcgtcgctgggcatggcggtctccattatcgcgctcggcggagccgggcccgctcggcgcaccgcccatgcagccacgctcttgcgggcgatgcaagcattttctgcctgtattcgccgatgttttcgcgatacgcgcggatcccaggccatccccttggtcaccggacgcgctctcgctgaatccttcaaaagacccgctcgtattccaagattccgctggattcccgcgcgaatccatggctcagtgtgcccacgcgcgggccggcccgcccgcgtcacggagggcccgccaccatgccgccgccagtcgcccgcgccgcgccacgcaccgagccgccttctcccgcggctgccgcggccccggtccccttggacacgctcgccgcgatgccgatcgcggcgttgcgttcactctggaaaacgcacatgggccgggccgcgccgcctgcttctaaacgcctgctgatccgcgagctcgcctggcgcacgcaggagcgccgccacggcgggctcgacgccgagacacgacgcctgctgcaccgcgccatccgcgccgcccaccgtggtgacgccgcgccggacgacaccgatccagaccatgatcaagcccccgcccccaagcgtcacccgcgcggcacacgctctgcggccgtcgtcaccaccgccgagcttccgccgggcacacggctcgtccgcacatggggcggccagcgccacgaggtccacgccctcgaagccgaacgcggcttcatataccgagaccggacctaccccacgctcagccacgtcgcccgcgagatcaccggcacccgctggtccggcccacgcttcttcggcctgaccgtccgcacagcccccaagcacaagtcggagcatgcatgaccacaccgaccctccgctgcgccgtctacacgcgcaagtccagcgaggaaggcctcgatcaggccttcaactccctcgacgcccagcgccaggccgggctcgactacatccagagccagaagcatcagggctggaccgcgatccccacgccctacgacgacggcgggtactccggcggctcgaccgaccgccccgcgctcgctcgcctgctcgaagacatcgagaggggccgcgtcgatgtcgtagtcgtctacaaggtcgaccgcctctcgcggtcgctcgccgacttcgcccgcctgatgcagaccttcgaccagcgcagcgtctcgttcgtctcggtcacccagcagttcaacaccacgacctcgatgggccgcctcaccctcaacatgctcctctccttcgcccagttcgagcgcgaggtcaccggcgaacgcatccgcgacaagatcgccgccaccaaacgccgcggcgtctgggtctgcggccagccgcccctgggctaccgcctcccgcacgagaacgacccgggcttcacgcccggcgaccgcgtgctccgcgtcatcgagcccgaggccgaactggtccgcgccatcttccgcgggtacttggaactcggctcgccggtccgggtcgccgcgaagctcaacgccgaggggcagaccaccaggcggtgggtcagcagccggggcgtcgagcacggcggacgcccgctcaacgccgccttcatccaccgcgtcctgaccaaccccgtctacaccagcatgatcacccacacccgcggacgccacatccccggctcgcccaagcagaccgagtgccaccccggcctccacgagccgatcatcgacccggcgacctgggaccgggtccacgcccggatgcgcaccgtcgagcgcgcggcccgccagagttggacccacacccacctgctcaagggcaagctccgcactttcgaggggcacgccatgagcccgggctcggtccagcgccccgtctcgaagcgtgccgagacacgccgggccctcggccccgaggcccggcgcgtcgtccgctactacgtcagccagaaggccgtgaagcaggggtacaagacctgcccgatccggaccgtcaacgccgctcgcctcgacgggctgatccgtggcgtggtgctcgggcacctccggtccggccaccacgccgagctcgacgcttgggcgcccgaagcccgcgaccgctgggtccgcgaggtgatccaccgcgtcgtcgtcgcgcccgaccgcgtcggcatcgagcttctgccggaccgcatcgccgcctgtgtggaggcggcccgcgaagcgccgcacgccccggcgacgcgggccgatggcgagcccgccccgatccccgcgtgccccttcacgcccgagctcgacgaccgcggcccgcgcccggtgctgaccctccgcgtgcagatccgccgccacgacgggcggcgcgagctccgcagccccgaaggccatgatctgcggaccgtgctcgcgcccgacgcccgcccgcgcccgttaacccgcctggtccgcgcgatcggccgcgcatacgcgtggcggcgcgagctgctcgagccgggcgccaccatcgacggggtcgcgcagcgcgccggcgtctcgccctcgcgcctgcacgcgctgctgccgctgacccagctcagccccgcgatcctccgcgccgtcttcaagggcacgatccgccccggcaccacgctcaccgagttgctgcacactgcgcagcagctcgactggtcgcaccaagaccgagccctcagcgtctgagccgggtcggagagggaaaagcgcagcatcaagatccgccgaactgagctgagccgagccgcgacgcgcgatccaaagaacgcccgtgtgctcgcatcagccgccgggtggtggacatcccgcgccacgcgccgagcatcacatcaacccagcgccgtcccgcgcacagcctcagcatcacacccaaccccaaaattccacaccgcccaaagccgccccgagagaccatgccgcgatccgggcgagactcggggctctctgggggttatgttcgggtagagactgttgagtaggcgtgaaaatcgccaaaaaacccgaggaaaacggcaaaagccaacacgcaacacacccaaacaaaacaagtctacaaaccaagcggagagggggggattcgaacccccgaggatgttgccaccccacacgaattccaatcgtgcgccttcaaccgctcggccacctctccaggggtcgcgggcgggcggttggccgagccgcgatgaccgcatcgtagcggtgttcgggccagccgtcacgggttcacccggcttctggcgcgcccgagcgtcgtccgccgcccgcgaaccagcggcttgcccagcaccgtgtcaccactggcacgctgaccagcacgcccaccgccgccccggccgcaacgtcgctcgggtagtgcgcgccgaacagcactcgcgccacgcccacgaccagcgtcagcgtcacccagacccagatcccccgcgggtagaccaccgcgaggaagaccgccagcgccgcagccgccgacgtgtggctgctggggaacgaccagagatcgctcccgatcggctgccagaactcccacgcgtgccgcggcccgacggggagcgggaacgggtgcacgccggtcggcccaaggatcgccccggcgtcgtacagctcgtgcaggcgagggcgtggtcgtccgatcaggattttcgcaagaaacgttgcgagcccggtgagcgccgccgccgccgcgaggtcgcccagtcgtcgccgccgggcggggtcgagcgtccagatcagcaagccggctagtacgagcgtgccgacgccgccgaactgctggaacgcttcgagttcccgccgaagatcccccccgagtcgcagcccgcgcgcccagcccgcgatcgagccgtccagcccccagagcagcacgaccgcgagcgtccccgcgaccagcggccagcgccagaaccgctgcccttccacgctcgcccatcgcacgatcggccccgcccccgtgcgcacgatcgccgccagaacgtgcccccagcgcaccacgcccgtcagcccgcggttatagtcgagcgcggttcggatcgggctcggcttgctccggttcatcggcatcgggtgctctcgcggggtgcgaacggacggaccacgaacggaggcgtcggggtttgcaaggacggctcggttccatccgagatcggctccgccccgagggcgactccgccctgcccgccacggtacgcgccgcgtggtggcgaggcccgttcgccgccgcgctcctgcttgcctggtgcctcttgatctatctccccgggctcggcgccctcccggtcatcgaccgcgacgaggcccgctttgcccaggcaagccgacagatgttcgagtccgtcgccctcccgcgcgagcaacgcacggacgagctccacgccggcggcttgatcgtgcccaagatgggcgaacgcgatcggctcaacaagccgccgctgatctactggctccagtccgcctcggccgccgtcttcaccggcgccgacccctcgctcgacgcgatctggatgtaccgcgtgccctcgatgctcggcgcgatcgttgcggtgctcgcaacctggtgggtcggcgtgcgcctgttcgatccgcgtgccgccgcgctcggcgccgcgctgctcgccgtcgcgccgatggtcgtgtgggacagccgccaggcgcgggccgaccaggtcctcctcgcctgcacgaccgtcgcgatggcggccctctatgtcgcgtggaagcgagccgccgccgggcagcgcgtcccaatccgcgcctgggcgacactctggatcgcaaccgggctcggcgtgctcaccaagggcccgatcacgccgatggtcgtcgtcctcaccatcgtcgcccttgcgctcgcgacgcgatcctggcgatggacgctccgactccgcccgggcgcgggggtgctgatcatcgcggcgatggtctttccctgggtgctcgcggtcgctgcgcaggtcggcttcgggaactacttcagcatcgtttacgacgaggtgctcgggcgcagcgccgcgcccaaggaagggcactggggcccgcccggctaccacttcgccttcctcatggccctgttctggccgggcgtcatcgtcaccgggctcgggctgctccgcgccgcgcgccgcgcgatccacacgccgcgcgtcgcgcccgggcgtggcttgcgctcccgaatccgcgggctctggttccgctggcgatgccgaaccgtcgctcggcgtggcgagctcttctgcctcgcctggatcctcccgagctggatcgtcttcgaactcgtcagcaccaagctcccgcactacaccatgccgctctacccagccgtcgcgctcctctcggcacggtgcctcctcgccgcgca

SEQ ID NO: 535 - DNA, 15704 bp, synthetic construct
  source 1..15704: mol_type = other DNA
  misc_feature 1..15704: note = Synthetic
cgcgagcatcgccgccgggtcccccgtcgcgatccgcaccacgcgcacgtcaacgtccgcccccgagcgaacgtccaaccccgcgatcaacccttccagcgcggccacgtccgccggcggacccgagaccagcagcccgcgcccgtccggcgtcgccgtgtaccgcaccgccgattgctggcgcggcgtcagcatccgcgacagaatctgctcgacccgcggagcctcgacgtgctccagccgcaccacgcgcccgacgttctcggccgccggctgcctcgcctgccccgtcgccgccgccgggtcgatctccccgatcaacgcggtcgcctgcatcagcagcgcgggcgacgccaccacgctcaccttgttcaccgtgccgagcggcaccaccaccggcttcgactcctgcggcaccgacgcgaagagcgcgctcagccgctgcgacgcttcgtccggcgtgatcgtctccagcgcgaacgtcatcatctgccgatcgcccgccagcccgtcgcccggcacgtcgatgatcgtgatgagttcccgaaccgtctgcagccgggcctcggggccgaccgcgatcaccgagttcgtccgcttgtccgcctccaggctcagccccgcgatgtcgatctcctcgagcgtccgcaccttcccgtcctgcgggttgatgatctgcttcaccacccgctggcccaccagccccttgagcgcggtcacggcctgctccgcgttcgcgtggcgcagccggaacaactcgaacgccgagtccaccggccgctgcgcgtcgatcagcccgatcacgtcgcgcaaacgcacgcactgcgccgccgtctcaacaaggatcagcatgttctgcgcttcgaccgccgtcaccgcgccgaacggcgcgagcagcggcttgatctgctcggccacgaccgtcgcccgagagttctgcagcgggatcatcaccgtcaggatctggtccggcgtgatccccgccgggatcagcgacgcgtcgaacacctcgctcggcttcttcaccgcgtccgccagcgtcgagaggtacaggtagttctcctcacgccgcagcatcaccccgtgcatccgcaggttcaggttcagaatgctcagcgcatcggcgaacgagtactccgtccgacccccgacccacgtcatcgcccctgcggggaccgccgcctcgcgcacgatcggcagccccgttgtccgcgagaagtaatccagcacctggtcgaacggcgtgtccttgaacacgaaccccacgcgccggtcctccggccgcgcgggctgcgcctccggctgggccgccggcgcagcgggagccgcctgcgtcgccgccggcgccgccgcctcaggcgcgacgatcgcctcgggcggctccgcttcctgcgcgaagacggagcacgcccccccagccgctgcgaagagggacgccgccaccatcagtcgtctctgtgcctgccgggccatggactcgctccttctgccaacgaacgccgccctccggcggccgcctcggctagtagccactataccgaaaccttcggcaaccggctcactggaccggctgccgttgcgcaagtgtctcattcaacaggacttggaacgcctgctccccgatcctgaacacggccttctcgccgcccgcctcgaccagcaccgcgtccagcaccccctcgcccggccgcagtgatctccactccccgctcttaatgttcacgagccacgcctcgacttgccccccggccgacaccaccgcattcaaacgccacacgtcgtacggcgggggcggcggcggaggcggaggccgatccgcctgcctctgctcctgacgcggcggccggaccggctccggcttcggcggcgcgaacgcattccgcgctgccaccgcgaccaccaaccgctgcgcctcttctccaggctcgacgatcatcggcggcgtcgtgtcgccgtccttcgccacgtccggcagcacgaccgtctgcaccaacagccgcagctcgaactgctgtcggtcctccgactccggcctgatcgagaacgaggcgacgcgcgccacccacggctgcgcctgcgccaacgcgatcgcccgcgtcacctgctcaagcgtccccttcgctcgcaactcgcccgccaccgtgtagaagtccgggacacgcaactgatcgcgcgtgaagtcccgcacccgctcgcgcgccgccgggttcccctcgggcacgggccggttctgcgtgaccacgacgtcacccagccccgccgccgtcgcgatcgcgctcagccccgtgcggaaccgatgctcgacgacttccgccgaggcgccgagcgtgcccgatgcctgcgccgccagccgctcacgcacctggaactcgtcctccatctgatcctcgagccacctcgacgacttctcgtaggagtccagcctcgccagccgctccgccgcgggtctggcgtagaaccgcccgtaccccatgtaccccagccagcccgcgatggccacgccgaccgcacccgcgatgagccgaccccgagccgtcatccgccacccccctcggcagccgcggcgttcgagtctccgccgttcgcgggtcgatccggcctcgccagccccgtcaccagggtgaagtcgaaccggttcggcacgtccggccccgtcgtgtccacccggtagactctgtcctccaccaggcgcccgcgcaacgcatccgcggccgcccgctgctgcgaccgcccctgcagcctgaaccgcgattcctgccgctgcgaccacgcgccggtcgtgtactgccgctcgcgcgacgcgaacacgaccgacgcctcgagcgagccgtcgatctggtcgaccagcgcgctgccgtccgccggcacctggtctccgatccactccaggtgcgccagccagtccacgccaagccccgaccaccgttcgatgtgctccagccgagccttctgacggacgtgctgcgagtatcgctccaccagtttctcattgcgcgtcttttccgccgagatcctcccgtccagcgcggccagccggttcagcccccacacgtacgcgccgcctccgacgacgatgaccgcgaacacgcccaggagcgcgacctgccgaacccgcgccgcccggtccggcgcacgcctcggattcgcgaagtcaagccattcccgcgacgccagttgaccgacgaacaggccgatcagcggcaccagcgggagcaccgcctccgcgcgccgcaactcgtccggcagatcaaccatccccggcagcccgacccgggaccacgacaactcaagttcccgcccgcacgccgcccccaccgcctccacgcgcgcccccgacccgagcaccgccacgcactcgacctccgccgagtcgcgcgtgccgcggtaactcatccacgtccgtttcgcctcgaccgccaggcgctgcgcgaacgccgggtcatctccggcgggcacgtccaccccgcgcgacgagaccagccgaccctcctcgatcaccaccagttcgaccgcgtcgcccgcgatcgcgacgccgatcagcgcgccgtcctgccggtgcgagagttccgccagcagcgcggccgccccctcgccccggaggtgaatgcccttgacccgaagccccgccgccttcgccaccgcgcggcaccacgtcacctggtcccccggcaacgcccccgccagcaccgtggtctccgccgcgtccggcaggtcgatcggcaggtagtcgatcaccgcgccctgcatcggcatcgtcaactgccgcgacatctggagcgcaaccatccccgccaggtccgcctcctcgccgtcctcaggccgcggcagcgtcaggcgcttcaacaccacgttcgcccgcggcaccgcgaacacagccgcccgcgccgtgatccccgcgtcgcgcagcgtctgacgcagccacgcgccgacggccgaggcgtccgccccgtcaatctcgcgcggcagccgcgcgttcacccacgccttgacctgcacgcggccgccggagacctcgccccacaccgcaaccacgccgtcgcggtccagcgagagcaccaccgatgatttgcgccgcgtgttcatcggctgcgcgccctccgtggcgtccatcggccgatgcggggatcaccgccggccgagggtgcggcctctacgccggacgcgcgcgggcctccgcccgacaccgcctccgcgccgctctcgccatcgtacccgaacccgtcaactcccgcgacgggatccgcgcccgtagattccctaccgctcgcggtcgaactcggcgacatccgcgtcggctcgtccgtcgcccaccgttcccactccagcggcggcaatccagacgctgcggcggacacctcggggtcttcgagcgggtccggttcctcatccggccactcgtcctgcgccgactccgcccgccccgcgtacagccggcgcgccagcggcagcaacgtcacgtcccgcatgtacgccacccgaggccgctgcgacgacacgtcgatcaccgcctccaacaccatccgctgaccgagcgtcgcttcgtccccagggccaacccatgactccgccggcgcgacccccgcctccagccgcacccgccactgcatcgcccgtgtcgtcagccacgggacggcctcttggaactgctcctccggaacgatcccttccgccgccggccacgccacgcttgtgcgctgcgattcgtccagccgctccctcgccgccacgatctcctccgccatcgcctcatcgatccccggcacgcacgccaacgcctcggccggcgcggtgttcaggtccacacgcccgagcacgtagtcgtcgtcgctggtgcacagcgcgtccagggcctcggcccagtcgccgggcggcacctgaaagaaccgcatcacgcgcacgaagtccgactcggacctgaactccgtgccgttcttcatgatctgttcgacgccctgcgccacgccctcgccgaaccgatccacgagcgcgctccgaaggctgtccgaccacgtctggttcaggttcacgcgcttgcgcccgcggtgccgcaacgggtcgcccccggccccgctctgcacgttcggatcgaacgcgaacaccgtcacgagatccgcgagcggcagggcgcccacctctcccgagaacgactcaccgtccccgcccgcgttctcgccgtacaccatctccggcgtgaacccgtcgatcgacagcaactcgtccacgctcgccagcggccgctcggccctcgcctcaacgatccgcttcgccagcgactcccccacgcccggcagcagcgcgagcatcgactccgtcgccgtgttcaggtccagtttcccgctctcgctcacgatcggcacgccgcccggcccgcccaggtcgatcagccgcaccgtccaccgccgaccggcctcgtccgtgaacaactcccactcttcggtcacgcgcggcgatcgcccgtcgagcaacccatcccgctgcgacgccaactccgccatcaccgcctgcacccccgaccacgccagcgcccgcgactgcgcccgagtcaccgtcacttccgcctccgcgatcgacgcgtccgcgctgatcagcacggtcgccgcagccagcgcgcccagcgtgatcacgaccagcaccgcgaacaccacggttcctcgtcgcgcgggcgtcctcatcgcgactccctccacgccgccgaaggcccgtcgggcacgatgatcacgcgcacccggtccggctcgcgctccggcaggtccgaaggctcgacctcatcctcccaccccgtcggatcgtcgaacgacacgggcagcgcgaacgggtcttccccgtcccactccacctccgcctcgtccgtcggcgggcccgactcctcctcgatcgccggcgccgcgggcggatcgcccggtctgcggaaccagagcgcaacctcgaccgccaccggcaggtcgcccgcggccttgctgtcgaacgagtcccgccacgaacgcccgtcgaagtaccgcaagcgcaacgccgacacgccctcggccaccacttcgtccgccccccccccggggtcgtcgcccgaccaccgccgcaggctcacgcgcccggacgcctcgtcgaagcgcaccgcaagcccctgctcgtcgccgagcgtgcccgacgccgttccgccgcgcagggtcggccgcaccccgcgcgacacgacccgcaccgacgcccgatcaccctcgatgccggcctccccctgcccgtccgcggcgatcgccgtcaggaaatccgcctccagccgctccagcagcagcgtgcccgagcgcacctcgccgctgagcgcgagcagcgtgtcgcgccgctccagcgcgttccagaagaacgacatcaccgctcccgagagcgcgagcaacagcacgatcgccaccagcgtctccatcagcgtgaacgcccgccgcctcatggccgcccccccccggtccccgcgccgcccggcggccgcgccggcgggtcgaaccgccccgggcggtccagcgggctttcacgctcgaacgggtccggccgattgaaccgctcctcgcgctcccgctcgcgctccccgcgccggatcgcgtccatcaactcgtcctcggccccgacctcatcctccgccaacgcgcccagccggaccaactggtgcagcgtgtacgacgccagcgtcgcccccgtcggcgagaccttcagcgacgtcacccgcacgtgcgtcaactccgggaaccccgacggcgaggtctctaccaccagctcccaccccgtccccgaggggggggcgtccgcgaacgcacccgactcctccgcccgctcgctctcgtgccacgcgggaacaggcccgttcagcgtcgccggcgacgccaccccggcctcgatctccgacatcgccgtccgcgccaggtccaccgccagcgcggcgtcccgcacgcgctccagcgcggtcgtcccctgcgtcagcgcggcgaggatcgccatcgccgccatcgcgaacatcgccagcgacaggatcacttccagcagcagcgcgccccgccgcgcgacgaacccgccatggagccgacgggcgttcaacgccgcgctccgtccggccgcgccgccccgtcgagcgcgcccgaggcgacgccattggggccgggcgcagccggcgccgactcggcgtcgccttcccccgccgatgatgcaggccgacgaaccgaacgcagcgccgccctgcccgtcgccgcgctgatgcgcacctcgaccgagcgcccctccggcccgaccagccagaacggcgcggtctccagcgcgcccccgtcgggaagaaagaccgcgatcgtcagcggcccgcccgccccgtcttcgaacccggcgtccatcggcgcgatgcccggccgaggctccgcgccctccccaccccacccgatggcctccgccggcacagggcgctccgcgctcacgcgaaccccggacggcagcacgaacaccgggaactcgcgcggcacgcggggggcggcgtccgccgaaccgaacccctcgcccggcatcccgaatccgcgatcgcccggctcgctcgcgtccccaagtccctcgacgggatcgtcgtccccgatcggccgcgccagcaggcgcagcccgtcccgcgccggctgcgcgatcagcgcaaccggacggccctcgcgcagcgcctccgcccggcagagcgcgagcgcgccctccagctgccgcgacgactcgtcgaagagcgcggcccccatccggcgcgcgagcgcgggcgcggccagcgacgccgccgcgatcagcaacgcaatcgcaaccagcacctcgaacagcgtgaacgctccgcgtcgcacctgtcggtccctccccgcgcggcaacccgcgcgaacggaggatcagccacggtccggcggcatgaacggaccgccgagatcgccttcctcatccttcggccacgacgtcaggtcgtcctccccgccctggtcgtcctgcccgttggggccgaacgaccacaggtcgaactggctctcgtcgcggtcgctgatctgccggtacccccactcgttgccccagcggtccgccggcctcggctcctccaggtacccccgccacttgctcacgtccgcctcggggtcgagcgcgttcttgtcccacagcaccttcacgccctcgtcgtccgtcggatacctcccgaagtccagccggaacaggcgcatcgcgtccttgatccggttgatgtccacctgggtcatcgactccttcgcctgctcctgccggctcagcacggccaggccgacgagcgcactcaacgcgaggatgatcgcgatcacgatcatcacctcgacgagcgtgaagccccgggcgaggctccggcggaccttgcggttcatggtcgggcgtcctttctgctctgctccgggggaggccgatgccgcgggcgtccctgccaccctcggccgccaccggggactgtgtcctcggctcttctacccgccgccccgcccccgggatcagccgacccgggcggacagcacattagtccatactagcatcaaccccccgaccgacgcaagccccgtccccacgaacccggcttggggggagggatcgagggatcgaggggggaggggtcgagggatcgagaggggaggggtcgagggatcgaggggggagaggtcgaggggtcgaggcaacgtgaaaacggcgggccgtgaggcccgccgcgggatccgcaccctgtctctctgtgcgggcgttgcgccctccgcgttccggcttcacgccgcgaggcggacgttctcgccggactcggccggaccatcgtgctcgcccgcgtgggcggtgaagacggagacgccgccgacgccgaagttgacgacgaagagggccggctcgccgcgcctggtcgagcggacggcggtgacctggtagatgacggtcgaggccccggcggggatggtgccgtcggtgaaggcccgctcgccggaggagccgacgaaggtgtacggcccgccgtcggcgcggcgctggacctcgtacatggtgccgacggacccggtggggttgtcgcacttccacttcagttcgatctcgccggtctggagcaggttgacgcgcggctggtagggcgtgccgggcgcggggacgggcgacggctcggcgggcggcgggatctgggccagcacgtagacgttggggtcgttctgcgtctcggcgtagctcttgatggtcttgatcagccccgcgccgttgtcggccatggtggcgacggcgttgtagaaggtctgcgtggcggccttggcggcgtcgcgcgcggcctgggcctggttgtaggcgacgcgggcggcggcggtctggcccatcagggtcgtgacctgccccgatgtaagtccgatgtcggttgcgttggtcgcccacggctggttgtgcgcttcatagaactcgatcttgccgagcctggtgttgggaacgatgcccgtgatgaggttctccgttctgatgtcccgcgatgtgaacggggcaggctgcatggaaggtcgccgcgccccacgcggagcgtcgcggccgtccgatatgtttcggtcgatcggccccgcgtgcggaccacttgagcgggatgctgaagaaagaagcaaggaacgcggagatcgcggcgttgggacgcggagaggggggaggggggggcgagggcaaggggggaaggggggaagggaggaagggggcttgagacttgaggcctgagtcttgaggcttgaggcctgaggcttggggcttgggggtgggtggggcggcggcgattccccgactcggcaagcccacttcatacccgcgcggcttcggcccgcccgggtacggggaggaggcgtcaaaaagagaagagccgcaggccgggggtgcgggctgcggcggtcgcctgtcggcggtgcctgcgattactcttgttgcgtgaaaccgcgggccgggatcgattacactgacccgactctaacaggcggcgggaggtccgtcaagggagcatcccatgaatgtgctcggctttgacatcggctcgaactcggtggggtcggtgtggatcgatcgggcaaagggcaggatcaccgcgggcgtctcggtcttcccggcgggggtggacgaatccgatgacaagcgcggcgacccgaagaacgccaagcggcgcatgacgcggcggacccggatcacgctcgcccggcgttcgcagcgcaagcgtgagctgcggctgcggttgatcgaggccggtcttctccctccgaccgagcgggagttccgcgccctgctggaagcgacggacccgtgggtgctccgcagcaagggcctcgacgcgccattgacgccgttcgagttcgggcgggtgctgctccacctcgcgcagcggcggggttcgttgggcctgcacgtgcccgagccgagcgaggaagaggccgatgccgacgaagccgcgcaggatgacggcaaggtgaaggcggcgatcggcgcggtccgtgcgaagatgatcgagaagaacgcccgcacgttcggcgagttcatctgcatggtgcgagcggagcgcgtcacccccatcacaacaaccgacaatcgccgcgccgacgcgaggaaaggaccgcgcgaatggcgtgccgcagtccgcaacaaggccgcttcctacgaacactgtgccgatcgcgccatgatccgtgacgagttcgcgagactctggaatgcccagagccgcctcggcggcgagaccgcgaggcttctcacggccgatctccgcctcgccctcgacgacgagtccggcgatgcgatctggaggcacaagggcctgctcttcggccagcgccgccagtcgtgggaccttggcacgctcggccgctgcaacctccacccggaggagcgctgcgtcccacatgcggacatgcacgcctcgcgctacctcgtcgtcgagacggtgaacaacctcaagatcatcgacggcgccaaggaggctcgccccctcacgcccgaggagcgggagaggatcaagaagttcctgagcggcccgctcggcacggagaagggccggaagaagaagggcgacacggagccgcccgccgacaggcccaagcgcaccgtgagcgtgaccgacctccgaaacttcatgggcacgacgaaggacggctgggggcgggcctcgaagacctcgcgcttccgcttcaacatcgagaacgacgaggaccgcgccatcaacaccgactggttcagccgcgagatcatccacggggcggtcacgccggagaagtgggcggcaatgccggagcgcacgcgcgagggcctgaaccgcgccatcctcaagttcgacccggaccaggaggacgacgcggcgaaactccgcgccggcgtgatggactgggccggtctgacagccgcgcaggccgacgccctgatcgccgcgtggaaaacgcgtcccaagcccgacgccaagcggctgagcatgagccgccgcgcggtccggaacctgctcacggtcatggaccgccccgagccgtggccggacccgaaccgctccggccagaagcgatggttgacccagatcgaggcgcgcaaactgctcgcgggcgacggcgacttcatcgacgtgacgacgggcaaggcactcgacgaccacacgcgccgccgctacgccacgggcgcgaagggggcgacggcccgcgaccgctactacatgggaaagcacgttctcgtgaaggacggcaagcccgtgatcgaccacgagaccggcgagccgctcgccgagccgccccccgcgccgctcgtcagcaaccccgtcgtgcgcaaagccatccacgaggtccgccgccatctggtcgagtacatgaagaccttcggccgcaagcccgacgaggtctacatcgagctggcccgcgaggcgaagatgggcaagaaggacgcggacaggctcctcttcaagaaccgcctgcgcaaccgcatccgcaacaacatcatccacgaactcggccttgagtcgcagacttccacgcagcagcgcgccgccgtcgaccgcgtcatcctctgcgtccagcagggcggcgtctgcccgctgtgcgggcagggcggactcacaacccgccaggccgcgaccggtgaaggctgcgaggttgcccacatcatcccccgtgccagcggcggccacaacggcctctccaacatcgtccttgcgcacgagaagtgcaaccgcgagatgggccggcgcacgccgcgacagttctggtccgacggccccggcttcgaacaggggatggtctgggtcgagggcatcttcggcgaggtcaagcggccgaagccctccgagttcaagagcgcgaccggcgatgccctctgggcctgctacttcaccaagcgcgacgacaccgcgaagatcgagcagttcaagaaggacgtcaaggacatccaggagatgacggcgcggcaggaagccgcgaccaagtacgccgcgcgccaggtgatggcctacctggccgatgcgctctacgggggcaagggcctcccggagcggagcaccggagacgacgggcggcggatcttcgccacggacgggatgtggaccagccgcttgcgccgcgaatggaacctgttcttcgacccccactgtgcccgttcgaagggcctggccaacgatgaggaacgcgagcgcaaggagaagaaccgcggcgaccaccgccaccacgccatcgacgccgttgtcatctcgctctgcacgcgacaggtccagatcgcgtgggaggagcgggagaagcgggccgacaatgaaggcatcaacacggcgaacgaagaggagatggccaactaccgccgcctccacccgctcgacccgcccgagcccttcacgtccatcgaggagttccgcgaagaggtgaagcgtgcggtcttcggcgacgacgggagcctccggcccatctgtcaccgcccggtcaagcgcaagctcatcggcgcgctgcacgaagagacactcttcggccccgtgctcgacaaggcgggcaacctcacgggcaactacaccgccaagaagagcgtgctctccctcgacccgaaccacctgcgccttccccggcgggagaccgagaaggaggccgtcgagcgcctcgccgccagacgccgatgcacacacggggtgagcgagcgggaagcgcgcaagtgggcacgcgccgtggtttcgtcccccggctaccagcccgcgatcgtcgatcccccgccgggcaagagcgggatcgtccgcgacgccgctctgcggcggcgactccgcgcctgcctcgaagaggcgggcctggaccccgacaacttctccgccggccaggtcaagaaactctacgaagcgggcgggttccgccaggcgtcgggcgttcccattcactccgtcgtcctcctgcggaccatgaacgatcccgtcgtcatcgaccgcaagcgcccagactacgcatcgggacggatgcgccgcgacgacgatccggcctcgaagcgtgcgtacgtcggcggcaacaaccatcacgtcgagatccgcgtcgacgacaacggcaactggacgggcgagatcgtctcggccttcgaggccgcccagcggaaactcgcaaggctgcgtgccctgcgcgaagcccgaatccccaagccagacgagttccgcaaactccccaaggccgagcggcgcgcgctctcgcccgtgctgcgtgccgtcgaggaggcgcacccgatcgtggaccgacgcgacgacgacgccaggggcggccgtttcgtcatgagtctcgccgagggcgagatgctgcacatgaagcacaaggggaccggcgaggttggctacttcgtcgtcgccaagctcgacaagccccgcaccgtcgttctcgtgccgcactgggacgcgagagctgccaccgagcggaaggatgccgagggcaacaaggtccccgattcgaagcgcgagcagttctcggtcacgccgtccgacctcaaagccctcgccccccccggccgcgaccacgctgtcaaggtccgggtcagccccctcggcgtcgtcaccatcctcgaaaaggattgatccggcccccccgatccgttccaatgtcgtcgggaggcgtgcgtgatccgccgaaccgtcgagatcagccgcgagccgtgccacctcgccgtccgtgacggccagttgctgatcctccgccgcgaggagcctccccgccgcctccccgcgcaccccctcaatcttgccgcgtcgatcccacttgaggacctcggtgtcctcatggtggacgagcgggagacgacctacacgcactccgtccttgcccagcttgccgagcacggcactgccctagtcgtctgcggccgcgaccacgcgccgtgcggcatgttcctgccgctctcgacgaacacgaacatcctgtcgcggcttgacgcccaactggccgccagcaggccggtccgcaagcggctctggtcggcgatcgtcgcggcgaagatccgggcgcaggccgcgaacctgccgcacgcacctgctgtccgctcgcggcttctctcgctggcgcgacgcgttcgcagcggcgaccccgacaacaccgaggcccacgcggctcggctctactggccggccatgttcaacgacctgcgggcggtcacgccgcccttccgccgccgaccgggcgcgccggacgcacagccgcccaacaacctgctggactacgggtacgccgccctgcgtgccgccgtggccagggcgatcgtctccgccgggctgctgcccgcgctcgggattcgccaccaccatcgagccaaccccttctgccttgccgacgatctggtcgaaccgctccggccgctcgtggacgcccgggccaggacgctcgcggccgagggccggctctggctcgaccagccgacgaaggccgaactcctcctgctcctcaccgcgaccgttcggatgggcgaccgctcggggccgctccaggtggcggcgacggcctacgccgcgtcgttcgcgcgggcgttggagggtggaccggacctgcttgagatccccgtgcgtgaggaccagtgcccggcaggaggcgcgggggtggccccggcggacaagggcggcgatgaggcggacgacggatgcatctgagcgggtaccggttcatgtgggtcgtggcgatgttcgatctgccggtggactcgaagcaggcgcgacgccggtacgcccggttccgcaaggccctcctcaaggacggcttcgccatgatgcagttcagcgtctacatccggcactgcgccagccgggagaacgccgaggtccacatgggccgggtccaggccgccgtgcctccggacggggaagtccgggtgctgacgatcacggacaagcagttcgagcggatgcgcgttttctggggcaaagtccgacagccccccgagccggcgcccgcccaactggagcttttctgatggccgttcgcgcgcaaacccagtccgggcaaaggtttagggcgggtctagtgtaatcgatcccagcccgcgagcaacccgcaacgcgagtcgacaggctgtcaacagcctttcagtgtaatcgatcccagcccgcgagcaacccgcaacaatccacgaatcaaagccggatgcgccgggagtgtaatcgatcccagcccgcgagcaacccgcaactgaacgccatcgtcgcactcctgccctctcagtgtaatcgatcccagcccgcgagcaacccgcaacag

SEQ ID NO: 536 - DNA, 15658 bp, synthetic construct
  misc_feature 1..15658: note = Synthetic
  source 1..15658: mol_type = other DNA
tgctcaagcccatctcgatgcgggccgccaagatgcagaaggccacgctcgacccgctcaagatctccggccggtgcgggcggctcatgtgctgcctgcgctacgaggaccagacctatcagcagttgaagaagaacctgccgcatcgcaagacgcgcgtgggaacgcccgaaggcccgggaatcgtgctggattccaagattctcgcgcaactggtgcttgtgcaactggagcacaacggcgaggagatcgccgtgccggtggaggagctctctgatcccgagacttgcccgcggcccagtgagggcggggcgaggcgcttcgcccgcgtcgaacccgaggatccacttcgcggcatgaccgaggacgaggtggaggaacgggtctccgggagcggcgccggagagcgtcgaggcagcgaggaacgctcccgtcgcggcgatgatcgacgacgcgatcgcggcccgcgcgatgatcggggcgccgcgcggccggatggcggtgaggcgcgaggcggggagccgcgaccgtcccgagccgaccggcaggatcgttaccgccagcggagccagcggcttgagcgggaacagccgacatcgccttccgagtcatcatccgaggatgcgctccgttcagacgagacagtgtccgctcgacagcccgaggtcgatcagcccgcggaccatcggttggaggacggcgccgccgcgtcgggcgaaggcgtccagcgacgccgggagcgcgggcgtcgccgtcgccgtcgcgggcggggcgaacgccctgatggggagcgaggcatgacggccggtcctgactcgggcgtcggatcggatcgcccggctgcgccggagggcggcggtgaccccggcgtcgaagatgggggcggttccggcgccggagaagggcgacaaggcggtccgcgccgccgtcgcaggcgtcgtcgtcgcggcgggggcgggcgcggaccggatggcacatgacgatgaggacgtgcgactaccgggtcaacgcgctggaatccttcacgcccagcgtctcgtagatgcgcttggtggcgctggacctgttgagcgtgtagaagtgaatgccgcgcacgccttcgtccagcaggtcgcggcattgctcggtggcccagtggacgccgacgcgctcgacggcgtcgggatcgtcctgggcgcggaggagcatcttctgaagccgcgccgggaagttggcgccgcccgccaggtccgccatgcgcttcatgcccgcgatggaggtgatgggcatgatgcccgcgatgagcggcgccgtgatgcccgccagttcgcagcgctcgcgccagtcgaagaacgcgcggttgtcgaagaagagttgcgtgacgatgtagtccgccccggcgtcgaccttggccttgagaaagtccatttcgcggagccggttgggggtatcggggtgcccctccgggaagcccgccacgccgatgccgaacccgcgccggtcggggtgacggccagattcgttgaagagccggatatgacgcaccaggtcggcggcgtgacgaaaatcggcggtgtcatggcgatagtcgggccggtcgcgcggcggatcgccgcgaagggcgaggatgttgctgatgcccgcctcggcgtgccgggccaggatggcgtccacgtcggccggcgcgtggcagacgcaggtgaggtgcgggatcgggtcgagcgtcgtctcacgccgcagccggacgaccaggtcgtgcgtccgctggcgcgttgagccgcccgcgccatacgtcaccgacacgaaagagggagccagggcctcgaaatccgcgatgcggccgaacagcgcctcccacccgtcctcggtggcgggggggaagaactcgaaactgatcgtcgtgcgatgcctcgcgaagatgtcggcgatgtgcatttcggtatgatacgtcccgccgcgtgattcgacgccgccctgaatcgaccccgcatgagttaccgcgccaaagttcccaagccgaccgtcaagcgcctgtcgttgtacctgcgcgagctcgagcatcgggtggagcagaagcagccgaccatcagcagtcggcaactgggcgatgccctgggtctcaccgatgctcaggtgcgcaaggacctggcctatttcggacagttcgggcaccccggcatcgggtacgacgtgaccaacctggtggatcgcctgcggaagattctgggcacggatcgcacgtggaacacggcgctgatcggcgccggaaacctcggacgcgccctgatggcctatggcgggtggcagcagcgcggcttcgacatcgtggccgtgttcgaccagaaccccgatctcgtcggtcagtggctcgagaatcaccgaattcggcccatgtcggatctggccatgctggtgaaggagcgcgacatccggctggccatgatcgccgtgcccgccgaccgggcgcaggaggtggcagaccgtctcatcgccgccggggttcgcggcattctcaactttgcgccccgtcggctggacgtgcatcaggcggtgagcatctccagcgtcgatctggcgctgtcgcttgagcagctggccttccaggtgtcgctgggtctgctgggttcgctggatgaggacgatgactgatcgcgccgcgccgccattccgcgtgggacatgggtatgacctgcatcggctggagccgacggctccccggggacgaggccgcccgtttgtgctgggcggcgtggcgtttcccgatcatccgaccggtccggcagcgcactccgacggtgacgccctgcttcacgcgattaccgacgccattctgggcgccttgggcgagccggacatcggacggctctttcccgacaacgaccccgtcaacgcgggacgcgactcggcggacttcctgcgcgaggcggttcgccgcatgcgagcggcggcgtacgaactgggcaacctcgacgccacggtgatctgcgagaagccgaagatcggccctcgtcgcgacgccatcgtggagaacctggccgcgctgatcggatgcgatcgatcacgcctcaacgtcaagggcaagacgcacgagcaggtggacgcggtgggggaaggccgggcggtggaggtgcatgtcgccgcgctgttgatccgcttggggtcaacacagggtgacacgcggcgacacggaggatgaggagcgttgcgactcggtgaggaaacagccgaccagtggactggtggtgttgttgaagtcgttcgatatcagcccgcgtgaatgatcacgatgtccgacaggagcagcgcgggcgacagtcgagttcatccgcgcccgctccgtgcttcgttcacgtccccggtggtgaacctaatccaggtacacgaactcgttcaggttcagcagcatcagggcgagatacttcatcgcctgctcgggcgtctgggcatcgaccgtccgcagctcttcaagcagcgacaggcattcgcgcagatcatccgggtgcgggtcgcggctggtgagcagccggaaggcgtgacggatctgcgcggcgtggtctccgcccgcctcgcgttccagccgccgggcgaacagttccgcctgctcctgcatgaactcgccgttgagcagggtgagcgcctgcgtgggctgtgtcgtgacgaagcgcacgtcgcaggagttgtcggtatccgccatatcgaagctgacgagcagcggcatgagcagcgagcgcttgatgtggatgtagatggtgcgccgggcggcctgtcgcggatcggagcgtccccacgcctggtcggggcgcgaggccgtctggagcacctcgcgcggcatgggcgggtaaacgctggggccgcccatttcgaggttgagcgtgccgctcatcgccagcaccgagtcgcgcagttcctccgcggtcagccgccgcatgttgaagcgcgtgaagaggttgttctcggggtcggcttcaatcgcccttgcgtcgccgcgcgacgacatgcggtaggcgcttgacgtcatgatgagccggtgcatcgacttgatcgaccactggcgggcggtgaactcgctcgccagccagtcgaggagctccgggtgcgtgggcgcctcacccagccgcccgaagtcgttgggcgtgcgcacgatgccccggccgaagtgatgctgccacagccggttggccatcacgcgggccgtgagcgggttttccgggctggcgatccaccgcgccagggtcaggcggcggcctgatgtttccgcgctgtcgggccgcgtatcgatgggacgcgggggggcggcggtggaggacgtcgcggggggagtggggggagtggggggagtgggggggtcggggaagccgaggatcgacgggtagccgggcgtgaccttctcgccgatcgaatgcacgttgccgcgctgacgcacgaatgaatcgggcgggttcgccccctgctccatgacgcagagcacctcggtcgtctctcgcaccggcttgcgcagcccgcgcaggtcggtcagcacttcctggtagcggcggtgctcctcctcgcccagggcggctcgaacgcgatcggcgaaggcgggagagaacccctcgccgtacgtcagcgacaggatctcgtgctcgctgagcgcccgcgcatagaggcgcacatcgtccagatcgccccggaagtggttgtagcccggcatcatgcgtccgatgtcgagatgcgccggggcgtcaagcggcctggtcgagcccttcgcctgcgccaccggctcgccgtccacgaacagccggatcaggccgctcgaacgctcgcgcgtgaaggccacgtgatgccacagcccgtcgttgtagccgggcggggaatgaatgaacgtctccggctcgcccgttcccgcggtgatgcgcccatcggagtgatacgagacgccgaagtcgcgcacgatgccgcgcacctcgccatccaccagccccgcgccgaggaaccagcgatagtcattgccgcccggtcccgtgccggtggtgcgcagccagaaggcgatggtgaagtcatcctgcaccggacggacgatgcggatgaaatcgcgccgcccgtcaaacgctcgcgctgctccgtggcgaccatcggcggcgactgcggtaccccgcatctccgcctgcatggccgtcatggcatggcggaatcgggcatcgtctgtctcatcaaacgaaagatgaacgacgggaccagccgcggcgtcgcccgctccacctgggagatgcccggggtgagggctcttcgcctccgcggccagcgtgttggcgcgaatctcctccagccgcgacaccagccgatcgcgccgctgcgcgtagtccaccagtcgatggtgaaactccgaactgcccaggtccaccggcacgctgcgcaggtagttctccgggttcacgctgttgccggggttgaccttgtacggcttgatgttctcgaagaacgccaggaagcggtagtagtcgcgctgggggatcggatctttcttgtgatcgtggcagcgggcgcagccgatggtcatgcccagcatcgcctgcgccgtggtggagatgacgccatcgaggtcgtcgtactgcgcctgcttgacgtccgtgggctcatcgtcccagatacccagccggtagtacccggtggcggtcagggtgtccacggtggcgtcgggcagttcatcgcccgcgagctgctcgatgatgaagcggtcatacggcttgtcggagttgaaggcccgcaccacgtagtcgcggtacttccacgccatgggcttgggccggtcgcgttcgaaggaatccgtctcggcgtagcgcacgatgtcgagccagtgacgtccccacttttcgccgtaatgaggcgactcaagcagccggtcgatgagtcgctcccatgcgtccggtgcatcgtccgccacgaaggcggccacttcctccggcgtcggcggcagacccagcaggtcgtagtacgcccggcgaatgagggtgaccttgtccgcctcagccgcgggcgacaggccctgctgctcgatccgcgacagaatgaacgcgtcgatggggttggcgacccaggcgtcatcgttgacagtgggcacgtccggccgggtgagcggtcgatacgaccaccagccaccgtcgcggctctccccgggcgaacctgccggcgcgaccgccaatccgaacccgagagccagcgcggccgcgctgcccaacgtgatgaaatgaagcgtgcgtctcacgcttacagcataccgcacgatggcggccgcgcacaccgcaatccgctcattcgaacctcaggtgaacagggcgacatggccgccggaaatggctcagtcccccgcgttgatccgcttcgtcttcttcatacccacggggtcgaagacctcgacctgaccctcgccgttctcggtgacgcccagcttgaccagttccttttcgttgtcgttgaaggtcgtgagcagaccaaacccgccggtggtgacgcccagacgcacgatcgtcttgccgtccttgttcatggtcttgaagagcccgtgacccccggtcgagacgccgatctcggcgagttcctttccttcgccgttgtaggtggtgacgacgccttcgccgccctcggccacgcccagagcgaccaattcctcatccttgccgttgaccgtggccagatagccctcaccgtcggcggtggcggtgaggttgatgatcattccgccgtcgcggttgaaggtcttggcggtgccatgcccgccgggtgtggccccgacccgaaagaccgggttctccttgccgttgaacacggtgatggtgccggagactccctcgttgcggccgtaggtgtcttcgagcttcagcaggatcgtgccatcctctctcaccaggtggaacgccctggccttgatcacatccggcgccggctgcggctggcgggcaagacccagcagcccgccgaccagcaaggccaaccccgccacgccgagaccggctctgagggaacgattctggcgctccaggcgatcgatgcgggcttcgagggtcatggcgggcatgtgcggctccttgtgggtggttggaagaaatcgctgtggagatgggttggcacgcaggcgccggtgcgtcatcactgacagagaagtcgattcgagacccaagaaccagcttcaccctcggaatgccggcgaagcggtccatcgacgggcgacgccgccagtctctgcgtcccgggcgtcgcgcgacgacatggtaccggatggcgtcagccgttggaacgcggcgtgaccagcatcccacggtttgaaaccattccgctacactctccgcgggagtgtcagcacgcctggtggcggccacgggcttcaaacccggtgtggggctggttcagccggtcccgggtgggttcgattcccatccactcccgttgacgaggcgttgtgacggatcgcgtcactcgatgacttcgcgtgcgtttggtgcctgttttcaggcacttttgcgctgttcgacagtgaagcatcagcgtcagtcggcgacatccaacgaccacccgcgacccccggaagtgagcgcatttgtgagcgcatttcgggcgcgtcggccccgtccgtcccggttgcccgcagctccgaatcgatcattgcgtcgaaccgaggcagccgctcgattgcatccgtcaccggcagcaggtcggcatcggtgtacgtccgcatcgtcagcttcatgtcgctgtgacgcatggcggccatcgccacccgaggtccgaccttggcccggctcaggttcgtgccgaaggtgtggcgcaaggcgtggaaatccaccgacccccgatcaccatcctgaatcggaatctccgccgccgtgcagtcggcgtgcagttccgccacggaaggcacgccgcgcgggaatacacgatcggacgaagcggcatcggcgggcctgatggctcgcagcgcttccgccagatcatcgcgaatggcgatggccgcccgcctggcgttcttcgtcgtcgatgcacggacatcgaggaatggcgacggcgagtccagatgcacatcgccccactccagcgcctccaactcgctccggcgcaggccggtcacaagcgccgccaggtatgccgtgcgacgggggccagccacggcgagcagccgcacgcattcatccaccgtcagggcgcgacgtttccggcgctcacgtcccgcggtctgaacccgctcgaccgacgtcaacggattgcccgcgatcttcccctgtcggtgcagccaaccaagaagcccacgcgccgcgctcaggtactcgttgagggtcttggcgctcatcgtgtcgccctggcggcttcgccaggcgatgaaggactcggccgagacatcccgaagcagagaccagccgcactccttcatcagccgccggatgcgccacttgacgggctcgaagtactccttcgagcgcctgcgcgccttcacgtccgcgatgaagtcatccaggtgatccaccagcggacgtgcggcggcatcgcgttggactctgggggcgagaatgcccgccagctcgcgttctttctcgaccacgatctcccgcagacgggcctcggcgatccgccgatccgtcgtatgcagcgcgacgtcatccggcttcaccatgccgggcagcctgaatcgaccgcggtagttctcacgcgatctcgacgcccgcttgccgcgccgcctgggaacgtagacgtactcgatcatgatcgacgctcctccttcaatcgctcgatgtacgccgtgacctcggattgcggccatcgcgcgcaccgaccgacgtagaccggcttcgaaaacttgcactgcgcaaccagccgccataccccccgggcgcagatacccaatgacttcgccacctgtcgcacggaaagaagaagatcaagatgtggtctgtcgtccatgacgaatcaccagaaaatacgaatgagaatcaggcgggcttcggatgaacgccatccgcttcgccgcccttgttgtgctgcctcgccttgcctcgccgcgtctgttcacgcagccgctccgccttggccctcgccgcagtcaggtcgatatgctcgcccatcaccgccgagattgcgcggatgatctcgggacgcttcgacatggcgtcatagatggcccggaagaccggactttcgagttcgtggaggaactcctcctcctgtccgatctcattgcggcagaaccgctcgatgatcgcggagcgcgagtcgccgcgcttgtccgcggcatcgtcgatccgcttgaggagatcggcgtcgatggtgatgttgatggcggtctttcgggccatggtgctaccagcatacaccatatcataccattgtgtcaagtcgcctcttcaggccagaaccggtgagccagccggacaggcgacgggccgtggcggctcaggccgcgatctgaatgtgaacttcacgtccgatcgcggtcggcctcgggatcgggtcgccatcctccaggagcccttccaggtggaactcgatcgcctcccggatgttccgcagggtctcatcgaccgtcctgccggtggacacgcagccgggaaggtccggcacgtaggcactgaagttcgcccccgcattctcgatcacgacggcataggtcaactcgtgcttcttcatggcgatcacctggcgagtcccgcctgcttgcggatgctgttccatgtccccggcgacagatcatcgttcaggttgccgggcaccgtgaccttgcccggccgcgtcgggtgtttgaactgatgatggctgccccgcgtccgatgcaggcgccagccctcctgctcgatgagtcgaatcgcatccttgactttcatcagtgtagcccatcccggcgtgggtgcagtttgtcgctgttgttccgtgtgtccgacgcgatgggcgctgagctgtcaacccgaatcggtgatgaagtcagtcgcggttcctcggcccccgacaatagaaaagccgcaggtcggaggttgtccgggctgcggcggtcgccttgtgggcggtgcctgcgatttctcttgttgcgggaaagcgcgggctgagatcgggtacactgtcagcatcttccgttatccactttgtgctgtcaagggggtatcccatgattcgtctcggtttcgacattggctccaactcagtcggctccgcgtgggtggataccgccaccggccaactcatcaccggcacctcgatcttccccgccggggtcgatgaatccgacgagaagcgcggcgatccgaagaacgccaagcgacggacgacccgccgcacccgcatcacgctggcgcgccgctcccagcgcaaacgggaactgcggctgaaactcatcgaggtcgggctgctgccagtcgatcccgatacattcaaggccctgctggatcggactgatccgtgggaacttcgccgcaaggggctggaccacgctttgacaccccacgagttcggacgtgtgctgctgcacctggcgcagcgacgcggcgcgctggggctgaacatcccggatgagccggaggatggcgagtccgccgccgacgccgaggacggcaaggtcaaggccgcgatcggtgaggtccgtgcgaagatgcgggaacgaaatgcacgcaccttcggtgagttcatggccatggtccgggccgagcgtgtgacgccaattacgagcgaggatcgtcgcccgatatccaaacgcaaggggccgcgtctctaccgcggcgcgatccgaaacaaggcggccagttatgagcattgcgccgatcgggcgatgatccgtgccgaattcgccgcattgtgggacgcccagcgagcttgcaacccggagatgtcgcgggttctgaccgacgaccttcgcaccgttctcgatgatgagtccggcgactcggtctggcggcaccggggcctgttgttcggtcagcggcgccagtcttgggacttgggcacactcggtcgctgcgtccttgagccgaccgagcgatgcgctccccatgccgacatgtacgcctcacgctatcgcgtggtcgagacggtcaacaacctgaagatcatcgaacggggcagggagccgcggccactcacaccggaggaacgcgccaagatcaaggattatctcagcggcccgctcgggatggaaaagcccaccaagaagcgaccggacccgcgccccaagaccaccgtcagcgtgaccgaccttcggaatctcatggaatggggtcggtcctcgccgaccgctcaataccgcttcaacatcgagaacgatgaggatcgcgagatcaacaccgactggttcagccgcgagatcattcacggggcggtgacgcccgccacatggcggtcgatgccggagtccatccgcgaagggctgaatcgtgcgattctgaggcacgatccggaccaggacggcgatgccgagaaactccggcagggcgtcatgtcgtgggcgggtctcagtgaatcgcaggccaacgcacttgttgaggcgtggaagcggcgcccacggcttgattccaagcggctgaacatcagtcgccgcgcggtccgcaatctgctggccctcatggaccgtgacgagccgtggccggacccgcaccgacccgggcagaatcgctggctcacgcagatcgaagccaggaaactcatcgcggaggatgcggacttccgagacgtcacgacgggccttcctccagacgaacatgcccgccgccgctacgcgaccggcgcccgcggcagcaccgcccgcgaccgctactacatggcgaagcacatcctgatgaaggatggcaagccggtcatcggcccggacggccggccgctcgccgaaccaccgcctgcgccgctggtaagcaaccccgtggtccgcaaggcgatccacgaggtccgccgccacatcgtcgagtacatgatgaccttcaaccgacggcccgacgaggtctcgatcgaactgatgcgcgaggcgcgaatgggtgccaaggatgccgatcggctgctgttcaggaatcggcttcgcagtcgcatccgtaagaacatcgtcgaggagttcaatctcggcgggctgacatcgacgcagcagcgggctgccgttgatcgagtggtgctgtgcatgcagcagggtggggccagcgcaatctgtccgctctgcggcaaacatgacggcctgacgccacgcaacgccgcgcacggcaacggatgtgaagtggctcacatcattccccgagcaagcggtggtcacaacgggcttggaaatctggtgctggcgcacaccaagtgcaatcgcgagatggctcgacgcacgccgcgtcaatactggaacgagacggtttcaggcgggttcgaggaggcggtctcctgggtcgagaagatctacggaaacatcgaacgtccgaccctcaagggcaacaaggacgtgaagggcgacggcctctggtcctgctacttcaccaagcgtgacgacaccgccaagatcgagcagttcaagaaggacatcaaggacattcaggacatgaccgcccgtcaggacgccgccaccaagtatgcggctcgacaggtcatggcgtacatctccgatgcgatctttgacggcaaggggctgcccgagcgaagcactgccgccggcgcccccgacggcgaccgaaccatcttcgccaccgatggactctggaccagccgcttccgccgcgagtggggactgtactttgatccacacggcaaaagggccaaggaactttccgagagcgagaagcacgagcgacaggagaaggaccgcggcgatcatcgccaccacgccatcgacgcaatcgtcatcgcgctatgtgaccgacggatgcaggtaaaatgggagcgacgcgagaaggaggcggatcaggcgggcgtgaacacggcggatgaggagcagatggagaactaccgccgccaacacccacttcagccgcccgaaccgtaccgaacccgtgacgagttccgcgacgcggttcgacgtgccgtgtacggcgatacggatgtggctcggcccatctgccatcgcccagtcaagcggaagttgatcggcgcgctgcatgaagagacgctgtttggtccagtcttggacgccagcggcaatccaacatccagctacaccgccaggaagagcgtgctggcgctcacacccaatcaccttcgtgtccccgaaggatgggatgaactctcggttcaactcgacgatccgaacgttgccgaaagtcgcaggcgtgagattcgacggcggctcatcgaactcagccggaacgatccaccacccggcaagagcggcattgtccgcgatcgcacattgcgcgaccggctgcgcaagtgcctgcgatccgccgggcttgacccggatggcttcaccgccaatgagatcaaaaaggcggtggatgcgaaacaccttcagcacttgtcaggcgtccccattcgatccgtcgtgctgctgcgcaccatgactgatccggtcgttatcgatcggaagcgaccggatcacgccaccgggcgcatgatccgcgacgacgcccccgcctcccggcgcgcctacgtcgggggcaacaaccaccacatcgagattcgcgtctcacgggacaagaagaagcgtgaggtctggaccggcgtcatcgtgtccgccttcgacgcagcccagcggaaactcgagaaactccgggccttccgccaggcgggaatcccgaagccgacggcgttccgcgccttgagtcagcccgaacgtgatcggttgtctccgattctgcgttcgatcgaactcgcgcacccgatcgttgatcgtcgtgatgatgattcaaagggtggctgtttcgtcatgtcgctgtgtgaaggcgaaatgctcttcatgaagcacaaggaacgtgatgaactcggctacttcgtggtcgccaaactcgacaagccgaatcggattatcgtcgttccccactgggacgctcgcgccgcaggcgaacgcaaggatgccgagggcaacaaggtgccggattccaagcgtgaatccattgcactcaccccaagcgatctgctcaccctggccccgccatgctaccccacgcgcagcggcaagccgccgactcgcccaggcggatcaccatggccggacgctccgcctcatgccctcaaggtccgtgtgagcgccttgggcgttgtaacggttcttgaccgcgattgagcacgccggaatcactgcattcggatcaagtccgcctcgccagtcgccgatgacgcgccagcgcggctgtcgcgcgcggttccgggggtcggtcatgatcaagcgcaccgtcgagatttcccagaagccagcccacctgtcggttcgcctcgaccagttgctcatccagccgcacgatgtccccgagggcgtcgggacaagctcgatcccctgtgaagacctgggcatcctggtggtcgatcacggccagtgcacctattcgcatcatgccctggctcgcatcgcggagcatggcggcgttctcgtggtgtgcggccgggatcacctgcccgcggcggtgctgctgccgctggcggatcacaacgaggtcgtctggcgaatcaacgaccagctgggcgtctcccgtccgttgcgaaagcaactctggcggcagatcgtgcaggccaagattcgcgcccaggccgggaatctcccgcgtggtgatacgcgctcgcgcctgttggaaatggcccgcgacgtgcgctcgggcgacccgaccaacatggaggcccaggcggccaaggtctactggtccgcctggctggcggcggaggcgatcgggggcgtcgcccgcaagacggagaagtgtcagccgacagggatggacgcccagcgattccgacgcgacccggacgggaccgacccgctcaacgtgatgctgaactacggctacgcggtgctgcgggccagcgtggcgcgggcgatcatcggggccgggctgctgcccgccatcggcatccaccattccagccgctccaatccgttctgcctggcggatgacctggtggagccgctgcggccgatcgtcgatcgccgggtccgtcagctgtatgtgatccatggccgccgcgaactcaaccagcccaccaaggcgggcatcctgcaggtgctgggtgagccggtcgccactgggggtgaaaccgggccgctcatggtcgccatccagcggatggtcgtgtcgttcctcaagtgcctgcgtgacgtgacggatgggctgagcgtgccaatgctgccgccgatcgaggagtgcgaggccccatgatcatcagcgggtaccggtgcatgtgggtcgtgacgatgttcgatcttccggtggacaccaaggcggcccgtcgccagtacgccctgtttcggaagttcctgctgcaggacggctttgccaagatgcagttttcggtgtatatccgccactgcgccagtgaggagaacgccgatgtccacatccagcgggtgcagaaacacatcccgccggacggcgaggtccgcatcatcacaatcacggacaagcagttcgagcggatgcgtgttttctggggaaaacggcgcaccgcccccgaacaggccccgaagcagctggaacttttctagcggtgtttcctgggtaactccttttctggcagtcggttgggcgcgaggtagtgtacctgatctcagcccgcgaccaatccgcgacag

SEQ ID NO: 537 - DNA, 14493 bp, synthetic construct
  misc_feature 1..14493: note = Synthetic
  source 1..14493: mol_type = other DNA
cgtgaagttcaccgcgtccgcgacgatctcggggcgcgacgccgcgaggccgacgccgagcagccccatcgcgatcaggagttgccaggcgttgatgaagtcgcgcggctggaggagcgtctgcacgggcagcacgctggcgacgaagatataaacaagaagcaggagcggccagaacgcgaccggcgagatgacggccgtaagcgcggccgggagcatcgcgacgccctcggcgttgtccggcgtcgcccacgggatggaggccgaccacgcgatcgtgccgtacatgagtccgacggcgatgagcgtgccgaggatgaggttgccgccgcgacgcacccacagccccagaccgacggcgatggggatctgcgtccagaccgggatgacgctcgatggatataacttgaagaccgtcgcgatgaccaggccgaagaccgccagcacgatccacagcccgaccaccacaaccagaaggaagagcagccgcacgcgggcgttcacgaccgtgcccgcgaggtccgcgatcgttcgcccgcggttgcgcatggagacgatcagcgagccgaagtcgtggacggctcccatgacgatcgaccccacgagcacccagaccagcgcgggcacccacccccagaccactgcgatcgccgggccgacgatcgggccggtgccggcgatgctggtgaagtggtggccgaaaacgatgtcgcggtggctgggaacatagtcgatgccgtcgttgagctcgaccgaaggggcggtccgctccggctcgacccggaagatgcgtcgggcgaggtagcggccgtaggtgtggtacgccacgagatagagaacaaacgccccggccgcgatgatgacggtggccatcgggaactccggggtcggccgccgggtctcccctgacgcagccgcccggtcgccatgatactggcgggaaggggctttgcgcggcagtccggagcggttagactcaagggattccgcccggtactcactcaccccccactcaccccgacgcgcatccccactcacacatgccgccacacctgttgaatcgtgcggggccgaggagcgtggcactcgaaaccacgctgctggcgcacggggtgccgcgcggcgaggggctggacctcgccgaacggctcgccgagatcgtccgcgagcagggtgcggagccggcgttcgtcggtgtctatgcgggcgtgccgactgtcggcctcaccgatgccgagttgtccgaactcctcgccgccgacgacgtgccgaaactgaacacgggcaacctcggcctcgccctgcaccgcggaacgcacggcgcaaccaccgtgagcacgacgctcgaactggcggcggccgcgggtgtgcgagtcttcgccaccggcggcatcggcggtgtgcaccacgggtaccacatgctgcccgacgtatcgtctgacctgcacgcgctcgcacgccatcctgtcgccgtcgtggcgagcggtgtcaagtccatcctcgacgtgcccgccacgcgcgaagtgctcgaaacgctcggcgtgcccgtcgtcgggtacggaacggaccgcttccccgcgttctacatgcgcgacggcggcacgagcgtggacgggcgattcgactcggaggacgatctcgccgcgttcctggtcgcggagttgccccgacgcgcgtgcgccgtgctcgtctgcaaccccgtgccgaccgaactggagatcgcccggtccgactggacacgctggatggccgcggcgcagaaacgggcggctggcgcgggcggccgctccctgacgcctctcatgctcgaagcactccacgtggtctccgacggagcaacactccgggcaaaccttgggctggtcgagtcgaatgcccgtctcgccggtgccttggcctcgcgcatcggcttgccgagcaaagccttgggaacttgggcaagccaggtttgaccgaatcttggcgggattccggccgcgcaaaatttgtccgttttggtgcgttcgctaccatgcgcggcacttgaccgcctggcctcgggcgggggcacgctgcctctcccgatcggcctgatgcagtcttcgtaccgggtcgttgggggagatcgagagacccgccgaccccgctcgcacaaatgcccgctgccgcgccgagcgtcggcgcacgcggacggaccagaacggcacacacgaacgaaggagccagaagtcatgaccacggcgaaacggatcgccaccgtcgttgcggcctgcgggatcgcgggcgcggcgtgcgctcaggacagcatctccaagcacaaggctcttcccggcgacgcgccgggcgcatgggaaaccgccgaaacctgcaacaacttcgtcgtcgatctcgtggacctcagcggctcgtggggcacgaagttcaaggcaggcccgctcctcaagtcgcacaaggcccaggccaacttcttcaacaacctgctcagttcgcaggcgatcagccgcgacctgcgcacggtgaccggcttccccgccggttcgtacgcggtctggacgcagccgggccagggggtgcacggcgtcaacaacgatgcaccgggcagcaccagcccgaccggcgagagcttccagttcgccgccgccttcgccgagttcggcagcacctacaacggcatctcctcggccgtggtgaactacaagggcgacgatccggctcggctgtacgtcaaggccgtccacgccgcctcgaacgggacgttcgatggcgcgaacctgtcgcagttcggcctcggcgccatcgacgcccacggcaacgtcgccttccgcggcgacggcgtcggcacctccggtgcgactcgtctcaccggcaacaacctcttccgggtctcctcgctcgcacgcacgtgcggcgtcctgaacgtcatcgacagcaacggcggttccgacgcaggcacgaccgcccacctgctcgtgaactccgccgacacctacagcacgccgggcgtcatcccgcagagcgtcgccggtcggcctctgctcatcggcgccaacttcgtccagcagtatgtgtacgagtccgccgcgggcatcctctcgttcacgtcctcgcacctccagggcgctcccgaccaccggggcacggtcggctattccacgcgttcgtggttcaatatcccggggtccgcgggaaccgccggattcctggtgcagagcgcggccagccgcaccgagtccctctccatccacaacgtggatgccaacggcaacccgctcctcccgggcgtcgtgctgctgaaccccgcttcgcgcaccggaggcgcttccgtcaccgacaacgacgacggtttcaccatcacctcggcgggcgactggctgtggggcaacacccagagccaagtgcccttccgcggcggcacgggccaggtcgccctcaccgtggacgcccagggcaacaggctcgccgccgcgcaggcctacgacaacgtcaccggcggcatgcccgacacgccgaccaacgccatcatcgtcgccaggttcaacccctcgaccggtcagacccagtggacgctcgccgcgtacttcgacgccatcgcggccaagggcaaggtgatcaaggacggcccgggcggcaacgctgtcggccgcctcgccgggctgtacgaggtcaccggcggttcgccgctcggtccctcgatctcgtcgccctccttcgactgcgccggcaacatctacttcatcgccgcggccgaaatctacggctcgtccggctccgacttcgatgtctgtctcgtccgggccgtttacgatcccgcctccttcaagtacgagcttgaactcctgatgacgaccggggacatcttcgtcggcgcgaactccgcgacgccctacatgatcaccttcctttcgatcgccgacagcaactccatcgattcctccaccatctactccagcaccgtcatggaggactgctggggcgcgatctcgcccgccgacctcgacggcacgaccgacccgcgcgccctcggcggcctgatcgtcaacgcccgcgtcacctacgacagcaacggcgacgggaacttcgacaacaccaacgacgagaactaccgcgtcgccttcttcatcggcgcgggcgcggaagtcgccgatgcctgccccgtggactgcaacggcgacaccgtcgtcaactccctcgacttcatctgcttcctcaacctctacgtcgtccaggatcccagggcggacttcaacggcgacaccgtcgtcaactccctcgacttcatcgccttcctcaacgcctacgtcgccggctgcccgtgatccggcgcggcccgaacgaccgacgcaagcccccgtcgaaaggtgggggttcgtctttgctcaacacaccgtatgatcgcccgtgtcgaggctcgcgcgggggacggagcgtcgtgatgcgcagacggatggcgttcgtgctgggtctggccctgttctctccgtgcgccctcgggcagtgggatccgaacaacggccagtggcgtaagtccgacccgacccacgtgcgcgtgatgacctggaacgtccgcgacggcatctgctccacttccgatcgcaagaaggagcagcacggcaactggcacgcgctcgtgtgcatcgtcgcctcgctccggcccgacgtgctcatcctccaggaaacgggcgacaacagcggcaacggcaccggctcgggcgttgactccgtcgccgcgctcaccaccaccctcggtctgttcatgtacggcggcgcggacccgttcgtcggcgggcaggtcacgtcctacgtccagaagtacgccccggacttcgacctgccccacgtcttcgtcagctccatcaccgacggtttcaaccgcaacgtcatcctcagccggttccccttcgcggacctgaacggcgacggcaagtccctctatgccgacatcgccttcaagcaggcggacgggtgctcgaacgcaggcaccggcggcatccgcgggttccagcacgccgagatcgacctccccgacggcgtctacgcgggcgaccttgtcatcggcaacagccacctcaagtccggcagcacccagaacgacgtcgaggaccgagccgtcgcggcggacaaggccgcgtattacatctactactggtacgccggcgcgggcacgggcaccccggacccgaacaacaagatctccgacagcccgcccgcaaccagcgtgctttcctcgaacactcccgtcatctggggcggcgattggaacgaggacgaaactaagaacggcgcgtaccgaggccccgccgcacgcatggtgcagggctgctccgccggagggtccgacggcaccgaccgcgacaccaccgacgcgacctacgacgacgcggccgagttcttcagcgggaacaggagcaccttctccaccagcaaactcgactacatcgcgtggtgggacagcgtggccacgcccgcgcggatggtgatcttcaactcgtccccgatcccgagcggcaagcaccctcccgaactcctcaactatcccaaccccgtcctcgccagcggcgcggcctcggaccacaggcctgtcatcgtcgatttcatccttcccctcgccgcccaggatgaaccccgcgcgttcgtgcttctctcgccggaggacggcgcgaacgacgagccgctccggccgacgttctcctggtccgattcattcggcgcgacgagttactcgctcaccatcgcggaggatgccggtctcggcgacgtgatcttctcagcgtccggcatcggcggcacgagttatcttctcccggcgggcgtgctcgaccattcgacccagtaccactggggcgtgacggcccacaactccgcgggcgacaccggctcgacgcccttctcacgctccttcaccaccgagccggttccgccgcccggtccgttcctgctccagttcccaggcaacggcgcgaccggcatctcgcggcttgcgatcctgagctggaacacctcgtcgaacgctgaaacgtacaccgttcgggtcgccaccgatcccgccatgacgaaccttatcgtgagcgcggccggattggccgagacaacgtaccagttgcagccgggccagctccagccctgcaccacgtactactggggcgtcaccgcgttcaacggctccggggatcgagactcgacgccctacccctcggcgttcgagacgcacggcatcgccgacatgaacggcgacggcacgtacgacaccctcgacttcctcgtcttcctgaacttcttcgccggcggccaccccgaggccgacctcaacctcgacggcaaggtggacacgctcgacttcctcttcttcctgaacaactggaccgcgggctgctgagcgcgctcacgccgcgcctcgctgcccgcggagcagcacgatcagcgcggggccgccgatgatggcggtcagcacgcccagcggcatgcgcccgcccccgaggtcgatgagcgcgatcgcggcgtcgcccgcgacgatcatcgccgcccccgcgagcgcggaaccgatgacgagggttcgatggcccggcccggccgcaagacgcaccacgtgcgggcagaccagcccgacaaagccgatcggccccgcgaggtacaccgacgccgccgccagcacgcccgacgcggtgaagagcgcgagccgcagcgcacccagcggcacgcccatcgtgcgggcctcgtcgtcgctcgcgctcgcggcgtccatcgccggccccccccacgcgccgagcgcgaccgcggcgagcgcgaccgcgccggtggcgatcaccgacgcgcggctcacgtcgtcgctgatcgccccgacgagccaccggcccgtcgcctggccgcggtccggcagcaggtactggacgaacatcgtgccgcccgcgcacatcacgccgacgatcacgccgacgaggatcagcgagaccggttggatgacgccgcgccgctggccgagcgcatagaccaccgcgagcgcgagcagcgcacccgccagcgcggccggcgcctgggccagactctggtgcgcgacgccgtgcccggcgaggaaccccgcgtagacggcgaccatcgcgccgaggcccgccccggacgcaagcccgagcagatcgggcgaggcgagcgggttgcgcagcagcgactggagcagcacgcccgcgacggcgagcgacgcccccaccaccacgccgcacgccgcccggtccagccgcagcgaccagacggcctcggaatccggccaggccagcccggtcgatccggcgccgaggcggaaagcgagcgccgcgagcgcgagcgccgcgagcaccgcgagcgttgcccattgtcggggtcgcatgacaggtggagggtatcgaccggcggacgcgggcggggtctatcatggcgacccggcgtcgagaccccgccgggagacccagaccgaacggagatgcgcgtgtccaacaccttcacctgccgcctcgtgacgccgacgcagaaactcgtcgacgaggccgtgacctacgcctccgtccctgcctgggacggcctgttcggcgtcctgccgcggcgcgccccgctcatggcgcggctcggcctgggcgaactctcgctcaccttcccgcagtccgggtccgccgcgggcggaagccggtcctacctcgtcgacggagggttcgtgcagatggcgggcgacacgctcacggtcctcgccgaccgggcgatcccgaccgagacgctcaccgaggccgaggcccaggccgaactcgccgaggccgaagcgcggaccgtccccgccgacgcccccgaccgcgaggcccagttgcagcgcctccgcgccgacaaggcccgtgcccgtctcaaactgcgcctggcccaggccgcccgcggtcgcggcatctaagcccggcggcgacgtgacgcgatgagggcaacccacgcgaacggcgcgatgacacccggcgcggggatcggtcgaacccggaactggctctcgatgcaggcattgccggtgccgtgcgaccacgggaagtggccgaacgtcgtgttccctcccgcctgctccgagaacgactcccagtgcaggatgtacgaccccgggttgaggatcccgctgaacgggatcgtctcgctccagtttcccacgcccatgatcgagtgccggaactcgttgacaaggtacgttccgcccgacacgtcgaacagcgactgctccgcccagacctggctgaacgacccgttggcgtccgacaccccgccccagcccaggtcccactcccagatcatcggcgtcgagaccgtgaagtggatggtcgaacgcgcgagcgcatccgcgttctcccacgtgttggggccgatgttcgaggcgtacacggcggccgacgtgcaggccgtgagatcgacctgattgaacgtgccgaagatgcccgggctggatgggccgtaagccgcgccgtccttcgcccacgcgttcccctcgaacccgttgtgaaagagccatcgatcctcgtagagcagcacgtcgttgccggagaagtccgtctgtagcccgttgttgttcgtcgagttcacctccatgaccacctgggcgcggtgctcggcgtaggtcagcgtggcctgcccgtgcgcggccccggcgacgagggcgagggcggcgagcgcggctgggcgtccggcgatggtgagcggctgcatggtcgttggtcctccgagtgatggttgcgatgggcggccgatccgcccgcgaaggacttggcgcggggagagcggatccatcacctccgacctctcccgcgcacgaaaacgccgggggccgcccccgggcttggagaaccccggattgtgtgatcgtcaggcggccagcgcgaggccctgctgcccgctctgctgcccgctctgggcggcgaagggaacgacgaactgctcgccgggttcgccggaggcgtcgccccggaagggcgtcacgatgtaggtggcctggagcgtgccggcggggatggactcgtcggtgaaggacttgagcccggtggtgccgaggaggcggaaggcctgctcgccgtcgagtcggcgttcgatcttgaagtacgcgccggtgctgttggcggcgttgtcggccttccagcggatgtcgacgaagccgcggttgttgatggtggtcacgaagtcggtcggcgtcccgggggggccgaggggggagggcgcggcgggcgggggcacgtcggcctcggcgtagacggtcgggtcgttggtggtctcggcgtaggccttgatggtcttgatgaggtccgcgccgtagtcgcggaggctgccggcggcgtcggtgagcaggacggtcttgctcttgctctcgttgcgcgcggcctgggcgttctgataggccgtacgtgccgcggcggtgcgtgtcatcagttgcgtgacctgcgggagcgtgaggccgatggcggatgggttggcggtccagacggggatgcgctgctcgaaccactcgatcatgcggatggttgagttggggaggacggccatggatcgctcctttctttgcgttgcaccgtgagcgtgatcgcacgcgcgggcatgtatgttccccggcacgcgccgggacgaaggagcgtcggcacgatgcggaaggggctttggggaagttcggaagttttgttgcgaacgttgtgcggtccgcccgcgcagccgctcgggcggcgcgggggatcgtgcgtgccatgcagaaggaaggaacgcggagatcgcggagcgggagaggaggtgagcatggggtcggggaaccgggtggaaatcccggcgtccccgtgcggggcgtccgtcacggccgcttcttcacaggctcgcttcaggcggcgaaggccagagggtagggcggcgcaaaaaagagccgcaggccgggggtgcgggctgcggcggtcgcctgtcggcggtgcctgcgatttctcttgttgcgtgaaaccgcgggctgggatcgattacactgcccgcatcctaaccggagacggtggggccgtcaagggggttgatgatggcggtgcttggcttcgacatcggctcgaactcggtcggctcggtctggatcgaacgcaaggcaggcaccatcactcccggcgtctcggtcttcccggcgggcgtcgacgagaccgacgacaagcgcggcgatcccaagaacgcgaagcggcggatgacccggcggacgcgcatcacgctggcgcggcggtcgcagcgcaagcgtgaactgcggctcaaactgatcgaggccgggctgctcccgccgagcgaggccgagtttcgccgcctccttgaggaaacggacccttgggagctgcgccgcaggggactgggtgagccgctcagcccgttcgagttcgggcgcgtgttgctgcatctggcccaaaggcgcggtgcgctcggcttgcacgtccccgagccgggcgaggaagaagacgctgacgaagcggcatcggaagacgggaaggtcaaggccgcgatcggtgcggtgcgcgccaagatgctggagagcaaggctcgcacgttcggcgagttcatcgcgatggtgcgcgccgagcgggtgactcccatcacttcgaaggacgtgcgtcccgatgggcaccggaaagggccgcgcgagtggcgggaggcagtccgcaacaaggctgcgtcctacgagcactgcgccgatcgcctcatgatccgggacgagttcgccaaactgtgggatgcccagcgcgggttcggcggcgagacagcgaaacgcctcacgcccgaactccgcctcgcgctcgacgacgagtccgtcgatgccatgtggcggcacaagggcctgctcttcggccagcgccggcaatcctgggacctcggcacgctcggccggtgcgtgctccacccggaggaacgctgcgtgccgcacgccgacatgtatgcctcacggtacctcgtcgttgagaccgtgaacaatctccggatcattgagcgggacaagccgccccgcccgctcacccccgaggagcgagaccggatcagggcgtacctgagcggcccgctccgtacggaaacgaaaggcaagcgcaaggggcaaccgaaacgcacagtgaccgtgaccgacctgcgaaacctgatgagctggggacgtgcctccaagtcttcgcagttccgtttcaacattgagaacgacgaagaccgcacgatcaacaccgactggttcagccgcgagatcatccacggcgcggtcacgccggagacgtgggaggcgatgacggaccgggtccgcgaggggctgaaccgagccatactcaagttcgaccccgaccaggaggaggacgcggcgaaactccgcaagggagtgatggactgggccgggctgagcgaggcgcaggccgatgcgctcgttgccgcgtggaagacccgcccgaagcccgatgcgaagcggctgaacatggggcggcgcgcgacgcgcaacctcctcgccgtcatggaccgccccgagccgtgggacgacccgaagaacccgacgggctaccgatggctcacgcagatcgaggcgcgcaagatcatcgtggaggacggcgaatttgtcgacgtgacgacgggcagcccctttgacgaccacacgcgccgccgctacgcgaccggcgcaaagggcgcgacggcccgcgaccgctactacatgggcaagcacgtcctgatgaaggacggcaagcccgtcatcggcccggatggccatccgctcgccgagccgccgcccgctcccctcatcagcaacccggtcgtccgcaaggcgatccacgaagtgcgccgccacctcatcgagtacatgaagaccttcggccgaaggcccgacgaggtctacatcgaactcgcccgcgaggcgaagatgggcaagaatgacgccgaccggctcctcttcaggaaccgcctccgcaaccgcatccgcaacaacatcatccacgagctcgacctcgaatcacagacctcaacgcagcagcgtgccgccgtagaccgcgtgattctctgtgtgcagcagggcggcgtctgtcccctctgcggccggggcgggctgacggcccggctggcggccaccggcgaggagtgtgaggtcgcccacatcatcccccgtgcgagcggtggtcacaacggcctctcgaacatcgtcctcgcgcacacgaagtgcaaccgcgagatgggccgtcgcaccccacggcaatactggtcggcaggccccggtttcgagcagggtatgctctgggtcgagggcatctacggcgacgtcaaacgcccaaagccctcagaggtacgcaccgcggagggcgaagcgttgtgggcgtgctacttcacgggccgcgacgaccgcgcgaagatcgagcgattcaaactggacgtctccgatgcgcaggtccagggcatgaccgagcggcaggaggccgccacgaagtacgccgcgcggcaggtcatggcgtacctcgccgatgcgctctacgacggcaagggcctgcccgagcgaggcggtaagcgccgcatctacgccaccgacggcatgtggacaagccgcctccgccgcgagtggggcctgttcttcgaccctcacgacgcacggtcgcacggcctgagcggcgatgaggaacgcgagcgcaaggagaagaaccgcggcgaccaccgccaccacgccatcgatgcggtcgtgatcgcgctctgcacgcgccaggtccagatcgactgggaggaccgggagaagcaggcggacagggacggcatcaacacggcggacgaggagcagatggagaactaccgccggctgcaccgcctgcgaccgccctcccccttcgaccggccagacctgcccgtcgatgaggcgatcgaggcattccgggccgcggtgaagcgtgcggtcttcagcgatgacggtgaggtccgcccgatctgtcacaggcccgtgaagcgaaaactgatcggcgcactgcatgaagagaccctcttcgggccggtcctcgaccgagcgggcaacctcacgggctactacaccgccaagaagagcgtgctggcgctcgaccgcaaccatctgcggatgccgcggcccgagaccgaaagggaggccatcgaacgcctcgccgcccgtcgccaacgcgacaagagcatcgatgaacgcgcggcgcgcaagtgggcgcgcgccgtggtttcgtcccccggctacaagcccgcaatcgttgatccgccgcccggcaagagcggcatcgtccgcgacgtcgcgctccgtgcccggcttcgtgagtgcatcgaggaagccggtctggaccccgacgatttctccgcgaccgagatcaagaaactccacgaagccggacggatcaggcacgcatccggtgtccccatccgttcggtcgtgcttctccgaacgatgaacgaccccgtcatcatcgaccgcaagcgccccgactacgccaccgggcggatgctgcccgacgacgaccccgcgtccaaacgtgcctacgtcggcgggaacaaccatcacgtcgagatacgcatcaacgacaagggcgacctgtccggcgagatcgtctcggccttcgaggccgcgcagcgcaagctggcccgtctccgcgccttccgcgacgcccgcattcccaggccggacgagttccgcaagctgcccacggcggagcgtcgcaaactcgctcccgtcatccgtgcgatcgagcgagagcatccgctcgtagaccgccgggatgacgatgccaagggcggccggttcctcatgagcctctgcgagggcgagatgctcctgatgaagcacaaggagaccggcgacgtcggttactttgtggtcgcgaagctcgacaagccccgcagcatcgtcgttgtcccgcactgggacgcccgcgccgcgaccgagcgcaaggacgcggagggcgacaaggttccgaactcgaagcgcgagcagttcgcggtcacgccgagcgacctcggaaccctcgccccccccggccgcgaatacgccgtgaaggtccgtgtcagcccgctgggggtcgtcacggaactggaaaaggattgatcggggccccccgatccgttccaatggcggcgggaggcgtgcgtgatccgccgaaccgtcgagatcagccgtgagccgtgccacctcgccgtccgcgacggccagttgctcatcctccgccgcgaggagccgcctcgccgcctgcccgcgcacccgccgaacctcgccggaacgatcccgctcgaagacctcggcgtcctcatggtggatgagcgggagacgacctacacccactccgtccttgcccagcttgccgagcacggcgccgctcttgtcatctgcggacgcgatcacgccccgtgcggcatgtacctcccgctctcgacgaacaccgacatcctctcgcggctggacgcccagttcgccgccacgaagcccgtccgcaagcggctctggtcggcgatcgtcgcggcgaagatcagggcgcaggccgccaacctgccgcacgctcccgcggtccgctcgcggctgct

SEQ ID NO: 538 - DNA, 13001 bp, synthetic construct
  variation 3013..3217: note = n is a, c, g, or t
  misc_feature 1..13001: note = Synthetic
  source 1..13001: mol_type = other DNA
  variation 3808..3985: note = n is a, c, g, or t
  variation 6523..6749: note = n is a, c, g, or t
  variation 7091..7340: note = n is a, c, g, or t
agcagcaccgccgcggcaaggccgccggggccggcgccgatgatgccgacggagggggtgggggggggggaggtcacggcggagggtacgggaggcaacgttcaaagtgtgcgcgagccacgggtgcccttcccggccgcagaacgtgggccgttcatcgttacgaaccaaacagagatgtggattcactccgtggcgagcacaccgaaaaccgccagcctgttttctcccgcccagccccgcaaatatcggagggaacaaaaaaaagccacaggccgtttgtgcgggctgtggcggtcgccttttcggcggtgcctgcgatatttcttgttgcttgaaaccgcgggccgggatcgaatacactggctaaagcgtacccggaacttcggtgttcgtcaagggggttaccatgacagtgagacacgttctcggattagatattggtacgaactccgttggttccgcatggatcgacacgcaaacaggcgagatcaccgcgggcctgagcgtcttccccgcgggagtcgatgaaaccgacgataagcgcggggaccccaagaacgccaagcgacgaatgacccgtcgaacacgcgtcacgctcgcacgacgcgcggctcgcaaacgggagctccgcctgcaactgatccgttccgggttgctccccgctgatcccgcagtcatgaaagcgatgcttgagaccacagatccgtggcaactgcgtcgaaagggactagacgcggctctcacgccgcacgagtttggtcgagtgctgatgcacctcgcacaacgtcgtggagcactcgggcttcgtcccgccaaagcacaagaagaggcgacggcagcggaatcgccgaaagccggcaggaaggaaccaaaggccgatgttggcggtgacgaggttgaagaagatggaaaactcaaggcggcgatcgatgcggcccggtcccacatgatcgagcgaaaggctcgttcctacggcgagttcatctggatgctccgcaaagagcgagtaacgcctgttacgaccacggatcaacgatcgcccgaccagcaacagaagggcggcccccgcatgtggtgtgaccctgtgcgaaacaaggctggcaaatacgagaacgccgcggatcgtgcgatgatccgggaagagttccacaaactctgggctaagcaagcctcgttgtccggcccgctcgcggccctacttacagacgacctgcgccgccaactcgacgaccctgatcgcacggcgtgggacaaggacccgagcaaatccgccgaggaccgattgtggtacaaacatacgttcaaggaaggtgggctgctcttcggacaacgccgccagacctgggacatgggaacgctgggccgttgtgtgcttgaaccgacggagcgatgtgccccaaaggccgatatgcacgcctcgttctttcgcgtggtggagacggtcaacaacctgatggtgatcgagcagggtcggaccccgcgaccgctcaccaaggagcagagagatgaagtcatgaagtgccttcgtggaccgctgggggttcacacctccggcaagttcaagggacagcccaggcggagtgtcacagtgacagacctgcgttgtcttcccgcgttcggctggggcaaggccagcaaacactcgaagttccggttcaatatcgagagtgacccggagcgagagatcaatacggattggtttcatcgtgaaatcgtcattcccgcattcggcgagtccgcgtgggatgccatgacccagcagcagcgggagtctgtcaatcgcgctgttctgaagttcgatcccaacgaaccccaagaagcagcgaggctccacgcgggagcgatggcgtggtggaagctgagccccgcgcaggctgatgcgctgattgcgggttggatgacacgaaggccgcttgaagagcggctcagcctatcccgcaaagccatccgcaatcttcttcccatcatgaaacagatgtggtccgagccaggtgggggacatcgctggctgacacaaatcgaggcacgaaaactcattgccgaagaccaagattatcgtgatgttaccacggagaaagccctcgaccactgggctcggcggcgatatgccacgggcgcgaaaggactcaacgccgccgatcgttactaccaaaagaagcaccccctctctctcccaccggcaccaatgctgtccaatccggtcgtccgcaaggcgatccatgaagtacgtcggcacatcgaagcccatatccaacgcgcgggtttcatacccgatcgcattgtggtcgaacttgcgcgcgaggccaggatgggcgggaaggacgcggatcgcatccttctccgcaaccgtctgcgagagcgcatccgaaaaaacatcatcgctacattcgaattgtcacctcgagaacctagccaacagagagccgcagttgatcgtgttgtgctcgccgtccagcagaacggtgtctgccccttgtgtctgaacaagacggtgaccacctccattacgccccgcatggccgcggcggggcaggactgcgaagtagcccacatcatcccgcgcggcatcggcggtgggaacggactccggaacctcgtactcgctcatacacgctgcaaccgcgaaatggggcggcaaaccccccgccagttctgggataatcgcttcgacgagatgatgtccattgtcgagcgaatgtactgcgacatcgagcggcttcgcggcaaagctgttgacaaggccgctgaagacaaactctgggccgcatacttcgacaaagcagacgatgaagcgaaggtcaacaacttcaaaaaaacaaagcaggatctggaaggccataccgaacgcgacctcaccgatacccgttacgccacccggcaggtgctcgcttaccttgccgacgctctctacgagggaaagggtcttcccgagcggggcggtgaccgaaaaatcttcacaaccgacggtcgatggaccggcgaactccgccgcgagtagatcggaagagcnnnnnnnnnnnnnnnnnnnnnnnnnnnnnnnnnnnnnnnnnnnnnnnnnnnnnnnnnnnnnnnnnnnnnnnnnnnnnnnnnnnnnnnnnnnnnnnnnnnnnnnnnnnnnnnnnnnnnnnnnnnnnnnnnnnnnnnnnnnnnnnnnnnnnnnnnnnnnnnnnnnnnnnnnnnnnnnnnnnnnnnnnnnnnnnnnnnnnnnnnnnnnggaccggcgaactccgccgcgagtggggcctctatcatgatgtccacgctgccaattcaaatggtgtcgaggcgacagaagttgaggctcggcgagagaagaaccgcggcgaccaccgccaccatgcgctcgacgccgttgccatcgcgctcaccgaccgtgccgtgcaggtgaagttcgagaaccgcgtcaaggaagccgacaagaacgacattacggtggagacatacgaggccttttgtcgagagaatcccattcggccacccgacccgttcacggaccgagatgatctgcgggcgagggcgactgcggcaatcttcggtcagcgtgatgcgctcgatcacccagtctgtcatcgtcaggtcaaacgaaaactgatcggtgccctgcacgaggagacactgtttggccctgtcgtcggcaggcctggtttgttctgcggcactaaaagcatcttggcgttatccccaaaccaccttcgggttcccgaaggatgggacgaactctccgcaacgtatcggcgagcgaagtcggccgcggaacgaaaagagtttggccgacggcttgccgcattggaagatccgtcccccnnnnnnnnnnnnnnnnnnnnnnnnnnnnnnnnnnnnnnnnnnnnnnnnnnnnnnnnnnnnnnnnnnnnnnnnnnnnnnnnnnnnnnnnnnnnnnnnnnnnnnnnnnnnnnnnnnnnnnnnnnnnnnnnnnnnnnnnnnnnnnnnnnnnnnnnnnnnnnnnnnnnnnnnnnnnnnnnnngatccgtcccccggaaaaagcggccttgtgcgtgatcgggcgctccgtgaccgattgcgaacctgtcttcgagaggccggtttagacccggaccgattctccgccgcggacctcaagaaggcggttgctgctggttatctgaagcaggccagcggggtgccgattcgtgcggttcgtctgcttcgtgtgatgagcgaccctgtcatcgcgtctcgggtcgggtacgatcattcaactggcaagcgcgtgtccgtcttcgatgccgcaacaggcgaaggacgttccgcagccgcccgtgcctacgtcggcgggagccagcatcatatcgaaatccgcaaggacgacaagggcaagtggtccggtgacgttgtcaccatgttcgaggccgcccaacgtaaactcgcgttcttccgcgccctgcgtaaggccggtgtgcccacgttcaagaaactgcgcgagttgccgaaggccgaccggcggcaattcaccgcggcgatccgtgctgccgaccgtgcccacccgatcgtagatcgacgtgatgatccgtccaagggcggcgcgttcgtgatgtcactcgccgagggtgaaatggtcttcatgcgacacaaggatacgaaggaactcggctacttcgtcgttgcgaagatcgacaaaccacagtccgtggtcctcgttccccattgggacgcgcgcgccgccacgggacgcaaagacgcctcagggagcaaagtccccgactcccagcgtgagcagttcgccgtcacgccgaccgacttgtgtacgctggctccccccgataaaccgcacgcgacaaaggtgcgtgtttcacctttgggcaaggttactgcggtagagcgtgattgaccgtatcaagccggagtaagagcgtcaattcgagcgtggtcgccaaccacgggacgagattcccgaggttgccaagctgccctcgcgccgatctttgctggcttcgtcttactcactgaagtggaggggtgtcgccgcgtgcgggaaccaaacctgtcgccgatgcaccgcccggtgtccagcgcccacggttgtctgaagtagcgtcatgatcaaacgcattctcgaaatcagccgtgaaccatcgcaccttgcggtccgcgatgcccaactcctcatcctgcgcaaacaagatcagccccgctccctccccgcgcatcccccgaatctcgccgggtccgttccgttggaggatgtcggcgttgtagtagttgatgaggattccactacttactcccacagggccctttctgaaatcgctgcccatggcgcggcagtcatcatctgcggtcgcgaccaccttcctgtcggcgttctccttccgatctccgaacacaccgaggtcgtttggcggcaggacgatcagatcagcgtggggctacccgtcaagaagcgactttggcagcggattatccgtgccaagattcgggcccaatccgcggccctcatcccagatgaatcaggccgcgccgcgcgactcgccctcgaccgcatagcgagcgatgtaaccagcggcgatagcgagaactgcgaagcccaagccgctcgggtctattggggtgtgtggctcggcgatgccgcagccgagtcgcaagcaaggtttcgacgcgatgccactcccggtgtccacgctgccgcaccgaattgcttcctcaactacgggtacgccctgatccgcgccgccaccgcccgcgccctcgtcggtgccggacttctccccagtctcggtatcaagcatcgccaccgctcgaacgccttctgtctggccgatgacctcatggagcctttacgcccactggttgatactgtggcgagagatctgtttcttgccggcgaacggcacctgtcgcagcagaacaaggccaggctgctattactgctcacagcttcgacgcagtccgatggcccttctggtgtagaacaccgaaccggcccgctcatggtcgcccttcatctttacgcggcctcattcgccaaggcgctggcggtccgcgatgccgcggtcctttcgatcccggttccggtgccggaccaccggccaccgttgcgatgccctcccgaccccgaatctgaccccgaactcgactgatccacgcgccatggtcgtcatatgcacctcagcggatacagattcatgtgggtcgttgctatgttcgatctaccggttcatgacaagccagcccgaaaggcatacgcgcagttccggaaacgccttctgaaagacggtttcgcccgcatgcagttctccgtgtatgtccggcactgcacaagtcgtgaaaacgccgacgtccacggaaagagagtcgagggattcgtacccgatgatggtgaagtccgcctcctgacgattaccgacaagcagtttgaacgaatgctgatcttctggggaaaaagaaggaaagctccggagcctccgcccgctcagttacaacttttctgagcgggcggaagccccaagtacttgccactgatgggtttgtggcactgccaagtgtattcgatcccagcccgcgnnnnnnnnnnnnnnnnnnnnnnnnnnnnnnnnnnnnnnnnnnnnnnnnnnnnnnnnnnnnnnnnnnnnnnnnnnnnnnnnnnnnnnnnnnnnnnnnnnnnnnnnnnnnnnnnnnnnnnnnnnnnnnnnnnnnnnnnnnnnnnnnnnnnnnnnnnnnnnnnnnnnnnnnnnnnnnnnnnnnnnnnnnnnnnnnnnnnnnnnnnnnnnnnnnnnnnnnnnnnnnnnnnnccagcccgcgagcagcccgcaactacgttcgagtcgtaccataggcagttgttagtgtattcgatcccagcccgcgagcagcccgcaacagtacccaccatccttcttcttgccttcctagtgtattcgatcccagcccgcgagcagcccgcaacatgctggcctgctgcatcgcttggcctggtagtgtattcgatcccagcccgcgagcagcccgcaactgtcggcactgcttactcgcaaacgtcgggagtgtattcgatcccagcccgcgagcagcccgcaacacatgctcctagtgggagggtgggccgatcagtgtattcgatcccagcccgcgannnnnnnnnnnnnnnnnnnnnnnnnnnnnnnnnnnnnnnnnnnnnnnnnnnnnnnnnnnnnnnnnnnnnnnnnnnnnnnnnnnnnnnnnnnnnnnnnnnnnnnnnnnnnnnnnnnnnnnnnnnnnnnnnnnnnnnnnnnnnnnnnnnnnnnnnnnnnnnnnnnnnnnnnnnnnnnnnnnnnnnnnnnnnnnnnnnnnnnnnnnnnnnnnnnnnnnnnnnnnnnnnnnnnnnnnnnnnnnnnnnnnnnnnnccagcccgcgagcagcccgcaacaatccgtgtcgggtggcggggtgtgggccaagtgtattcgatcccagcccgcgagcagcccgcaacgcaccgtgacggagggcgtggtgtgggcgtagtgtattcgatcccagcccgcgagcagcccgcaactttcgtgagccgctggtgattgcctgagtgaagtgtattcgatcccagcccgcgagcagcccgcaactcactcgcgatacgctggcgggccgtcaggagtgtattcgatcccagcccgcgagcagcccgcaactttcgtgagcagcgggtgattgcctgagtgagtgtattcgatcccagcccgcgagcggcctccatgatctggcaagtgtgagaattacatgcgaaatcactacaccggtatagtagaattatgggtggtgggtggggttgtgttctcgtgtccacacccaacgttcgtcgaaggcatttgaaatgcgcggtaagagcaaccctacctgtatttcagcaaatgtgtgatgcgttcaacgaagcggcttgatctgcacatcgctacgccccctccgggcgtccgaagagcaggccgatctgcggctcatcgccggggcggcagaagatgtagacgtgatcccccggctgcagaaccgtggagccgcgcgcggccaggactcggttcccgcggacgaccatgaccgccgcggcgtcatcggggaagcggatctgcgagatgggggcgttgcaaacggcgacggactcatgaatgtggtaggaatggatctcgcccccgatggggcgcaggctgtggagttcgagcgcggcggcgggggtgggcggttcgggctcgtcgaggcccaggcgtcgggtgaggggcacgatgctcgcgccggggaccagcgcgctcacgaccacgatgaagaagacgatgtgaaacatctgatccccgcccggcaactgggccatgacggggaacgtgcccaggatgatcggcaccgcgcctcggatgccgacccacgacacatagccgatctcgcgggccttccatcggaacgggagcaggcagagggccacgaccagcggccgggccagcagcgccaggccgacccccagcgccaggccgatgccggccacggggatcagcttgctgggaaagaccagcagcccgagcatcaggaacatcgacacctggctcatccacgcgagtgcatcgtggacgcgggcgaggccggcgcggtaggggagcgatccgttgcccagcaccacgccggtgatgaagacggccagaaacccgctgccgaaggagatcgtcgcggcgccgaaggcgatgaacgccgaggcgagcgtgaccaccgggtagaggccgccggtcgagaaccgcgctcgccccagcagccagcgtgtcccccggccgatgatcaggccgaccgccgttcccaccagcagttgaatcggcacatcgagcaggagttgccacaggtggccgctcacgccgcccccggcgcccgattccgaagcgacccgaaccccctccaccacggccatcgtgaggatgaccgccatcgggtcattgatgcaggattcaacttcgagcgtcgagcgcaccttctccttgacgcgcagactcccgccgcggagcacggcgaagaccgccgcggcatcggtggatgagacaatggcgccgatgagcagggcctggctccagggcagccccaggccgcgggcgatgagggccatcaggccggccgttcccgcgacaccgacggtcgcgagcagccccgccgggccggcgctccggcggatcgaggcgaggggtgtgttcaggccgccgtcgaagaggatgagcacgagcgcgatcgtgccgatgcggaaggcgagttcatggttgtcgaaggcgatgccgccgaacccctcggagccgcccagcatgcccagcaccaggaacagcagcacgaccggcacgccgaacttgtcgagcgtgcgcgtgaacagtacgctgaaggccatcagcagcccgaagaccaccagcagcaccgccgtcgtgttcggctcggacagggcgagcgagagcgtcaggggcatcgatcgagggtagtcgaacgcggcgtacccgcccgcgcacgccggtggtgaatcaatgctggataatcgatcacgaagttgcgatcacaggatctgcgttggatggtctccggcttatccgatgccggtcggatcaggtgcagccgcccgcttcccacgcgataaagaaggtttcaacatcgccgccgtcgatgcccccatcgaagttgacatcggcatcggcatctccggcttcccacgcggcgaaaaaggccccgacatcaccgccgtcgatccctccatcgccgttgaagtcggcggggcagggaaggccttcgacgaacaggcgggcgctgccggtggtcacggtgccgcagccgccctcgacctcggcgtggtagtcgccctcatcggcggtcgtgatgccggtgatggtgagcgtggtggagttgacgccgccgatgcggccgccctcgaccatcggttggccgtccttgtaccaccgcacgccgtcgtagtctgacgcttcgatggagaaggtgacggtgtcgccctcgatgccgttcacgtcggaaggttcgcctgtgaggttcgggccggtgatcgcaatcccgatgcccggaccgcccgggggggtgacgccgcagggcaggttggccgagacccagtagtaataggcgatgttgccctgcacgccggtgtcatggaacggcggcatcgtgaagttggcgatgagctgggccgtgccgaaatcgggcgtggtgccgcggtacaggtcgtaggaccaggcggactgcgatgtatcccactcgaccacgatcagatcgcagagggagctcgatccgctgacccagttgggcggcgtgcacggctcgggaaggacatacaaatgtgcgctgttggacgtctgcgttccgcagccgccgtagacctcgcagtaatagttcccctcgtcgaatgaatagacggggaagatgctcaggctgctcgactgcgccccggagatgcgtccatcgtcgtacaagggggagccgtccttgtaccattggaacgctccgaaccccgagatgccgacgccgaaaccggccgaaccgttctccgtggcatacgcgtcgcccggatgcccggtgatgtacagaccgaagttggaatacccgatgtccggctggctcgggccggattgtccgcaactgtcgttggcgacgacccagtagtagtacccgacgttgcccgagacggcataatccatgtacgcggggtagatgcccgaggcgaccagtgtcgccgagttgaagtcaggattttcgctgcggtacacgtcgtacccgcccgccccggagctcgtgtcccactcgaccacgatcaggtcgcagtactggttgtccgaggcaaagacccatgacggcgggggcggggtgccaagccccgtgccgccgatatccggggcgctggggtcgctctccccgcacgcgtcgatcgcgatgacccggtagtaatacaactcgccgggttgcgccgaatagtcgtataaaggagggaatccgttgcccacatccacagccgcgccagggttgctcaccggggcgcggaccacgcgaaagtccgcgccggcttcccagttccattccacctggaccggcgagcatccgtcgttgtccgaggcattcacacccgtcggcgcggggatgcacccatcccccagtgccgcggcggcgctcatgaaggtcgctgccgcacacgcaaaccacttgatcattcttctctcctccagcggaacagtgccgggacgtgcgcccggcaaattacagccggacagagcgtacacacgccatgaatgtgccgcaagcgcggacacccgcgcccgcacacaggtcaagttgttcactacccgttcttttcattatccggacgtcttgcgcgcgagcatcggctccacggaggatccgcgtcaccgctatgatgtacacagttttcaggaagtattgaaaccacaaccgaaccttcacgctccatgagacccattcacccccccgaagtaccgcacgcctccgtgaccgatccgggatttttggccgcggcggcgcggggagaggcgcggctcacagtggagcagggattggcgctcttcgaggcgcttccgctgcccgaggtgggccgttgggcggatgcgcggtgccgcgtgctgcacggggatcacgtgcggacctacgtgatcgaccggaacatcaactacacgaatgtgtgcaacgcgaaatgcacgttctgcgctttccggcgtgatggaaccgagtcggacgcgtacacgctggagcacacgaagatcctcgacaaagtgggggagttggcggccatcggcgggacgcagatcctgatgcagggggggatgaacccggacctgcccctggactggtacctgacgctgctgcgggcgatcaaggagcgttacccgcgcgttcacgttcacgccttcagcccgccggagtttgtcgagttcgtccacttcttcgacccccccggcgcgacgttcgaggaaaaggtgcgctgggtgatggtgcggctgcgcgaggcggggatggacagcctgcccggcggcgggggtgagatcttcgcggcgcccgtgcggcggaagatcggcctgggcaagtgcgatgcggagagttggctgacggtgatgtacgtggcccacacgctgggcatgttcaccagcgcgacgatgatgttcgggcacatcgaggggcgcgccgaccgcattcatcacatgcacctggtgcgagagtggcaggaccgtgtgctggccgggtcgggcggctcgggcgaccggcggggccactacaaggcctttatctcgtggcccttccagcgggagaacacgccgctgggacgcgtgaaggactggggcgccgacgatgccgaactgggccgggagttcccaggcgatgcgctggcacgggcctttgactggggaagaaacccggagattgactaccgcgcggtgcccggcgcggcggagttcggccggcgcgtgcgcatggcgggggcgagcgagtacctgcggacgcaggcgatcagccgtctcttcctcgacaacatctactcgatcggggcctcgtgggtgacgatgggcccgcacatcggccaggtggcgctggcctacggcgccaacgacatgggcagcgtgatgatggaggagaacgtggtcagttccgccggcaccacgtactgtctcgacgagccggtgatctgccgcctgatccgcgatgccggcttcaccccggcgcagcgcaacaacacctacgacgtcctgcgcctgcacgacgggcccggctcgccggacctgcgcgtcacggactggagcctgcaccgggcgaggaagatgcaccaggaagcgcccaaggcggcgaaggtgcgggtgacggtgagcgcggcggcgccagccgccgcggctgccagatgatccgcgcgcctcacaccgcttcgacggccaacccgccctcgccgtcgatcagcacgatgtgattgtggggcacctcggtccagatgtgcttctcgcccagcggttcggaggcgaccgcgaccgaacctcgcgtctcggggctttgttccatgcgcg

SEQ ID NO: 539 - DNA, 10473 bp, synthetic construct
  misc_feature 1..10473: note = Synthetic
  source 1..10473: mol_type = other DNA
cgccggcgatctcgggcaactgcgaagcgcccgccgcgacgaccagcagatcgacggggcggggcaggtcggcgatcgccgggacgcacgcgatgccgtcgatcgactcggcccccggcctgattacgcggatcgccgaccgctcgaacccggccccgatgatgttggcgaggatgatccggccgaaactcttcgcgttcgtcgccgagacgccgagcacggcgatcgactcgggagcgaggaggcaacgcaccccgctcgcggggcgggggcgacttcgctgggttgcgggaacgatgcgggcccgtccgtcgagcggggtgagtcgacccgcccgcggcacgaacgggttgacctcgatctcgaggacggcgggctgggcatcggttgtgcggacaggggatcgcgcgagttcgatgaacgcccggaagcagcggaggaattcgtcgtccgggacgaggcgtcggctcccgcggatcgtcccggcgagggactcgtaggcgagcgtgtgcgagaagatctcgaggaaccgcttgggagtcagcccggtgaccggcgcacgggcgatcgcgcggcccggcttgagggctgccgcgaggtgctcggaggcggtcccgccgacacccgcgaccagcacggggccgaactcgcgtgtcgcgcggatgcccagaatcagttcaccagcgagatccggggtcgatcggtcgcgttcgatgaattcggcgatgagcacgccgaccgggttccgctcggcgtgcgcgtcgagcatgtacgcgaccccgtcggcgatggctccggggtcgttgcggcagaacgagacgccctgctcgtcggacttgtgcaccacctccggggagacgatcttgagcacgacctggtcggtcgggaaggaatgcagcgccgtttcgtcgagcggctcgccggtctttgccagaacgcagagaggcggctcgatgccgacgcagcggaggatgtcgtagatctcgggttcgagcaggcggtcccgccgctcgcggtgcgcagcggcgacgagcgactcgagatcggcggagcacgggtgcgtcatgcggtggctcccgatctcctaggcggtggcggcggccgtctcgcatgccgcgcgtccgcgggcgaacgcggtctcgttgagttcgagcaccgagcaattggccttgagcacgcgcctcagtgtcgtcaggaagctctcgggcgggaacaggccgctcgcggcctgcacggcgccgagggcgacgacatttttgaccatgcgcttgcccagttcctgcgcgatctccgtgcagggcacgcccacgacacggaccgagtcgtcgagtttcggcggtgtccgcacgacgctgctgtcgtagacaatgatgccgcccttgcgaacggtgggaccaaacttctcgaggctcggggcgttgaaggcgacgagcatgtgcgggttcggagccgaggggctgaggacctcgtcgcgggcgatgtggacatccgcgtaggaggtgccgccccgcgattccgggccgtagctggggatgtgggtcgagtcccacccctcgtcgatcgcggtcttggtggtgagcatcgcgatggtctgggcgccgtcaccgcccgcgccggcgaacttgatctcgatgtcccgctcgtcgaggtgggcggggaactccgaggagaaccgctcggcgggcgtgtcggtggcgccgatgagttcgatcacgcggtcggcatcgaaactgggcgtgcccaggtcgaaccagggctcgacggtctcgtccttcttgacgcccagcgggaagtagcgggtcatgttctcctcgacccacttctccgcctcggtcggcgtcatcttgaggtgggtggggcactccgagaggatctcgatgaacgagaggccccggttctccgcctgcagccgcaggcccttctggatcgccttgcgggtgcgcatccgctgcttgttgtcgaacagcgcgcagcgttcgacatacaccggcccgtcgatctgcgcgatgatctccgccatccgcaggggctcgcccgcgaggcgggaccgcccctcgggcgtggtggtcgtcttctgcccgggcagggtggtgggggccatctgcccgccggtcatgccgtagatcgcgttgttcacgaagatgaaggtgatcggcatcccgatctggcaggcctgcaggatctcgcccagcccgatcgaggcgaggtcgccgtcgccctggtagctcagcacgatcgcctcggggttggcgaccttgtgcccgatcgccacggccggggcccgcccgtgcgcggcctgcgtgttgccgacatccatgtagtagtacatgaacaccgagcatcccacgggcgagatcgcgacggtccggttctggatgcccagttcctcgatcgcctcggcgatgtacttgtggaccaggccgtgcccgcagccggcgcagtagtgggtggcgtgtcccttgaggccctcgccgtgggcgtgccgttcgaacttctggtagaacacgctcacagggcaccccccttcgcgccggccggcgcggcgacggatgttttcacgcccgccatcgtcctcgttgcctcgatgatctcccgcagcgacgggagcacgccgccgtagcgctgcacacgccggacgggcggcaggtcgcccacgcccgcgtggctcatcgccaggcggaactcgtcctcgagctggccgggccccgcctcgacgaacagcaggcccttcgcgttttcgacgacgggccgcatcgcctcggtggggaagggccagagcgtcaccgggcggaacagcccggccttgatgccctcgtcccgcaggcgctcgacggccccgtgggccatccgcgccggcgtgttgcaggcgacgatcacccattccgcgtcgtcgcagcggtacaggtccgcccgctgctcgttttcggtcatggaccggtatttctcgagcaggtgctcgttgtgggcttcgaggtcgggctcgatcaggcggatcgagcagttcaggttgccccggtgcgcctcgtcgccccacacggcccattccggcaggcccggcttgaccatgaactccggcaggttcacccgccccgacatttgcccgagatagccgtcgctggcgaggatgacggggttgcggtacttgaaggtgagctcgaaggcgagcatcgtcaggtcgagcatctcctgcggcgtcgcgggggcgagcacgatcgcgtgcgtgttgccgtgccccaggccgcggcaggcgagcttgatatccgcctgctcgggggcgatgttgcccaggcccgggccgccgcgcatgacatcgaagaagacgccgggcagctcggccccgatcatgtagctgatcccctcgagcatcaggctgaagccgggcgagctggtcagcgtcatgcagggcaggcccgcgccgccgcatccgtagatcatgttcaccgccgcgacctcgctggcggcctgcacgaagacgccgtcgagcttgggcaggagcttggcgagcagttcggagccctcggtcgagggcgtgatgggatagccgaagaagtgccggcaccccgcgaggatcgcgccgacggccgacgcgtggttgcccttgagcaccagcggctcgacgcgcggcagggggatgcgagcggacgggatcgcggtcggcgtgggcgcggtggtcgcccgcgggccgaacagggtctcggggtcttcgaggtcgaagtccggcgtctcctgcggcatcggcatcaggccgtgcggctcggggcaggcctccaggcacagcccgcagccgttgcacgcctcggtgtcgacggtgacggggacgacgccggtgcgcgggtcgatcgtgtcgcccatggtgatgcagcccttgggacaggaggggatgcaccgcccgcacgacttgcagaactgggggaagaggaacggtttgggtttcgtcgcgccgctgaccatcggcccctgcctttcctgcggcgggatcgggccgggtcgtccgtggcgcaccggtcggtgcgtcgggcccggcgtggcgtcccgccgggcggcggggccgcgggcggggcgtgagaggagggcacgccccgttccgcggccgggccgcctgtacaccacagatggtattccggtggtgggcgatcaacaacccaactcatccggaattcgttggtgcgggggcattgccggaggatggtgcggtgttcgcggggtccgcgtttcgccgggagcgagcgggatcgaacgcggaggccgcggagaggggcccggggcaggccggcgtggggaaggagggaggcaccacagaggcccagagcgcacagagggcgagggcaggaaggggggcggcgggccgatcgcggtggtcgtgcgccggcgcgcggtcgccttcgattggcgcacggggaagtttggtccgcggacggcgatctcgaaccgggaaaagacgagctcgacccgatcagagcggagcgtgacccgaccgaagatgatgtttgcccgacccgagacgaagtcttcccgatcaaagacgatctttggtccttcaaagacggtgtttggtccttcaaagacgatgtttgcccggccaaagatgatgtttgcttggccaaagacgaggtcgcgcgtggcgcatcggcgaataaacggggtggacgcggcgtccgccgggagtgggggggctgtcccggactgccacgatgttgtcaggctcgcgcccgcaccatgcgcgtaaaaaagccgcaggtcgcgggtcagcgagctgcggcggtcgtctttcgacggtgcctgcggttccaagaaccttgttgcgtgaaactgcgggccgggatcgattacactccgtgcatgttatcagcgtggggggaccaacgcaagacgatattgtgggtatccggggtttgaagatgggacgatatattctggggctggacatcggttcgaattctgttggatcggtctggatcgatcgggagaccggagacatcaccgccggtgtctcggtgttcccggccggggttgatgaggccgacgacaagcggggggagcccaagaacgcgaagcggcggatgacgcgacggacgcgcatcacgctggcccggcgggcgcagcggaagcgggccctgcggctcaggctcatcgacgcgggcttgctgcccgccgacgaagcggggttcagggccctgctcgaggcgacggatccgtgggagttgagacgccgggggctcgacgagtcgctgacgccgcacgagttcggccgggtgctgctgcatctggcccagcggcggggggcgctcgggctcaagatcgccgagcttgaggagggcgaggaggagacccccgactcggccgaggacgggaaggtcaaggcggcgatcggcgaggtgcgcgcgaagatgctcgaacgcaaggctcggaccttcggcgagttcatcgcgatggtccgggacgagcgggtcacgccgatcgagagcgccgacaagcggaagacgggacaacgcaagggtccccgcgaatggcggcgggcggtccggaacaaggccgggagctacgagcactgcgccgaccgggccatgatccggcacgagtttgatgagctttggacgaagcagcgggccctcggcggtgacaccgccgcgttgctcaccgatgagctccggctcgcgctggacaaccccgagcgcgacagcgaatggcggcacaagggcctgctcttcgggcagcgggcgacgaactgggacctgggcacgctcgggcggtgcgtgctcgagccgacggaacggtgtgtgccccacgcggaccggcacgcctcgcggtaccggatgatcgaaaccgtcaacaacctcaaggtcatcgagggaacgcggccgccccgtccgctgacaacagaggaacgcgagcggatcatcgcgtacctatccggtccgctcggcgaggagacccgcggcaagcggaaggggcagcccaagcggtcggtgagcgtgaccgacctgcgggcgaagatggcggagtggtacggcaaggacaggtggccgggcggcgcgaagcggaagctgtcgccgtgccggttcaacatcgaggccgacgaggaccgggcgatcaacaccgactggttcagccgcgagatcgtgcacggggcgatcggtttggaggcgtgggaggcgatgccggagaatctccgagagggtttcaatcgggcgatcctgcggaacgaccccgacgaggaggggcacgccgagcggctccgggacggtgtgttgacctggggcgggctcgacggagcaagggccgatgcgctggtcgcggcgtggagggcgcggccacggccggatgcgaagcgcctgaacatgagccggcgggcggtgcggaacctgctgccggtgatggagacgggctggccggacgaggcgagcccgaccgggcagcgttggcccacgcagatcgaggcccggaaggcgatcgcgggggacgcggagttccgggacgcgacgaccggcaagccgctggacaaagtcacccgccgccgctacgcgacgggggcgaagggggcgacggctcgcgatcggtactacatgaacaagcatgtcctgaccaaggacggcaagccggtgatcgacgacacgacgggcgagccgctggccgagccgcccccggccccgctcatcagcaatcctgtggtgcgcaaggcgatccacgaggtgcgccggcacatcgtcgagtacatgctcgcccacggccgaaagccggacgaggtggtcatcgaactcgcccgcgaagcaaagatgggcaagaaggatgcggaccgcgtgctgttccggaatcgcctgcggaaccggatccggaacgacatcatcgaaacacacggcttggaggatctctcgagcaatcagcagagggccgcggtcgatcgtgttgtcctgtgcgtgcagcaggggtgcgtgtgcccgctgtgcggcgaggcggggctgtcgccggagaaggccgccgcggggacggactgcgagattgcccacatcatcccgagggcgagcggtgggcacaacgggctgtcgaacatcgtgctgagtcacacgaagtgcaaccgggacatggggcggcggacgccgcgggagttctggtcggcggggggcggcttcgacgccggcatgcgatgggtggaggggatctacggcgaggtcaagcggcccaagcccgcggaggtcaagaaagcgaagggcccggcgctgtgggcgtgctacttcgacgctcgcgacgaccggaacaagatcgaacgcttcaagaaagacatctcagacgaggaggtgcagggattcacggagcggcaggccgctgcgaccaagtacgcggcccgtcaggtgatggcctacctctcggatgctctgttcgacggaaagggattgccggagcggagcaccgggtccggccgacccgaggacgccaggcggatcttcgcgagcgatggcttctggacgaagcggctgcgagacgagtggcggctgaagttcgacagccacgcggcgaaggctcacggactcgatccagccgaggagagcgaacgcaaggaaaagaaccggggcgaccaccaccaccacgcgatcgatgcggtggtgatcgcgctcggcacgcgcgatgtgcaggtgaagtgggagcagcgggagaaagcgggggacgcggcgtactgggaccatgtcaaggcgaacggaaacgcagggtcgtacgaagactggatgcatgactaccgacggaagaaccgtctgcggccgccgggtccgttcgaaaggccggggctgtcggtcgacgatgccatcgagaagttccgggccgaggtaaaggacgccgtgttcggcgaggacggcgccaaaccgatctgccaccggccggtgaagcgcaagctcatcggggccctgcacgaggaaacgctcttcggtccggtcttggatgccgacgggggtctttccgggaactacaccgcgaagaagagcgtgctcgccctgacgcccaaccacctgcgcatgccccgaccggaaacggagaaggaggccgtcgagcggctcgcggcccgacggatgcgcgagaaaggctccggcgagcgtgacgcgcgaaagtgggcgcgagggatcgtccggtctgcgtcgtacacccccgcgatcgtcgacccgccgccggaaaagagcgggatcgtccgcgaccgtgggctgcgggctcgcctccgcgcgtgcctcgaagaacacgggctcgacccggaccggttcacggccgcggagatcaagaggctcgccgagtcgggaaagatcacgcaggcctccgggatgccgatccgctcggtcgtcttgctgcggaccatgtccgaccccgtcgtgatcgaccggcgggggcccgagtacggcacggggcggattgtccgcgacgccgaccccgcgtcgaagcgggcctacctgggcggcaacaatcaccacatcgagatccgtgtcgacgagcgaggcagatggtccggagaggtcgtcaccgcgtacgaggcggcccaacgcaaactcgccaagctccgggcgttccgcgaggcgggagtccccaggccgaagcatttccgcaacctcaaaagggaggaccgcgcggcgtggaaggccgagcgtgaacactggcgaccgatcatcgcgcggatcgaggccgagcacccgctcgtggaccgcacggacaacggcaacggccgcttcgtcatgagtctgtgcgagggcgagacggtctggatgaagcacaagcagaccggcgtggtcgggtacttcgttgtcgcgaaactcgataagccgcgctcggtcgtcctcgttccgcactgggacgcgcggcccgccggtgagcggaaagacgccgacgggaggaaggtcccggggtcgaagcgagatcagttcgctgcaacaccagctgatttcacgacgcttgccccgaccgggcaaccgcacgcccgcaaggtgcgtgtgtcggcgttgggcgaggtcacgattctcgagcacgactgatcggcatccgataaaacccgctcctgttttgcgtccccgcgtcggtagtgcaactcggcggtttttcggttgattccggacgcgcgagtccatgaactggagtcgtgatcaagcgcaccgtcgagatcagccgcgagcccgcccacctcgccgtgcgcgatcggcagctgctcgtcctccggaagaccgatccacccgctcgcctgccggcgaggcccgacaatctcgcgggctcgatcccgtgcgaggacatcggcgtggtcatggccgacagccggcacgcgagctacagccatgccgcgctcgcgcagctcgcggaagcgggcgcggcgctggtcgtgtgcgggcgtgaccatcaccccgtgggcatgttcctgccgatcagcggcaacaccgaactgctcgcgaggctcgacgcgcagctcagcgccagcaagccgactcgcaagcgtctctgggcctccatcgtcgccgccaaggtccgcgcgcaggcggcggcgctgcccccgagacacgaagcggacccgtgccgcgcgaggctcggacggctggcccgggaggtccggtcgggcgacccgaccaacatcgaggcgcaggccgcggcgttgtattggcccgtgctgttcgcgtgctgcgggccggtcgatcggcccttccggaggcgcgcgggcgaccgcgccgccccgccgccgaacaacctgcttgactacgggtacgcggcgctgcgggccgcggtggcgcgtgcgattgtctccgcggggctgctccccgcgctgggcatccagcaccgcgggcggagcaacccgttctgcctcgccgacgacctgatggagccgctgcggccgctggtcgatcggcgggtgcgctggctcgcggaacgatcggagttgacgctcgaccagccgacgaaggcggaactgctgggggtgctcaccgaggaggtcggcatcgaggacgcgaagggcccgctcctggtgagcgtgtcgcggtacatcgcgtcgttcgttcgggtgctgaggggcgaagaccgcgacttgcgtatccctgtcgccgcgacggagcgggacggatggaactgagcgggtaccgttggatgtgggtgatcgcgctgtttgatcttccgaccgattcgaagcgggcgcggaggcattacacccgcttccggaaggcgttgatccaggacgggttcatgcagatgcagtattctgtctacctgcgtcacgcatccagccgggagaacgccgaggtgcacatgcggcgcgtcgaagccgcggttccgcccgaaggagaggttcgtgtcttcaccatcacggacaaacagttcgcccggatgcgtgtgttctggggaaaaaacaggattgcaacggaacaaccgccgcctcaactgcagcttttctagccgagcgaggtgccgtaaactcttgattttgctcgcgttccggctggggtagtgtaatcgatcccagcccgc

SEQ ID NO: 540 - DNA, 9033 bp, synthetic construct
  misc_feature 1..9033: note = Synthetic
  source 1..9033: mol_type = other DNA
acggactagccgttctcctcccgttgctctccaccccgtctcacgacgacgcagttacgttcggatacaaagttcaaaccaacttcgacgaggacttacacctcactgattcaatccacttgcaaacgcactagcccaggtccttgtggcctggatgattcgcaagcaaaatcaaatcgacagacccacgaggggtcgggctacgggctgctcagccagagttccagatatccggtgtccgcgtctgtggaaccgggcttctgccacaggccgatgccgagtgcgacatccgattttccgtcaccgtcgaaatcgccggtggtcagggtcggatagcggcccggtccccgtttccaaacgtgaaagtcaaactttcccggtgcggtttgttcgagccacacgagcgcgggtggaagggaactctgctggcgtttcgcttgcttttccgtcccaatcggaaccagcgtgcaagcgacgatgtcgaggtcgccgtccccatcgaggtcggtcgcttcggcacggtgtgctccgggaagttcggcgagcgtgtgtggttcgaatttcaactcgccgacattttccaaccaagtgacgctgtgatacggcttgagcgtcgggccatccatcatgtcgccgttggacagcagcacgtcaaggtcttgatcgccgtcgaaatccagcaactgaaaaccagaatagccccaggtgggatgcggcgcgcgaaacagttcgcgaggtttgaatgatccatccggttggttgagatacgcgacgagcatctcgtgctcttgagccagcagcgcggtcacgtcgggacggccgttgccatcgacatcgcagatctcaatttggacggctccgtggcgttcgtcgagcgtgcgttgtgcaaacttcaaccccgccggctttgcggatttggaagtcgaattctccaacagcagcacatgaccggtcgttcgccaaccgaattccgcgacggcgatatcgacatcgccgtcgctgtcgaagtcgaacgctttgagatcggcgacccggccgaggttgctggcaaggctttgcaatttccaaccgtcgtcttgtcgtctcagccactcgacgctgcctaggttgtgatccatcgccacaaacgtgcccagactcgccacgagaaactcgctgccgccgagtccgctccattcgatcggctccaggcggcacgggtgagagatctgctcgttgaggattcgaaggtggggtttgccattgagtcccgtcgtttcgcaaatccagccattccgcatgtcgcaggtcagcagtcgtctttcaccagtcggtgaggagagcagcttgacctgcgagacgaatggcgttttttcgggattgggcgatttcagaaagacttggcggagcggcggagttttttccgcaacatcgactcggtcggtcagcggcagcgagtcgggagcgcgatcgacaaaccaacgcttgaccgctcccaattcaaatcgtttgggagcaatgaccttcccataggcaggcatcgaaaccatgcgcgggatggcctcgtcccaatccgatttcgtcagcgtcccaggatcagaaaactgatgacattgcaggcacagcttcttgagcaacgcttcatcgtcgggcgaactgatgggtgtgaccacgttcgtcgcgggtgaggcggccgttggcggcgaaaccgccgcaggtgaaccgcatccaacgagccacaacgtggccagcgccacaccagcggcagaaaacattcgactcatgccgtcccttccggtcaaaaacatcgggacggattgtagggacaaatgcgaccgaagcggatcgagaccgcagccctcatcagactcgcttgtgccggcccaggatcgcttggacaatcctcgcggttatgaaattgacgatccttgttgaggagtcttgccatgcgtcatttgtgggtgtgtttggcagcgatgggatttttgggctgcggcgattttgacaaagccctgaccgagccggcacgacaatccgtcacggccccttcgggaatcgcaaacgccggagatgtctcggcaatccagaatgccactggaggtggagccgttgcccccgctgaaaacccacagcccgtgtcggcacccgatgcgaatgctcccgctgctgtgcctgcacaaccgacagcggccgtcattggcaagacgaccaaggcgctcgtcgatctcgccgaagccaaaaagaatcccaagatcgttgaggtcgaaaacaacgtgaccggcagtgatccgctgacggccactttcaacgcctacgtctcgatcacctcgcgagccagcgttttgaatttcaaacagcagatggacattctcaaagccaccaacgacgacaagtatccgacgttcaaagaggctcagaagctgatgaagcagctcaacatcgacctggccgccacactgcccccctatcagatgtacgcctacgacgccaagacgggcggcatcgttgtggtggaggacaaggccgaaaagattcgcctcttcaagctcaacaacattccgctcgaagaggccgacaagccattcgacacgccataatccaacgcagaccgcaacaccatctttgatttgagccatttcgatgagctttcgcggtgctgcacgcagagccgtttgctcggcctaattcggtccacaactgtcagttgatgccagcgcatcgcagcaacttgctcatcgaccgcgcatgaaaaaagccgccaccttgcggttgcggctcggttgccccgtggggcagtgcctgcgaatgttttgtcttgttgcgaaaagactcacaggccgcaagtttcccgaatttgctgttgaattgcggaatcgtctcgccgccgtaggatttgtctcagttgacaaaaaaaccgcaggtcggttgtgcgagcagcggcggtcgcccgaaggcggtgcctgcgatttgtatcttgttgcgtaaaaccacaggtcagggttggttacacccgctcgcatagtagcccgccgaaaactgcggtcaagcaaggcggaaacaacatgacgatctcaatgggactggacgttggctcgaattcggtggggtccgcatgggttgaccatcagaccggcaacatcacggttggcctgagcatcttcccggcaggcgtcgatgagtccgacgaaaagcgtggcgatccaaagaatgccaaacgacgagcgacgcgacggtcgcgaattactctcgcacgcagggcacagcggaagcgactgcttcgattgaaactgattgccgtcggacttttgccaacagacgccgctgagttcaaagcactgttgcaggagaccgacccgtgggaacttcgacgtaacgcactgtcgatctcgctcaccccgtttgaattcgggcgcgtacttctccacttggctcagcggcgaggtgccctgggattacggatcgttgaccccgatgacccggatgcaaccgacagtgatcgcgatgatgggaaagtcaaaaaagcgattggcgaagttcagtcgcagatgcggaaatgtggcgctcggacctatggcgagttcatcgcacaactgcgagacaagagcatcactccgatcacaacgccggatcaccgggcaaaggatcgtcgcaaggggccgcgagagcaccgcagcgcggttcgcaacaaggcgggaagctatcagcattgtgcggatcgcaagatgatccgtgacgagttcgccaaactgtgggacgcacagaaacgtcttggcgggccgctggcggaaatactgaccgatgaattgcgtctcgctctggacgacgactctcgcaattccaattggcgtcacaagggcctgttgttcggccagcgaatgcagacgtgggacttgggcacgcttggccggtgcgttctcgaaccaaccgaacggtgcgcgccgcacgctgatatggatgcgtcgcgatacttggtcgtcgagacaatcaacaatctcaagatcattgagcgcgggaagcagccgcgatcactcaccgttgcggaacggagccagatcaagaactacttgagcgggccgctcggcgaggtgacacgagggaaacaaaaaggacagccgaagcggtcggtcacggtaaccgaccttcgcgacctgatggactgggggaatgccagcaaaacatcggcattccgtttcaacatcgaagcggacaaagagcggacgatcaacacggactggtttagccgcgagatcattcacggcgcagtcacggcggcgcggtggcagcaattgcctttgcggtcgcgcgaaggaatcaatcgcgcgatcctcaagcacgatcccgatgacgaaacgcacgacgagaaactcaaggcgttggtcatgcaagaatgggccggactcaacgcatcgcaggccgatttgctggttgccgcctggaagaagcggcctcgccccgatgccaagcgcctgagcatgagccgtcgcgcggtgcgcaaccttttgaccgtgatggatcgggaggaaccgtggcccgacgcggagcaaccgggtgagacccgctggctgactcagatcgaagctcgaaagcgcatcgccaaggaccagaactttctggatgtcacgaccggcaagccgttggatgaacatgcccgacgccgatatgcgaccggaaccaaaggagcgacagcccgcgaccgccactacatgaagaagcacttgttgatgaagaacaaggagccggtttatggccccgacggcctgccgcttcacgaaccgccgccagcgccgctcattagtaacccggtggttcgcaaaaccatccacgaggttcgtcggcacatcatcgactacctcaccaatctcggctgcaagccggacgagattcatgtcgaactcgcacgcgaagccaagatgggaaagaaggactccgatcgcacgctgttcatgaaccgcttgcgcaatcgaattcgcaacgacatcatcgaagtccacaaactcagtgcggtgagcgccacgcagcagcgggccgccgttgagcgtgtcgtgctctgcgcccagcaggatggggtttgtccgctctgcggcaaccagaaagtcaagacgaagatcacgccaaggatggcggcgaatggcgaaggttgcgaagtcgctcacatcatccccaaggccagcggaggccataatggacttggcaatctggtcctcgcgcacaccggctgcaaccgcgatatgggccgtcgcacaccccgccagtattgggaggcgaccctcagcggcggcttcgacgagggattccgttggatcgaggggatctacgcggacatccaacggccgagtccttgggacgtcaaagaggcgtccggcgatgctctgtggttgtgttatttcgccggtggaccaagccgctgggggccaacatatgacggattgaaaatcgggcaattcaagaaagacatcaaagacattcagcaaatgaccgagcggcagggagccgcgaccaaatacgccgcgcgacaagtcatgacctacctcgccaatgcactctatgacggcaagggattgccggaacacagcactggcaccgaacagaatcccgaaacacggcgcatcttcgccaacgatggcctctggaccagccgactacgccgcgaatggggactcttctttgaccgtcatggtgccaaagcccacgggctgaccaatgaacaagagcacgaactcaaggagaaaaaccggggcgatcatcgccatcacgccatcgacgccattgtgatcgctctttgttcggagcaagtgcgaaaggcctgggatgctcgcgagctggcggcggaccaagcggacatcaacacggccgacgaggaggcgatggacaattaccgtcgccaacatccgttaccgctgcccgtggcttacaagagtcgcgacgaactccgtactgccgtgcaacgcgcggtgttcggcgagggaccgctcgaacgcccggtcgcgcatcgcgccggtgaaacgcaagctgatcggcgcactacacgaagaaaccctctttggtccggtcgtcgatcgcaccggcaatctgacagacaacttttcggcgaagaaaagcgtactgcaacttgatccgaaccacctgcgtaggccccgcccagagaccgaaaacgaagcgattgaacgactcacgctgcggcggctcaaggagaaatcggtggacgagaaaaccgctcgcaaatgggcgcggtcagtggtgtcatcgctgggctaccaacccgcgatcgttgatccaccacctgggaaaagcgggattgtccgagacatcgcactgcgccagcgcatccgtgattgcctgagtggttttcaatatgccaaacggaacaagagtggagagccggtcggtgagtcgcgtgcgatcaacccggatgactttacggagcatgaaatcaagcaagcgttcgaagccggagccatctgccaggcgtctggcgtgccgatccgctcggtcgtccttctgcggaccatgagcggccctgtggtcatcgaccgcaaacgaccggactatgcgacaggaaagatgatccgtgatgacgatccagcttcaaaacgcgcatacgtcggcgggaacaatcaccacattgaaatccgtgttgctaagaacaagaaaggggacgaagtctggtcgggagtggtggtgaccgcgtttgaagccgcacaacgaaaattggcaaagctccgtgcctttcgtgaggcgggaattccgaagctcaaggtgctccgcaaactctcgaaagccgaacgggcgaagttccattctgagttgggccgcatcgagaaagctcaccccgtcatcgaccgttccgaaaacgtggacaagggaggcaaattcgtgatgagtctgtccgagggtgagatgctcaagatgaaacataagcagaccaaagaagtcggctattttgtcgtcgccaagctcgacaaaccgcaaagcatcgtcgtagtcccccattgggatgcccgcgccgcgaccgagcgcaagggctcggacggaaagaaagtctcggattccaaacgcgaacaattcgccgtcactccctcggatctgaaagagttggctccccccggtgaggatcaagctgtcaaagtccgggtcagtccgctcggcaaagaggtcgtcgtcattgattgagatcgcgatgcggctctcagtcggcttcagccgactccccatttgccaccagctttagctggtggagagggaaatcgcaaaatgattgagtcggcttcagccgacttgatcggttgggctttagccaggtctcgatctggctgaagcccggtcatcaagccggctgaagccggctcacgcgagttgccatgtcggctctccaccggctgaagccggtggcaaatgggaagtcggctgaagccgacaggaagcgcagaagaaggcgtgacggaaaatagttcgtgaccttttggttgtcgcgctttagtctgtcacccgattcttcaggagcctcgtccgcacggaggcgtttccgatccaccccggtgaggaacgctgcgatgatcaaacggacgatcgagatttctcgcgagccggcacatttgtcgttgcggcttgggcagttggtcttggaacgggagcaccagccggtctccacgattccttgcgaagacttggggatggtcgtcgtcgatcactcgcaggtctcgtacacacactcggccttggcggcgctggtcgagcacgatgccgtggtcgtcgtctgcggcaagaatcatcttcccgccgggttgctgttgccgatgacggatcattccgaagtggtctggcggctgcacgaccaaatcgccgtgtcgaagccgctgcgaaaacaactctggcggcaaatcgtgcaggcgaagattcgcgctcaggccaacaacctgccggcgggcagtcccgaacggacacggctcctggagttggctcgaaccgtgcgctcgggggatgttacaaaccacgaggcgcaggcggctcgcgtgttttggtcggcatggttgcctgatgatgggcaagaccactcaagattggcggcgacctgtgtcgaggtttgcgcttcaggcccgaagggacgagactcgaaagcccagggcaaagcgaccaacgggagcgacgccctgggtgtcgatgaccgacgagacgtcagccctgaaggggcggaactcgtgacttccgccccttcagggctaagcctcctggcgatcgaaaacccagggcgacgcggatcggatcaggccgatccgctctgccctgggctaccgagtcatggcccttcaggccacagcgcaaacgacatcctgagtcccaatcaacaagccaatgtgccttcctcaccagcgaacggtacgactcgatcacagttcccgtttcgtcgcgacgccaacggcgaggacgaaatcaatgtcctgttaaactacggttattcgatcctgcgagcctccgtcgcgcgggccattgtcatggccggactgcatcccgcgttcggattacagcactgcaaccgcagcaatctgttttgcttggctgacgatctgatggagccgttgcgcccgctcgtggatgctcgcgtgcgcgaactcgtgcgactcagtcaaacggagttgtcgccgatcacgaaagcggcgctgctgcaactgctgacccacgaagcaaccaccggcagcgaagcggggccgttgatggtgacgttgcaccgctacgttgcctcgctggtgaagtgctacgccggcgagagcgagcaactcgaaatcccggaatacgtccccgcgccgttcgagccgaaatccgtcgaatcggccacgccctcaacaaaccgctcgtgggccgcgtcgcgacgtcacgctcggcaattggctgccagcgaaatcgcgaatcgaccgttctaaccgataggggtaggaacgactgattgagttcagtcgcccctccctccgaaccggacgggcgggtttcccgcatccggctctccggttgatggtcttacctgcgagaggattgaacggccagagcatgggcggtcgtcag

SEQ ID NO: 541 - DNA, 8548 bp, synthetic construct
  misc_feature 1..8548: note = Synthetic
  source 1..8548: mol_type = other DNA
cccagtggaagcgatccttcacccacgggtgctcggcgaacttatacccgcccagcagaaacgccagcacccacgtggccccgccggtcacgttgtagatggcgaaccgcggatagttcatcttgccgatgccggccacaaacggggcgaacgtccggatgatcggaatgaaccgcgccaggaagatcgtcttgcccccgtgcttctcgtagaagcggtgcgcccgcagcaggtgctgcttgttcagcagccggccggtgtccttgtggaagatggccgggccgacccacttgccgatcgcgaagttcacggcgtcgcccaccactgccgcgacgatcagcagcaccgcggtcagcggaacgcagacgggcgagtcctcccgggccgccagcgcccccaccgcgaacagcagcgaatcccccggcaggaacggcgtgacgaccaggcccgtttcgcagaagatgatcaggaacagcagcccgtacagccagcttcccatctggccggccagatggttgaggtgctggtccaggtgcaggaagatgtcgaacgcctgtgcgatccagtccatagacgtctccgcgaaagcccgggaccgccagcagcggatgacggacttctgacaacgaaccttcttgatcaatgcagaaacagccgcaacccgctttcgaccatcaccatgccatattcgtcggccgccgcgatcacgccctcatcccggaccgatccgcccggctggatcacgtattggacgtggctccgcgccgcccggtcgatgttgtcccggaacgggatgaacccatcgctgctcaggcagatgccgtcgaaacgccgcacccactcgatccgctcatcccggccgatcggctcgggccggcggctcaggcccgccagcatcgccgcccgctccgcgtccgacagctggtcccacaacagatactggtcgacgacgttggccttctccggccgcttgaggtccggccggaagggcagatccagcacccgggggtgctgctggaggaaccacttgtcggccttatcgcaggccagccgcgtgcagtgaacgcgggactgctggccggcccccatgccgatcacctgcccgtcgtacgccacgcagatcgaattgctctgcgtgtacttcagggcgatcgtcgcgacaatcagagtctcggccacatcctcggggatcgccttcttccgggtaaccacatttttcagaagtccccggtcgatcgcggcgtcgttacgctcctgctccaggtggatgccgaacagctgccgctcttccatcggcggcggctcgtaggccggatcgatttgcaggatcagataccgcccgccctgcttggccttcaggatctccagtgccgccggctcaaaggacggtgcgaccagcaggtccgacacctcccgcgacagcatcttcgccagggacacgtcgaccgtgtcgctgaccgccgcggcgtcgccgtacgaacacatccggtcgccgccgcgcgcccgggcgtacgccgtcgccactggtgagaactcctcgtccgccaggaactgcgaccgccggaactccgccgacagcggcctggccaccgccgcgccggccggactggtgtgtttgaaggaggccgcgccggccagtcccgttgccgccttcagttcccgcaccagctgccacccgtagagggcatccaggatgttgatgtaactgggctggccgttgagcaccttcagcggcaacttgccctcgggcacgaagatccgcgcgttcttctggtgcgggttcgtgccgtaccgaagcttgatctcatccacagaacggcctccattgctcatgccggcggcccgcgacggccggcgggacgggagatcctgaaacacgcaggccctgtatacagcaacatcggccggcagcacaaggccgcggccatccctgccccgactgctgcttaatctgacagacaggacggccagagctccttgccgacctggtcgagcagcatggccgccagatcctcccgtccgtccgtccgcatctgctcaatgctgacctcggcggggatagcgatggccgcgtcgatctgttcgattgtcgaaggccggctatccgactggacgggtacaggccgaagatgttgcccgcgtgcaacacaaaccccgtcatttcgcggacacggcgagggcggtattggccgagaatgttgcccgcctgcaacggatgttgcggaaaatcaacgcttcgagattctgccgctcggcgtcgcgtatgtttcatgcaaacgggcgaaatttccataagaggttggggcggaaggggatgcaaatgccagtgcggcgcggaggtgaattgtcccgacggatttggcacggcacttgccaacgataagacgtgtgtagttgagaagttgagagtgttgtaagcggagtacccttaaatttgggcgagacggtgatggtcgcgggtgcaatgcctgctgccgttgccggaaacataccctcagtgtagttctcctgaaccccaggctccccccctggggtcttctttttgtagaggtcaggtggttgtcgcgggtcagtggtcggtgggcagctgtcatttgcagcagaagggcgtgggcaacggtcggcgcaggcaacctgatgacctgggccgataagagccgattgtgcctgtcctgcgttcggtgctcgccgttgccactcctcaacgccgacgacccacctgcggccctgaaaagggacaaaaaacggtcggctgcgaccgtacctgtcacacctcctgaggagaatgcggctggaattgtaatcgttccgggcggtctgccggggcaggacaaaaaaagagccacaggccgtttgtgcgggctgtggcggtcgcccgaaggcggtgcctgcggattttcaccttgttgcgaaaaaccgcgggccgggatcgattacacttgacatgaccttagcgtcaggccagagtcatgtcaagcccaattctgcaactttttttggagcgagccatggcgatttatctcggtctggacatcgggagcaattctgtcgggtctgcttggatcgatacgcacaacaagaccatcacgcctggggtgagcgtctttccggcgggggtcgacgaatccgacgagaaacgtggggaacctaagaacgccaagcggcgcatggcccgccgaacgcggatcaccctggcccgacgggcggagcgaaagcgtctgctgcgatggaagctcatcgaggtcgggctgctgccccgcgacgccggggagttcaagaccctgctggacaacaccgatccgtgggacctccgccgcaaggggctggacgaggcactgagcccgcatgaattcgggcgagtactgctgcatctggcccagcacaggggtgctttagggctcaagatgcctgatccagacgacgcagactcgcccgaccttgctgatgaaggaaaggtcaaggccgcgatcggcgaagtccgggccaagatgctgcagcgtaaggctcggaccttcggagagtacatcgcgatggtccgggcggagcgggtaacggcgatcacaacggaagaccggcgtccgctcaacgcgcgcagggggccccgggagtaccgtgcggcggtccgcaacaagggaaggtcttacgagcactgcacagaccgggatatgatccgcgatgagtttggcaagctctgggaggcgcaggtcaagattggcggcgacacggcccgacggctaacgcaggaccttcgcacggcgctggatgatccgacgggggattcagaatgggttcacaagggtctgctgttcggacagcggcgccagtcctgggacctgggtacactgggacggtgcgtgctggagccgacggagcgctgcgtcccgcacgcggatatgtacgcctcgcgctatcttgtcgtcgagacggtcaacaacctcaagatcatcgaatggggaaacgaagccaggccgctgacgcccgaggagcgacaaaagataaagaactacctgagcggtccgctggggacggagaagggccgcaagaagaaaggggatacagagcccccgaaggacaggcccaagacaagcgtcaccgtcgcagatctgcgcaacctcatggggtggggccgcgtcagtaaaacatcgcaattccgcttcaacatcgaatccgacaaggaacgaacgatcaacaccgactggttcagccgggagatcatccatggcgccgttacgccggagaagtgggcgcatatgtccgagagggtccgcgaagggctgaaccgcgccatcctcaagtacaatcccgataatgaggccgacgccgcgaaactcaagaagggcgttatggcctggggcgggctggacgaggcgcaggccgacgcgctggtcgccgcatggagaaaacgcccccgcccggatgccaagcgactgaacatgagccggcgagcggtacgcaacctgctcgccctgatggatcgcgacgaaccctggtcgggccggatgcggtggcttacccagcccgaggcgcgcagacggatcgcgcaggacgcggacttcaaggatgtaaccacgggacagccgctggattggtatgctcgcatgcgatacgccaccggggccaagggcgctacggcccgcgaccggtactacatgaagaagcaccttcttttgaagaacggcaagccgatcttcggtccggacggtaacccgctggcggagcccccgcccgccccgctgatcagcaacccggttgtccgcaaggccatccatgaagttcgccggcacattgtcgagtacatgacgacgttcgggcggaaacctgatgcgatctacgtcgagctggcccgggaagcgaggatgggcaagaaagcggcggacgaactgctgttcagaaaccgcctccgcaatcggatccgcaatgacattattggcgcattcgagctggacaggctgacttccacccaacagcgggcggccgttgaccgtgtggtgctgtgcgtgcaacagggcggcgtttgtcccttgtgcggcaatcagcgggtcaccaccaagatcacacccagaatggctgccgccggcgaggggtgcgaagtggcgcacatcatcccccgagcgtgcggcgggcacaacggcctggggaatatcgtactggctcacaccaagtgcaaccgcgacatgggacggcggacgccgcgtcagttctgggaagccgccctgccgggaggctttgacgaaggcatgaggtttgtggaaagcatctaccggaacgtagagaggcctaagccgtcggatctcaagagcgccacgggggactccctgtgggcctgctacttcgccggcaagcccagccgcttcggaccgaccttcgacgagctgaagatcgagcagttcaagaaggacgtaaccgacatccaggaaatgacgccgcgacaggaagccgcaaccaagtacgctgcgcggcaggtgatggcgtatctggccgacgccctctacggcggccgcggcctgccggagcgagggggcgagcatctgatctacgcgaccgacggcctgtggaccggccgcctgcggcgggagtggggactgttcttcgacccgcaccagcgtaaggccaaggggctgaacgagcagcaggagcacgagcgaaaggagaaggaccgcggcgaccaccggcaccacgcgatcgacgccatcgtgaccgcgctttgttcgcgtcaggtccagatcgcgtgggaagagcgagaaaagcaggccgagcgggaaggcgtgaacaccgccgacgaggtggagatggagaactaccgaagactgcatcccctggacccgccggcacccttcaagacccgcgaggaattccgagacgcggtcgcaaaagctgtgtttggagacggtcaggtggaacggcccgtctgccaccggccggtcaaacgcaaactcattggcgctctgcacaaggagacgttgttcggaccggtcctggacgaggccggtcggctgacggatacctacacggccaagaagagcgtcctggagctgaaaccgaattacctgaggatgccgcgccccgagacgaccaacgaggcagtcgagcgtctgaccgcgcgtcgccttcgccggaacggcggagacgagcgtgctgctcgcaagtgggcgcggggggtggttgcgtcggcggggtacaaaccgaggatcatcgatcctccgccgggcaagagcgggatcgtgcgggacgtggcgctgcgaacccggttgcgcgagtgtctgacggctggcggaatcgatcctgacgatttcaccgccaaccagatcaagaagctcgtcgaggcgggtggtctgcggcaggcgtcgggcgtgccgatccggtcggttgccctcctgcacacgatcagtgacccggttatcgtgtcgaggtgggcgagtgaccacgcaacgacgaaacgccgcaagctgtacgacgcggccaccggccagggagacgcctccgcagcccgggcctatgtcgcccgcaacaatcaccatatcgagatccgcgccgccaagaacaagaagggcgaagaggtctggcggggcgaagttgtcactgcgttccaggtcgcgcagcgcaaactggcgaaactgcgcgccttccgccaggcaggcgtcccgagaccggacgtcttccgcggtctgcccagggcggagcgagccaggctcatgccggtgatccgcgccattgaaaaagactacccgctggtggatcgctcggatgacgagacgaaaggcggccgtttcgtcatgagcttgtgcgagggcgagacgctcctgatgaagcacaaggccaccggtgaggtcggatacttcgtcgtggccaaactcgacaaacctcagggcatcgtgctcgtgccccattgggatgcgcgggcggccggggaacgcaaagacgccgaaggcaagacggtcccggactcgaagcgagaccagttcacggcgacgccaaccgatcttctgaagctcgccccgcccgggcggccgcacgccgtcaaggtgcgtgtcagcccgctcggggaggtcagggaagttcacgactgaggtcgtgcggaacatacgggagggatcagtctttgtgcccgccaacgggcagggggcgggaccggctgcggccgggcaattccgtaaagggaggggagcatgatcaagcgaacgatcgagatttcgcgcgcgccggcgtacgtttccacaaaggacgagcagctgctcatccggccgacgagggacaaatccgctgagccggccagcatcccctatgaggacatcggggtcgtcgtggtggatgagccggcctgcacgtacacccatcaggcccttgccaagctgatggaggcaggggcggtgctggtggtgtgcggggcgaagcacctgccggccgggatcctgctgccgctgcccagccatacggaggtggtctggcgggtgcaggaacagctttctgccggtctgccgctccgcaaacggctgtggcgacagatcgtccgggcgaagatccaggcgcaaatgcgcgttctgcaccccacgtcggccgcccgcaggcagttggcgcggctggccgatgaagttcgttccggcgaccccgagaacgcggaagggcaggcagccaggatctattgggaggcttggctccaagagtcgggaccgtttcggcgcgaccccgacagcgaggacatcgtaaacagcctgctcaactacggttatgcgattgtccgggcggcagtggcgcgggcgctggtggccggcgggctgttgccggccgcggggctgcaccactgcaaccggtcggacgcgttttgcctggcggatgacctgatggagcctttgcgcccgctggttgacgaacgggcgcgggccgtgtggctggggggttgccgcgagctggaccgggccgccaaggcagcgctgctggaggtgctgacggcgacggtgcgggtgggcgaccagacgggcccgctgatggtggcgctgcatcggacggtggcgtcgctggtccggtgctaccagggtcgggaccgggaattggcgttgccggaagcggccgaagtatgcatctgagcgggtaccgattcatgtgggtggtggcgatgttcgatctgccggtggacacgaaggcggcccggcgggaatacactcgtttccgcaagaagctgctgaaggacggctttgccaagatgcagtattcggtatacgtgcgtcactgtgcgagcgaggaaaacgcggatgtgcacatcaggcgtgtggagttcgcggtgcctgacgacggggaggtccgggtcattacggtcacggacaagcagttcgagcggatgcgcgtcttctggggaaagaggcgcaaaccccccgaacaggcccctaaacagctcgagtttttctaacccgcccgcaagcgcaacccctgtcgggatggccggttacgggcgaggtagtgtaatcgatcccagcccgcgagcaatccgcaacggagcattgataccaaccgcgttcggccgaagtgtaatcgatcccagcccgcgagcaatccg

SEQ ID NO: 542 - DNA, 7665 bp, synthetic construct
  source 1..7665: mol_type = other DNA
  misc_feature 1..7665: note = Synthetic
cggcggtcgagcgcggggcgggcgggcggggggggggggtgggcgggggggggggggggggggcggaggggcaggggggcgggggggggggcccggggggcgggcggcggggggcggggggcggggcggagggggggtgggcgatgccacctgcgcgagaacggccccacgtctctgctcccgcgggacctgagctcgccggggatcgtggcgagcgtgggaaacctgatgtatcgttttcccaagaaccggtcgttctcgagcgcgttcttcccttcgttcatccgcaccactcggaggtcgccatggcacacgccgtccaacccgcaggcacgctggccacgcgccgcgatgacgcgatgaccatcatcgcgctggcggctcttgcgtgcatcgtcggctccgtgctcagcccgttgctgctgggtgttgcgatgccctatgccggtggcgcggcggtcgtcgtcggcatcggcgctctcctgtgcgccacgctcaggtcacgcgcggcgtgcgtggcgacggcctgcgtcgtgctcggcctggtcttgatccgcgtcgcatcggcggctctgccgcagttgttcggacaaccgcacggcgcgccgtcgttgctcgacagcgcgggcgtgctggttctgctgaccgccgccgttgcgatgctggtggtcgcgtcgggccgccgctccacgcgcaacggccgccgctgatgagcgttgacagacgcgctcctacgccgccagccgcgacgagccctgcccgctcgcgttgttcgtggagaccgtgctgaagggcacgggtccggagccggttcggccgaagttgatgacgaggatgtcgctcaccggcccgctgctgtcggcgcgctgcgcctgcacggtgtacatgacctggtccggcccggcctggaagctggagtcggtgaacttcttgctcccggtgacgccgacgaactcgaagtcgccagtggcgccggcgcgtcggcggacgatgtaggacgtgccgctggcgccgcggggattgtcgcaggtccagcgcagcgtgatcgcgccgctgctgggctcgatgccgacgatcatgtcgcgcggcttgccgggcgcgggcagcggcgcgggctgggccggcggcgggatctgcgcgacgacatagacgttgggattgttggtgctctcggcaaaggccttgatgagccggacggtgtcgcccgcggcgcggcgcagatcgccaaccttgaggttggcggtggtggtggcggccttagcggcctgcttggcggcaaactggttgctgtcggcctcgatggcggcagcggcggcgttcttgaaggcggtggcctgggcgggggtgagcccgatggcggcggcgttggaggtgaagacggtggcgtgctgggcgcaccactcgaggaaggcggaacggggatgggtgggatacgtgcccatggggtcgggtctcctgatgaatgccgcgcttctgccgcgccgggaaaccctcccgtcgcctccaatttcaggcggcctcgccacgagagcatcggacagggaccttgtgtacttgaggactccctccaacccaatcggaattttgtcaccgtgcgcaaaggcggagcgatcagccccagacaggcaacgctcgccccggggggtgccaacgcgtttggggacccggaggttcaagatggcggtcgagccaaaaagaaagaaaggcaggccgttggtgcgggctgccctggtcgcgcccgcccgaagacgaacgcggtgcctgcgagtctcttgttgcgtgaaaccgcgggctgggatcgattacactaagagaggataggtgcacgctcgctctccgtcaaggggttcatatgtatcagcagagagtccttgcattggatattggctcgaactccgtcggttcggtctggatcgcccgacacaccggtgcgatgacgacgggaacttccatatttccagcgggcgtcgccgaggctgatgacaagcggggtgagccgaagaacgccaatcgccggatgacgcggcgtacgcggatcacgctccggcgtcgggccgagcgcaagcgtgaactccggctgcggctcatcgcggccggattgctgccgggcacggccgaagagttccgcctacttctcgaatcgaccgacccatgggcgctgcgccgtcgcggactggaccacgcgctcacgccgcacgagttcggccgggtcttgcttcatctcgcgcagcgtcgcggcgcgctgggcatcaagatggcgagcgcggacgatggggacgagccggacgccagcgaggacggcaaggtcaaggcatcgatcggcgaagtccgggccaagatgctcgccgccaaggtgcgaacgttcggcgagtacatcgcgagcgagcgggacaggcgccggaccccgctcagtgacgcaggcatgcgtcccgaaggccctcacggcggtccacgcgagtttcgcggggccgtccgcaacaagaagggcggggcacacggcgggtacgagcactgcgccgatcgcgcgatgatccgtgatgagtttgccaagctgtgggacgcgcagcggcggcttggcggtgcgagcgccgccctgctcaccgaggcgctgcgtcaagagctcgataatgagcgcggcaacgcggtctggaagcacaaggggctgttgttcgggcagcgtcggcagacctgggacctcggcgcgctcggacggtgcgtgcgggagccgaccgaacgctgcgctccgcacgccgacatgcacgcctcccgctaccgcgtagtggagacggtcaacaacctcaaggtcatcgagcacggccgcccgccgcgcccgctcacgcccgacgagcgcacacgcatcaaagccttcctggccggtccgctcggcacgcacacgaaaggcaaagccaagggcaagccaaagtccacggtcaatgtcaccgacttgcgggagttcatgggctggggcaaggcgaccaaggcatcgcgtgtccgcttcaacatcgaggccgacgaggaccgcgagatcaataccgattggttcagccgcgccatcgtccacggcgggatcggccccgacgtctgggccgcgatgcccgcccgactcaaggacggcatcaaccacgcgattctcaagttcgaccctctgcaggacggcgacgaggccaagctccgcgccgggttgatgacgtggggcgggctgagcagggtgcaggccgacggcgtcatcgccgggtggcgcactcggccgaagcccgacgccaagcggctgaccatgagccgcaaggcggtccggaacctgcttgcggtcatggaccgcgccgaaccctggcccgacgccaacagcacgaccagataccgatggctgacgcagatcgaagcgcgacagttgctcgctggcgacggcgatttccacgaccagaccaccggcctcgcgctcgacgagcacgcacggcggcgatacgccaccggagccaagggcgcgaccgccgcggaccggtactacatggccaagcacgtgctcatgaaggacgggaagccgatcatcgggccggacggccgcccgctcgccgagccgcccccggcaccgatgatctcgaacccggtggtgcgcaaggcgatccacgaggtgcgccggcatctcgtggagtacatgacgacgtttggtcgcaggcccgacgaggtccgcatcgaactggcccgcgaggcacgcatgggcgcgaaggacgccgatcggctgttgttcaagaaccggctgcgcagccggattcggaatgacatcatcgacgccttcagtttgcacgggcgcaccgcgagccagcagcgggcggcgatcgaccgggtggtgctgtgcgttcagcaacgcgggacgtgcccattgtgcggtcagcccgggctgcccgcgcgcggcgctgccgccggagaggggtgcgagatcgcccacattctgccgcgtgcctccggaggtgacaacgggtaccgcaacatcgtgctcgcccacaccaaatgcaaccgggacatggcccggcgcacgccgcggcagtactgggccgacacctgccccggcggatacgacgagggctattcgcgcgtcaaggcgatttatacagacatcgagcgcccggcgctcaagcaaaccaagtcgctctcaggggacgctctctggctcacctacttcgaccggcgagaagacgcccgcaagctggagcagttcagcaaggacattgctgacatcaaggacatgacactgcgtcaggacgcggccaccaaatacgccgcccggcaggtcatggcctatatcgccgacgcggtctttgacggaaaggggctccctgagcgatcacccggtgcaagcgccgaggatcgggagcggcagcgccgcatcttcagctccgacgggctgtggacgagccgcctccgccgcgagtgggggctgttctttgatccgcacaagggcctgtcgaacgcggaggagcacgagcgcaaggagaagaaccggggcgaccatcggcaccacgcgatcgacgcgatcgtgatcgggtactgcacggcggccgtgcagaggcgctgggaggcgcgggagcaagccgctgagatcgcgggcgtcaacagtgccgatggggagcagctggaggcctatgcccggtcgcacccgatcccgccgccctcgccgtattgggattggagcggtggctcggccgacgccgcgacgcgattcgtgcacgcgactgagaatgaccgcaaagatgctcgcgatcggttccggaacgcggtcaaggccgccgtgtacggtgacgaccagaccccgcgcccgatctgtcaccggcccgtgaagcgcaaactcatcggcgcgctgcacgaagagacgctgttcgggccggtgctggacgggcagggccaaccgaccggcaagtacacgtccaagaaaggcgtgctcgatctgacgcccaatcatcttcggatgcccgagggctgggatgaccttggggcctcgctcccgccgctcacgggcgacaaacacgccgacaaccttgcccgaaacccgacccttcgccgtttggccgcaatggaagacccgccgccgggcaagtccggcatcgtgcgggaccgggccttgcggaatcagctccggcgctgcctgcggtcggccgggctggatcccgacgacttcaccgccggcgaactgaagaaggccgtggacgcgggcaagatccgccacgcctccggcgtgcccatccgctcggtcgtgctgctgcgcacgatgagcgacccggtcatcatcgaccgcaaggcccccgactacgccaccggggcgatgcgtcccgatccagatccggcctcacgccgcgcgtatgtcggcgggaacaaccaccacatcgagatccgcgagaagaaagacaagaaggggaacgtcctctggacgggcgtgatcgtctccgcgttcgaagccgcggagcgcaagctcgccaaactccgcgcctttaaggcggccggggtccccaaaccggccgacctgcgagcgctgccgcggaaacagcgggccgcgtggcgtccgatcatcgccgagatcgagcgcacgcacccgatcgtggaccggcgcgacgacgatgcgctcggcggccgcttcgtcatgtcgctgtgcgagggcgagatggtctccatgctcgacaaacgcaccagggagccgggctacttcgtcgtcgccaagctcgacaagccgtcgaccgtggtgctcgtgccgcactgggacgcccgcccggcgggccagcggaaggacgccgacgggaagaagatcccaaactcggaacgcgagcagtttagtgccaacccctcggatcttgccgaacttgccgcgcccggccatcgccccgcggccaagatccgagtgtcgccgctcggagtgctgaccgtgctcgaccgggattgacagaccgtcgatcctgtggcacatttaccgtggttccgcgtgcctgcttgttcggaggcccgccgagtgatcaagcgcaccatcgagatcagccgcgagccgctgggcgtgcacctctccgtgcgcgacgggcaactgctcatcctcagaaagaccgagccgcccgtgcgtctgccggctcgaccgcccaacctcgccgggtccatcccctgcgaggacctcggcgtggtcatggtcgaccagcgcgacaccacgtactcgcactcggccctcgtcgaactcgccgagcacggcgcggcagtggtcctctgcggtcgcgaccatcaccccgtcggcatgtatctgccgctatcgaccaacacccacctgctctcgcgcctcgatgcccagttgcatgcgggcaagccgacaatcaaacgcctctgggcgtccatcgtcgccgccaaggtccgggcccaggccgcggctttgcccgatggtgacgacaccgccgcctgccgcgcccggctcgacgggctgtcccgcgcggtgcgctctggcgaccccgacaacgtcgaggcccaagcggcgcaggcgtactggccggtggtcttcgggcgttcacccttcatcgcccacccgttccgtcgagacgctggaggtcgcgtctgggggacaggcgatcgggccgcctcccccccaccccagcccccaaacaacctgctcgactacggctacgccgcgcttcgggccacggtggctcggacaatcgtggccgcggggctgctgccagccctggggatcaaacaccggggacgctccaacccattctgtctcgcggatgacctcatggagccgttgcgccccctcgtggaccgccgtgtgcgagcgctggccgagcgcggcgaactcacgctcgaccagccgaccaaggccgagctgctcactgtgctcactgaggaagtggcgtgcggcccgggcgatgatccggcgcgcggcccgctcatggtcgccatggtgcggtacgtcgcctcggtggtccgcgtgcttcagggccagcaggccgaggcggacattcccgcgctcccgcttgccccgtctccggccatcgcggctgcacgccgcgcggtccggggccaacgcggtcgagcgagcggcggcggatcggccaagggaccggtgccgccgccgaccgatgcggtcatggaccggcttgaggtcgattcggacgatgagcagacggactgaaccatgcacctgagtgggtaccggtatatgtgggtggttgcgatgtttgacctgccggtggcaaccaaggaggacaagaagcggtacgcacagttcaggaagcgtctgctgaagtgcggctttgttcggatgcagttcagcgtgtatgtccgcaatgcggcgagccgagagaatgccgaggtacacatggcccggatcgagcaggcagtgccggaggagggcgaggtgcgagtgctcacgttgacggacaaacagttcgagcggatgcggattttttggggaagaaaccgaaggcaaccggagccgccgccggctcaactggagcttttctgatggccccttacacgcaagcccatgcaacagaggggcttacgacggggagagtgtaatcgatcccagcccgcgagcaacgcgcaacgagtggctgaaaagacgtagaaaacagcgaagagtaatcgataccaaccagcaagcgacgcgcgacggcggggggaagaggggagaggaggggg

SEQ ID NO: 543 - DNA, 7237 bp, synthetic construct
  source 1..7237: mol_type = other DNA
  misc_feature 1..7237: note = Synthetic
cggtgctgcgcggcttcattgcggaacgcgaggcctatctgcgccaggccagggtcctggcgcaccccgagcaggcccaggacaagtcgcagctcaaaaagcccttcgaacagctcggcagcacggaattcccgaccaaggcgcgggtgctcaaggcgctgctcagctcgcggcatgaattcgaggtctcgctggccgagtacaacgaagccgacgcgcgccgcgccctacaaaatatagaggacctggggcgtcgtttcccggtgcacgtcgaggttgcggtggtccaggactgccggcagaagtttgaggcgttcgtggcgcgctgcgagcggtaccgccggcaggtcgaacaggtggccggccaagcggtcgaggcggccaggcgcggcgagccgaaaaccgccgactggcttctgcggcgcctgcgggccattcacgccctgacgccggtgctgctgtcggccgagcgctttgaggcgattgcccagcaaattcagcgcgtgagccagaagcacgcccagcgcgaggcccgcgccgcgctgatcgcgcgcgagcgggccgtggccgaccgcatcaagcgtgccggggccgccatctaccgcttccacaaggccagcgccgagttgccgccggagagcgaggagtaccagcgggccgaagcggcctacaacgccgcagtcgaagaagtgcggagtctggacacagactggctgacggggctattactggacttggagacttacctggacgacctgcacgaccccgaaggccgcaccgaaatgcaactggaccgcttcatcggaacagtgcgcgtagccctaagacaactccgccaagaaatccgcgcaataacggccgcacgccaacgcgaagccccctagccccacagcagagccggggcgtgtcgccccggaataccgccaagaattcccccatccgcacagtcgccgccccgcctccggcgtgtcgccccggaatgccgccgctaatctgtcatccgccgctcgtgcgggtgccatgcccaagcccgcgttgcgggcgcgggcatgccccggcagtaaccgcgcagagcagagtcggcgcgtgccgccccggaatgatgccaacgtgtcgcaactcgcctttatgcgagcagagccggggcgtgtcgccccggaatgccgccaacaagctcgcatccgcgcagtcgtccgccccacgacccgagcccgcctaatccgagcccgaagcgccagcgagggcacgtagcgtcctccccgaaaggtagcgtcggcccgccgcgaccacattcccacgttcccacattcccacgttcccacgtccggcaagactaaggactaacaactaacaactcttcgccctacattcccacattcccacattcccacgttcccactttcccacgttttcacgcgtgcgtgcccatcgttcagggccaccggctgatgcagcgcagaaagcctgaaaccaactgcaataaaaaaagccgcaggtcgtttgtgcgagctgcggcggtcgcccgaaggcggtgcctgcgattttctcttgttgcgtaaaatcgcgggcccggatcgattacacttgacataattttaattgcacgtcagagtcgctgtcaaggacgtttaggcgtcatcttctcttttgtggtggagcgaagcatgcctgcatatctgggcttggacatcggcagtaattccgtcggttcggcgtggattgacaccgacgagaagaccataacatgcggcataagcgtattccccgccggtgttgacgaatccgactataagcgcggtgagccgaagaacgtcaagcgccgcatggctcgccgaacccgcatcaccctcgcacggcgcgccgcgcgcaaacgcctcctgcggcagaaattgctggcagtcgggctgctgccgcgtgacgagggtgatttcaagcgtctgctggaaacgacagacccgtgggagcttcgaagcaagggtctcgaccacgaactaacgccacacgaattcgggcgcgtgctgctgcacctggcgcagcgtagaggcgcgttaggtctcaagctgccagacgcggaggacggccaagtcgatacgactgacgacgagggacgcgtgaaggccgcaatcggccacgtgcgcgcacaaatgctggaaaggaaggcccgcactttcggcgaattcatcgcgaaagtgcgtgccgagcgcgtcagccccatcacgactgaggaccggcgtccgcccgcccggcgcaagggcccgcgcgagtatcgcgacccgatccgcaaccgggcgggaagttacgaacactgcgccgatcgtgccatgatcagagacgagttcactaagctgtgggaagcgcagaccgcattcaacggagagacggcgcgcctcctgactcaggcaaacggcttgcgcaccgcgctggatgacgaagcgggtgactcaatctggctgcacaaaggcctgctgttcggccaacgccggcaatcctgggacctgggaacgctcggacgatgtgttctggagccaaccgagcgctgcgtacctcacgcggacatgtatgcctcgcgctacctcgtagtcgagacggtcaacaacctgaaaatcattgagcgtggcagagaagcccgcccactgacgcccgaagagcgacagaagatcaaggactacctcagcggaccgctgggaacggagcgggctcgcaaaaagcgtggcgataccggccccgtcgccgacaagccgaaaaccagtgtcactatcaccgacgtgcgaaatctgatgggctggggccgcgccaccagaacctcgcagtttcggttcaacatcgagtccgacccggatcgggtcatcaacaccggttggttcagccgcgagatcatccacggcgccatcacgcccgccaagtgggcagaaatgccgcagcgcctccgcgacggaattaatcgcgccattttaaaatatgatcccgatcacgagggcgctgctgacaagctcacactcggcgtaatgcaatggggcggactgaatgaaacgcaggcggatgcactggtcgccgcgtggaagcgccgcccgcgtccggacgccaaacgcctgaacatgagccgccgcgccgtgcggaatctactggcgctgatggaccgcgacgaaccctggccgaacccgcgccaacccgggcagacctgctggttgacgcaaatcgaggcgcgcaagctgatcgctgaagacgcggatttcaaggatgtgaccaccggcgcgccgctcgacctgcagaccagagtgcgctacgccaccggcgccaagggcgccactgcccgcgaccgctactacatgcagaagcaccttctgctgaagaacggcaagccgatcttcggccccgacggactgcccctggccgagccccctccggcaccgctgatcaccaaccccgtggtgcgcaaggctattcacgaggtgcgccgccatctggtggactacatgctgcgcttcgagcgcaaaccggacgcgatcgtcgtcgagctggcgcgtgaggcgcgcatggggaaggttgatgcagaccgcgttctgttccgaacccgtctgcgcaaccgcattcgcaacgacatcatcgccagttttggcctgggcgcgcttacgtccacgcagcaacgcgccgccgtcgcccgggttgtgctgtgtgtgcaacagggcggcatttgcccgctgtgcggcaatcagatcgtgacgactcagatcacccccaggatggccgccagcggtgaagggtgcgaggtggcccacataattcccaaggcctgcggtggggacaatggtttgggcaacattgtactcgcgcacacgaagtgcaaccgggacatggggcggcgcacgccgcgccagttttgggaaggcaccttccagggggggttcgaggaaggcatgcgctacgtcgaggggatctaccgcgacatcgaaaggcccaagctgtcggaagtgagaagcgccaccggccagtcgctttgggcctgctacttttctggacgccccggtcgatttggtccgacgtttgatgagctgaaaatagagcaattcacgaagagcgtcacggacattcaggagatgacgccccgccaggaggcggccaccaagtacgcgacccgccaggtgatgacctatctcgccaacgcactctacggagggcagggtcttcccgaacgtagcggccaacgccggattttcgcaacggatggactgtggacaagccacctacgacgcgagtggcgcctgttcttcgatccgcacgcctccagaaccaacggcctcagcgaggagcaggaacacgttcgaaaggagaaggaccgcggcgatcatcggcaccacgcgatcgacgcggtcgtcatcgcgctcacttcgccgcgcgtacaaaacgcgtgggagcaacgcgagcgaatggccgaccgtgacggcgtaaataccgccgacgaagtcgcgctggaaaactaccgccgcgcgcaccccttgccgcccccggtcccgtttgcgaacgcccaggaactgaaacaactggtgcatgcggccgtttttggttccgattccctggaacgccccgtctgtcatcgcccggtgaagcgcaagctgattggcgaattgcacgaggcatttccgcgcggccccgttttggatcgcgccgggtcgctcacggaccggttcacgaggcgcatcagcatcctggaattggaccccaaccatctgcgcgagccgcgtccggaaacaaagaacgaagcaatcaagcggctcgcggagcgccgccgccggcagactggtgaggatgagagcgcggcccgcaaatgggcccgggctgtggtaagcgcaagcggctacatgccggcaatcgtcgaccaaccccctggtaaaagcggcatcgtgcgcgatctggcgttgcgtcgacgtctgcgcgactgtttgtccgccgaaggcctcgacccggacaactttaccgctaaccagatcaagaagctggccgaggccggcaaggtaaggcacgtgtccggcgtaccgatccgttcggtcgtgctgctgtggaccattagcgatcctgtcctggcttctcgctgggccactgaccacggcaccggcaagcgccgcatgctgttcgatgcagtgacgcaccagggtgatgcccgcgcggccagggcctacattggaggaaataaccaccacattgagtttcgcgtcgcaccacagcccgacggcacagaaatctggtccggtaagatcgtgacggcctttgaagtcgcgcggcgtaagtcgcaacgcctgcgcgcgtttcgccaggccggcattccgaagcccggcgatttcaggaagctgccaaagtcacaacgcgcccaattcaaaccgacgctgcgggccatcgaagcggcgtacccgctggttgaccgctcaaatgacgatgccaagggtggcgaattcgtgatgagcctcgccgagggtgagatgctcatgatgaaacacaaagttacgggcaagttgggctacttcgtcgtcgccaagctcgagaaacgtggcggcaacaaccgggactgcgcagtgttggtaccgcattgggacgcccgtgcggccggagaacggaaagatgcggagggtaaacgcgtccctgactccaaacgcgagcagttcaccataacgcccgttgatctcaagctcctcgcgccacctgatcacccgcacgccatcaaggttcgggcgaccccgctcggagacgtttacccccttcagcgggactgaattcttcgggcacgcttgtcgatgaaatagcgcccgccatgattaagcgcacgctcgaaatctcgcagcagcccgttcacctcacggtgcgcgatgagcagctcctgctgttagcgaaagaggatgccccaaaacgcctcccggccgacccgcccggacttttggcgcgtgtgccgtgcgaggacgtcgcacttttgctggttgagcatcccggaacgacgtactcccacgccgcgctggtcaccttgctacggtacgatgcggccgtggtcatctgcgggcgcgatcacctgccggctggactgctcctgccgttttccgagcatactgaggtggtctggcgcattcacgaccagctcgcgctgcgcaggccgctgcgaaaacagctctggcggcaacttgtgcaagccaagatccgggcgcaggcgcgcaaccttccgtccgaatcaaacatccgcacacgtttgctggcgctggctcgcgaggtgcgctccggcgacccccaaaacgtcgaggctcaggccgcgcgcagctactggtcggcctatttcggcgacctgtttcggcgcgatcccgacggtgacggcatcaacgccctgctcaactacggatacgccatcgtccgggcggccatcgcccgcgccgttgtcgcggccgggctgctgccggcgctcgggattcaccacgccaaccgctcaaacgcgttttgcctggcggatgacctcatcgagccgctacggccgctggtagacgcccaggtgcacgaactggccgacgcgggacagacggaactgaacccgtctgcgaaagcccatctgttgcggctgctcacggcagaggtggtcaccgcgggccagggcggtccgctgctggtggccctgcacaggctggtggcatcctatgtgcattgcctgcaaggcgaagcccggcggctggagattcccgtggcgcttccgtgcgtccccgacgtttcgtccccgctggacgacgtcgctccggggcccaaatgatgcgggagacgcgcgcccgtgcagcttagcggctatcgttttatgtgggtgctggccatgttcgacctgccggtggatacgaagaaagcgcggcgggcgtatgcgcaattccgcaaggcgctcctcaaggacggcttcgcgcggatgcagttttcggtgtatattcggcattgcgccagcgaggagaacgcgaatgttcatacgcagcgcatacagcacgccttgccggacgacggcgaggtgcgcgtcatcacgatcaccgacaagcagttcgagcggatgcgcgttttttggggaaaaatgcgtcaggggacggaaaaaccgccggcgcaactcgaacttttttgaggccgttcagctccaacttctctctgcggcgcgggttacgcgggcaatagtgtaatcgatccgaacccgcgagcaatccgcaacacgaagccgcgcagcgcctgaggctgtcccagt

SEQ ID NO: 544 - DNA, 5439 bp, synthetic construct
  misc_feature 1..5439: note = Synthetic
  source 1..5439: mol_type = other DNA
ggcgacgaggttggtggggggcgtgggggggccggagggcgtgggcggcgcgggcggggggacgctggcggcctggtagacggtgttggggttgttctggctctcggcgtaggccttgataaagcggagggcgtcggaacccaggtcgctgagggtgttgagcgcgttgcgctggccgatggtggcgtttttggcggcgatgcgggcggcctgtgcggcgttgtaggcggtgcgagcggccttgatggcggtgtcgagcgcggtgcactgggcgggcgtgagcccgatggcggcgggcgcggcgatccaggaggcgatgcgctgctcgaaccactggatgcgttcgttgatctgatcagggaggacactcatgggcaactccttgtgttgtggcggcggcgcgatcgtcgcgtgccttgcacatggcagcatcgggcgttcgatggaggcactttcggggaaaaacaaaaaaaggcaggccgctggtacgggctgccctggtcgctcccttgcgggggcggtgcctgcgaattctcttgttgcgtgaaaccgcgggccggggtcgattacactgcaccgagtgtaacttgaacccgggcttgtgtcaaagcgaggcaccatgccagtgcaacatctcctcggacttgatattggaagtaactcggttggttcggtctggatcgacctgggttgtggtcagattctgacggggacatcgatcttcccggcgggcgttgttgaatcggatgagaagcggggcgacccgaagaacgcggcacggcggatggcccgccgggcgagaatcacgctccgccggcgcgcccagcggaagaggcagctccggctccggctgatcggggcgggattgctgccttcgacggcggagggctggaagacgctgctgggagggacggacccgtgggagctccgccgcgtggggctcgaccgggcactctcgccgcacgagttcggtcgggtcttgctgcatctatcgcagcggcgcggcgcgtcggggctggcgaccaccggccccttggatggggacgagcccgggggtgcaacacaggaggacggggaggttattcgggcgatcggcgaggttcaggcgaagatgctggcggcgaaggtccgcacgttcggggagtttgtcgcgtcgcagcgagagcagcgcgtccaccggctcccgggagccgaacgtgggccgtcgggtgggcggcgcgagtaccgcgatcgtgtccgcaacacgcgggacgtgtacgagcactgcgccgaccgggcgatgatccgcgaggagttcgggcggctctgggcggcacagaagcggatgggaggtccgacggccgcgctgctgaccgacgaattgcggctggcgttggacgatccggaccgtaccgctctggacaaggatcccaccgccaccgaggagcagcggagggcgtacaagcagatgttcaaggagggggggctgctgttcgggcagcgtcgcgcgacgtgggatgcggggatgctcgggcgctgcgacctggagccaacggagcggtgcgtcccgcacgcggatcggcacgcctcgaggtttcgggtggttgagatggtgaacaacctgcgcgtcatcgagcgggggaagccggtacggccgctgacgccagaggagcgagagaaagtgctggcgtacctgagcggtccgctggggatgacgcccgcccggacggtcaaggggaagcagcacccgccccgtccgaagcagagcgtgagcgtcacggacctgcgggagctgatggggtgggggagggcgacgaagaacacgcccgtccggtttagcatcgagtccgacgagaaccgcgagatcaacacggactggttcgcccgcgagatcgtgcacggggccatcggcgtcgaggcctggtcggggatgtccgaatcgctccgcgaggggatcaaccgggtgctgctcaagcgcgatccggcggagggtgcggacgaggcggcgcttcgcgcggggcttctctcgtggggggggctgtcggcgacgcaggccggtgcggtgatcgaggcgtggaagcggcggccgtcgatcaagagcaagcggctcaagctcggccgtcgcgcggtgcgcaatctgctgacggtgatggaccgccccgagccctggcccgacccgcattgcccatcttcgtaccggtggctcacgcagatcgaggcgcggaaagtgctggccgaggacggggatttccgggacgtgacgaccggcgaaccgatggacgcgatcacgcggcggcgttatgccacgggggccaagggcgccacggcccgggatcggcactacatgggcaagcacgtgctgatgaaggacggtcggccggtgatcgggcccgacggccgcccgctcgccgagccaccccccgccccactgatcgccaacccggtggtccgcaaggcgatccacgaggtgcgtcgccacctggtggagttcatgaccaccttcggacgcaagcccgaccagatccgcatcgagctctcccgcgaggcacgtctgggggccaaggacgccgaccgggccctgttccgcaatcggttgcgcgatcggatccgccgggacatcatcgagcacttcggtctcgacggtcgcacgcccacgcagcaggaggccgcgacgctccgcgttgttctgtgggcgcagcagggggggcgctgcccgctctgcgggggcacgagtggcacgctgaccccccgcgccgccgccgacggggaagggtgcgaggtggcgcacatcatcccgcgaggcgggggcggggacaacggccagtcgaacctcgtgctgtcgcataccgagtgcaaccgcgagatggcccgtcgcacgccgcgcgagtactggaacgccacgctcccgggcgggttcgcggaggggtacgcccgtgtcgagggcctctacggcgagatcgcccgtccccggccgacggacgcggtgagaaaggccgggggcgcgccgctgtgggcgtgctactttgacgtccgcgacgaccgccgcaagctggagcagttcgccaaggacgtgaaggacatccagggcatgaccccgcgccaggaggccgcgaccaggtacgccgcgcggcaggtcatggcgtacctggccgacgccctctacgacggcaagggtctccccgaacggtcgatgggcgagggcgacccggagggccagcggcgcatcttcacgaccgacgggctgtggaccggccgattgcggcgggagtggggccttttcttcgacgcgcacggcgcggcggccaaggggctcgaggagcaggaggagcaccggcgaaagcagaagaaccggggggaccatcgccatcacgccgtggacgccgtggtcgtcgccctgagcacccgcgccgtgcagctcgcgtgggacgagcgcgagcgggcggccgaggccgcggggatcaacacggcggacgcggaggcgatggaacgctaccgccgggcgaacccgatccccccgcccgaacccttcggcacgcgggaagagttccgcgaggcggtccgccgcgccgttttcggcgacggatcgaccccgcgcccgatctgccaccgcccggtgaagcggaagttgatcggccccttgcacaagcccaccatgtatgggcccgtactcaaccccgacgggacccgccacccgagcttcgtcacggtgcggatgcgaatcgccgatctcaagccggcccacctccgcgttccgcccggctgggacgaactaacggcgcggttccatgcgcagaacgtgccgatatcggaaagaacgcgattgagagcctcgctcgccgccttgcgcgatccggctcctggccccgggctcgtgcgtgaccgtacgacgcgagactttctcaggcgctggctccgggacacgggcctgagcctgggggtcgccgaaaatgccaactatcgcgtccgcggcggtttcaccgatgccgatctcaggcgcgtccttccgcgcgatcaggcgatcccgacgccgtcgggtgtgcctctccgtaccgtcgtcgttattcgtgcaatagccgaaccgccagatattcctcgccggcgttgggacccgaagaccaacgaggaaatcaaggagtcgtgtgctgccgcggtccgtctttacgacctccagaacaaccatcacatcgagatacgcatgtcaacagggcggactcgaaagaccaagtggaccggaaccgtggtgacggcatacgaggccgccatgcggaagctggcgcgtctcaagcagttcaaggcggtcggtgtacccaagccggatgagttcaggtgtccgggcgtgatgagcgaggccgacaagcggtcttggcgtccgatcatcgccgcgatcgagcgggcccacccgatcgtgaaccgggcggatgacgaggccctcggcggccggttcgtgatgtcgctctgcgagggcgagacgctgtacatgcggcacaagtggacgaaggagccggggtatttcgtcgtggccaagctcgacaagccgcagtcggtggtgctcgtgcccgattgggacgcccgcgccgccggcccgcggaaggactcgtcgggcaaacccgtgcccgattcccagcgggagtccttcacggcgaccccgtcggacctcgcctcgctcgccccgccggggcacccccacgcggtcaaggtccgcgtctccccgctgggcgtggtcacggtgctgcaccgggattgaacggccgacccttcgaggcaaaggcgtcgagagagttcggtttgggggagggagtgggggtggagggagggtgagtcggtgatcaagcgcaacgtcgagatcagccgggaaccgcacggggtgcatctgaccgtccgtgacgggcagcttctggtgctgcggaagctggagcccccgcgaccgttgcccgcccggccggcgaacctcgcggggtcgatcccgtgcgaggatctcggcgtggtcatggtcgatcagcgggacacgacgtactcgcacgccgcgctggccgcgctggccgagcacggggcggcgctggtggtctgcgggcgggaccaccttcctgccggcatgttcctccccgtcgcgtccaacagccaccttctggcccggctcggcgcgcagctctcggcttccaaacccacgcggaaacggctctgggccgagatcgtcgcggcaaaggtgcgtgcccagaggtgggcactgccggagggcccggacaccgacgcgtgccgagccaagctcggagcgttggcgcgggcggtgcgctccggggatcccgcgaacatcgaggcgcaggccgccgtgcactactggcccgtgctgttccgccgatccaccttcgtcgtccatccgttccgccgccggccgggggaagggcaggccccctcgggcaacgacccaggacaggcaggggtggggatgggggtgggagtggg

SEQ ID NO: 545 - DNA, 5087 bp, synthetic construct
  misc_feature 1..5087: note = Synthetic
  source 1..5087: mol_type = other DNA
ccaagccttgtgtcagttgatcgccgcggcgaagcggcaacttggtcgttgttcgcgcatgaaaaaagccgccaccttgcggttgcggctcggttgccccgtggggcagtgcctgcgaatgttttgtcttgttgcgaaaagactcacagaacttggcgtcacgcagatttgctgttgagttgtggaattgcttcgccgccgtaggatcttgtttcaattgacaaaaaaaccgcaggtcggttgtgcgagctgcggcggtcgcccgagggcggtgcctgcgatttgtatcttgttgcgtaaaaccacaggtcagggttggttacacccggtcgcatagtagccagccgaaaccggtggtcaagcaaggcgaagacaacatgacgatctcaatgggactggacgttggctcgaattctgtggggtccgcttggatcgaccataagaccggcaagatcacggttggcttgagcattttcccagcaggcgtcgatgagtccgacgagaaacggggcgatccaaagaatgccaaacgccgtgcgacgcgtcggtcgcggatcacgcttgcgcgcagggctcagcgtaagcgactgctccgcctgaaactcatttccgtcagcctattgccagcggacgccgccgagttcaaagaattgttgcaggataccgatccttgggaactgcgacggaaagcgctggcggtcgcgctcagcccatttgagttcggtcgggtacttctccatttggcgcagcggcgaggtgctcttggattacgcatcattgatccggacgaccccgatgcgacggacagtgatcgcgaagacggaaaagtaaaaaaagccatcggcgaagtgcagtcgcagatgcggaaatgcggcgctcgcacctatggcgagttcatcgcacaactgcgagacacgagtgtcacgcagatcacaaccccagacaatcggccaaagggtcgtcgcaatggaccgcgcgagtatcgcagcgcggttcgcaacaaggctggaagctacaagcattgcgcggatcgcacgatgatccgtgacgagttcgccaaactgtgggaggcgcagaaacgtctgggcgggccattggccgaaatcctgagcggcgaattgcgtctcgcgttggacgacgacgctcgcaattccgattggcggcacaagggtctgttgttcggccagcgaatgcagacgtgggacttgggcacgctcggccgttgtgttctcgagccaaccgaaaggtgcgtcgcgcacgcggacagcattgcttctcgttacttggtggtcgagacaatcaacaatctcaaaatcatcgagcgcgggaagcagccgcgatcgctcgccattgcggaacgaagcaagatcaagaacttcttgagcgagccactcggcgaggtcacgcggggaaaacaaaaaggtcagcccaagcgctcggtcacggtgacggaccttcgtgacctcatggggtgggggaatgccagcaaaacatcggcattccgcttcaacatcgaagcggacaaggaacggtcgatcaacaccgattggttcagccgcgagatcatccacggggcaatcacggcagcgaaatggcaacaattgtctctgcggtcgcgcgaagggatcaatcgcgcgatcctcaagcacgatccagatgacgaaacgcacgacgagaaactgaaggcgttggtcatgcaagagtgggccggactcaaggaagcgcaggcagatttgctggttgccgcgtggaagaagcggcctcggcccgacgccaagcgtctaagcatgagccggcgcgcggtgcgcaaccttttgaccgtgatggatcgggatgaaccgtggcctgacgcggaccaaccgggcgagacccgctggctgacacaaatcgaggctcgaaagcggattgccaaggatgaaaactttctggatgtcacgaccggcaatccgttggatgaacatgctcgccgccgatacgtcaccggaaccaaaggagcaacggcgcgcgatcggcactacatgaagaaacacttgttgatgaagaacaaggagccggtttatggccccgacggcctgccgcttcacgaaccgccgccagcgccactcattagcaatccggtggttcgcaaaaccatccacgaggttcgccgccacatcatcgactacctcaccaaccttggctgcaagccggatgagattcatgtcgaactcgcgcgtgaagccaaaatgggaaagaaggattccgatcgcgtgctgttcatgaaccgcttgcgcaatcggattcggaacgacatcatcgacgtccacggactcagtgcggtgagcgccacgcagcaacgtgcagccgtcgagcgtgtcgtgctcagcgtccagcaggatggagtttgtccgctctgcgggaaccagaaaatcaagaccaagattacacccaggatggcggcgaatggagaaggatgtgaggtcgcgcacatcatcccgaaggccagcggaggccataatggacttggaaatctggtcctcgcgcacaccgcctgcaaccgtgacatgggccgccgcacaccccgccagtattgggaggcaaccctcagcggagggtttgacgagggattccgttggatcgaggggatctatgcggacattcaacggccgagtccgtggaccgtcaatgaggtgtccggtgatgctctgtggttgtgttatttcgccggcggaccaagccgctggggtccaacgtatgacggcttgaaaatcgggcagttcaagaaggacatcaaagacattcaggagatgaccgagcggcagggtgccgcgaccaaatatgccgcgcggcaggtcatgacgtacctcgccgatgcactttatgacggcaagggattgccggaacgcagcactggcaccgaacagaatccggagacacggcgcatcttcgccaacgatggtctgtggaccagccgactgcgccgcgaatggggactgttctttgaccgtcatggtgccaaagcccacgggctgactaatgaacaagagcacgaacttaaagagaaaaaccggggcgatcatcgccatcacgccatcgacgcgattgtgattgcgctgtgttcggagcgagtgcgtaaagcctgggacgcccgcgagctggcggcggaccaagcggacatcaatacggccaatgaagaggcgatggacaattaccgtcgccaacatccgctcccgctgcctatggcttacaagagtcgcgacgaactccgcgctgccgtgcaactcgccgtcttcggcgagggaccgctcgaacgccccgtcgcgcatcgtccggtgaaacgcaagctcatcggcgcactccacgaggagacattgtttggtcccgtcgtcgatcgggccgggagtctgaccgccaatttttcggcgaagaaaagcgtgctccaacttgatccgaaccacctgcgaagaccacgccgtgagaccgaaaaaaaggcgattgagcgactggccctgctgcgattgaaagagaaatcgggtgacgagaaaacggctcgtaaatgggcgcggtcagtcgtgtcatcgctgggctaccaacccgcgatcgtcgatccaccgcctgggaaaagcgggatcgtccgagatatcgcacttcgcctgcgcattcgcgattgcttgagcggttttcaatacgccaagcggaataagaacggagaacaggtcggcgaggcgcggtcgatcaacccggatgacttcacggactacgaaatcaagcaagcattcgaagcgggagccatctgtcaggcatctggtgtgcccatcaactctgtcgtccttctgcgaaccatgagcggcccggtggtcatcgaccgcaaacgaccggattatgcaacaggaaagatggttcatgatgacgacccagcttcaaaacgcgcgtatctgggcgggaacaatcaccacgttgaaatccgagttgccaagaacaagaaaggtgacgaagtctggtcgggacagatcgtgaccgcgtttgaagccgcgcaacggaagctgacaaagcttcgcgccttccgtgaggcgggtattccgaagctcaaggtgctccgcaaactctcgaaagccgaacgagcaaagtttcatgccgagttgcgccgcatcgagaccgctcaccccgtcattgaccgttgcgaaaatgtggacaacggtggcaagtttgtgatgagcctctgcgaaggcgaaatgctcaagatgaaacacaagcagaccggcgaagtcggctattttgtcgtcgccaagctcgacaaaccgcaaagcattgtcgtcgtgccccattgggatgctcgcgccgcgaccgagcgcaaaggctcggatggcaagaaagtcgcggattccaagcgggaacaatttgccgtgactcccagcgacctgaaagacttggctcctcccggtgaggatcacgcggtcaaagtccgggtcagtccgctcggcaaattggtcgtcctcaccgactgagaaaaggaaccgcgcgctgttagcggcctggtcgcccagccacgggacaaccaactcccgtccggcggcgttgtccgcccacatttgagaggacatttctcgcctcaaagccttaccgctcagtcggtcacgtcgtttgaccggtgtcggtgcagttttgccccgtagtcttccacagttgaccagccggcgagggctgttgaccggtcgcggcgctgcgttgaccggttcggcacgaggattgaccagccgggaaggtcaattgaccggtcgagatggtcggttttcctgggaaatgtgaggcaactacaggtcaacgggcctcagcttcaggtcaaccgccttggccagcagggcaaggggcctcactggcagggcaggtcgcgatcccgccccggcaattggcctcgactgccgggcaaatcgcgtcggctggcggtcaaccggactcgctgacggggcaaggaacctcgccgactgagtctcgaagcatcatgaggcgtaaagcaggctcgccgacgcggcagcggacctcgatgggaggtcaagggtgtttttcagggggattgaccgacgcgccgggcaagttttgcccctttggag

SEQ ID NO: 546 - DNA, 15488 bp, synthetic construct
  source 1..15488: mol_type = other DNA
  misc_feature 1..15488: note = Synthetic
acgatggcgggaaggcgcacgggctctggcgaggcaaagatgcggtggcgtttgcgtgtggccatctttcgactgtgggccgcgattcttgtccaaagcgcgcgccacgctttcggattctctccgagcgtggtcaagtaattctgtagagcgcgcacgcgaagcgaacaccgcacatcaaagcgtgggagcgtcacgcagagcgaggcgaagtcgcggcatcgcgtttcgagaccagggagactgcggtggcagcgggcgtctgccaaatcgaggaagcccaccgatggacacgcccctacgtcgtagtacacgtgtttgctgaacaaagatgggaagctcatgtgagccagatgcagacgtgcaatggcttcaccgacctcgcgcgcaactcgatgaagggcggcatcgctcggaagctggtcggccgtgagcagttctaaaagcgagtcgcccgaaagagcctccatgacgatgaagccttcgcgcggaatggggcctcgtcgtcgctcgccgcatgcgatgggcttcgggacccgcagcccgtgagatcgagcatggcagagcatgcgaaactcgtgcacgggtggtgagggcggtcgcacaccgccgtggagggatgcggctgcgaacagatcacgagctcggatgcccttgatgctcttgtcgaacacgcgcgcttgttgcggcccgtcttcgcgccaggcgttctcccgtcgaggggaggcgttgaacacatggcgagcctccgtgggcgcgcatccgtccttctcgagatagcccttgctcctaagccactcctcatattcggggaaaatccaaaagcgccacggatccgctcgtcgctcctcggccggcgcagtgatgagtggatcatccctcatagacggcgtccgtaatcgatagggaagcatcaatgattgcaaatccctctcgaagttgcgcttgcgtgatggtgagaggtgggttgcaaaacagggtgctctcccacgtgagcgtaaagagcccacgctgaagcaagtccttgcgtagcgctcccatcgccgggtgacttccccggaaggggacaaggagatcacctcgaccgttgcgctggagttcgaggagcccgaagagcccgatggaacgtccgactttgacggacggatgccgcatccgcagacgctcgagttcttccgccatgaccggtgcgagagctgctgcccgttccacaagcctttcctcttccatgacgtctaagaccgcgagggcggtggcgaggctcagtggatgagcgttgtaggtgagccccgcccagagcacgtggtcgcgaaaatgagcagcgatgggatcactgacagcgagggccccaaggggtgcgtagctggaggtgaggcccttcgccatggtcaccatgtccgggatgatgtcgccgtgttcgaatgcgaaccagcgcccggttcgaccgaagccactcatgacttcgtcgcacaccaggagaatgccgtagcgatgtaggagggccttcaatcccgcaagccatcccttcggcggagcaagcacgccgttcgttcctgtgacggattccacgaacatggcggcgatggtctccgcgccctcgcagcggatggtctcctccaggtagcgcaggtgggcttccgtgatgtcctcggtctgctcggcgaaccggaactcgtggggccaggggccaagcacatggacaaagcccgtggcggaggagtcgacggcgatacggcgataatccccggtgaggtgcaggcaggctaggctgccgccgtggtagcttcggtaggaactgagaatcttgtggcgtccggtgtgctgccgcgcagctctgatcgcagcttcgttggcatcggcgccgccgagcgtgaagaagaacgtgttgaggtccccgggcaacaggcgcgctaaccgctcgccgaggcgcgcgcgcacaagggtggcggatcccggccacgcgaaaatcggaccggtgtccaggaagcgcttcatggccgccaccaccttcgggtgttggtgcccgataagcacgctcatcaactggctgttgaagtccaagtagcgcttgccatcagggtcgtagaagtgcactccctcggcgcgctctatggggagcgggtcgacgcgggcggtagcggaccaactgtagagcgtgtggtccaagcaagcgcgaatcatctcgtgggcgtccatggggcccactatacgggcttcacgcctgcgaccgcgcgcgcctgagcgaagcgcgggcgagccgcaggacccgccgcgcagaggagacaacgactagatgctgatggggaagcagccgctcacgttgctcacttggaggatggtcgtgccggcgcccgcgccacccacttcgacgctcaccacttcaaccaagatgggaagtcccacgcaggcggtggggaaggagaacaagtaggtgcccgaggcgtccgcctggacgtggaacggctggctgcccaggggcaggaaaacctggccaaacgcgtccatgcccacaccaaacagggggcctgcgccgctggagcaggtcagggagaccaagttatagatgcggccgaaggggctcgcaccggtcacgaggacgacgatcggtccgcagttggggatgtcctggcccgcggacagggtaaaggtcgggcaaccgccgacgttggaagcgccgggagtcggcgtggtcgcggcgaaggtgttggtcacaagaggaccacccgagccgtctgggcagcgctgaatggagttcgagtccgaggggccattgccggcctcatccacctggggctggccgggggtcatggcgaggaggcccgcatcggcgggatcggcggtgctatagaccaccgcatcgacgagattcgccagcgtgacagccgtgccattggggaagttgaagatgctgtcctggtagatcgcgacggcatccgcgccgttctggatggtgttgttggggatcaccaggcccgcagccggaacgagggcggcgttgccgacgaggaagtacccgttggcatcggtcgtgaaggcgcccaggtccaaggtcaggtaggactgatcgttggagccgttgtagaacaccatgatgtatccagcgagggagaagttgggcgcggcgagcaactcgacgaactcgagcatgtcggtgccgggggtgtcggaatcgagctcgttgatgatgacttggccgttcaggctaagggaggagcagaggaggaccgcaagcgcgatcttttggaacttcgtcgtgagcatgggggtcgtctccgcgccgggagaaggctgcgccagggggtcccggcgctggattaggggtgtgtcgcgcagccgagtcctaacctattggctgaggggcgggagggaaaggggcggtccgtaaggatcgcgtgaattttacgtcgcgtctactggaagacgagcacgaatgggggagtgaccgctgcccgagccgcatcgattccctggaaacagaggcccagccccgggctgatcgggggcacgggcagcacaaaggagcccaatccggaagcattggcgaaggtgggcggtagggagaatgcgagcaggaagaccgggtcctgaaagtcgttcatgaacagcgcagggaagctgcccggcgtgttgagaacggcgaaggaagggaggaggggcgttcgggaggtgaatcctccgatggccgaggtctgggcgattttcgccaggagatagaacggcccattgggcgtgcagccgccgaagtccatcttgacggtgcctggtgtcacagtggtgacttcgagggcctggatcaccggcggcggcaagacggccgaggcaacgagactggcgtcaagggccgtcagcgtgctgttgggccccccctggaagtcggtgttggcaaggccgacagccgtcgcgctcccaaaggtcacgccgccgtaggccgcgacggagccgccgaagcgcgagctcaagatccgagcgccccaagtggcgttgtcagccacgaaccagaaattcgggagaaccaacccggtcggacccgagaacgtgccgccggcgggatcgatagtgaggccgtccaggtctccgacggcgccaagtccggcaatcgtccccatggtgtcgagggtcgactcaaacagggcgatttgcgcgcctccggaaacgacgctcgccacggttccgttggcgttggtggtgtacgcggccgcaggcagacggattaggccaccgtcgtccaaggaaatgccgttcacaagctgggtcgtggtggttgtccagtagagatcccccgtagcgctgtggatggtgaatccgttgatgtcgagggtcgccgccgtggtccccatcgcctgggcgatttgggcctccgtgatgaacttgatcgctccgccaccgggaaggggccggacaatgtcgccgtccaggatgggtgtcccttgctgggcccccgatccgcccacgtcgttggagaaagaaacatagtaatcgtagaggctcggggggttcggggctccggggacgagctgcgccgcgtccaggtttccgatgatcgactgggtgtagtttccgtccgcgttgtcatcgccgaagagcgagggccaagtcccacgatttgcgagaaaggtcgccgccggcgttccagagctgttcggatacgccatcaacagggcctgatctcgaaagatcgctgtggcgttgcccggggcaagcagtgttcccccggcaccggacgaggccacctcggctccatccgaggagaaagcgagacggagagtggtctgggcaaaagcttcggaaccggtgatcaggctcagcgccaagagaagcgcgctcgtcgtgactttcatggggggcatccgggaggggcgaggtttgggcaggtcgtgtggcgctgggaccgcagggtcggggccgccaaaagaaacgtcgtgcctgcactttatatgattccggcccgatatctttctgttttgctaggagatggggcactttcgcggcaccatactccatgatccctgctcaaaggtgcctaacgcggtcgcttatgaaagcccatagcgggaaagtttgtgcctcggggcgacgcccggcacgactttccgataagatcagacagacggaccggtcacccccctactccaacgttgcaacgcgcgccgtgctgctcccggctcggcgctcccaccccggagcgaaagtcgtatgcgcatctccttgtcccttgccctcgtcgttctgctcggaacgatgcctctggctgcccaaatcgtggcagaggttcgaccgagcggtggaaggtccgacatcgtggcctacaccacggccggtgaagtgctgatcgcttccaccgggaacacagttgaaaacctagcggtccgaccggtgccctacacggaggtggccgcggtcacctggtccgagatctcggagggccgctcgattcctcaccaagccatcaccctcgacggtcatgagtttcgaggagttggtcccacgtcctacgacctgctgctccgttatgccaccttcgatccgttggcgggcagccccgtcgtggcgccgcacctcaacgccaacatgggtggtgagctttggattgtccagtactggacccaaggcttggaggagtatcgcagccatctgacgctcgcgggtgccagcgtccactatcccctctggaacaacgccaacattgtccgcatgaacggtgcggttgccgcctccgtgcaacggatgccgttcgtgcgagccgtcatcgcgtttcacgcggcctacaagctcgacgaaacgctgcttgtcgagcagcaccagggatggtcctccaccggtcgtcgcccagtgaacgtgatggccatggagcgtggcctcgcggcgcaacaggagatccaggagcaaatccaggttctcggcggcaaggttgagcagctcgacccggacactcgcatcctttgggcaaccctcgacctgcgtcagatcgccgaaatcgcacgtcttgactcggtccagtggatcgatccgcgcacggaaacgagcacggatatggatctcgcgcgaacgggccacggcgccactttcattgagaatgcgggcggctttgacggggcgggtgtgcgtggcgaagtcttggacgtgggctgcaacacagctcatcaagagtttgcagcgactccgctgcttgtccacggcaacctcatctcggcatcccacggcacgagcacgacagggcaagtcttcgcatcgggcgtcgatccccaagccaagggcatgctgcaccagggccagggcatcgctgcctactccagcggcatggtgggcactcgttacaaccacagcgccgagctagtcaacccggccttggcttaccaagccgtgttccaaacgaactcgtggggcagcgctcaggtgaccaactacacttcggtctcctccgagatggacaccatcctcttcgacatggagagcctcctcatccttcagtcccagagcaacacaggcaaccgcacgtcccgcccgcaagcctgggccaagaacatgctctccgtgggtgccgcgaagcacgttaatacgctgtccacggccgacgacaactggaccggcggtgcaagcatcggtccggcggaagacggtcgcgtcaagccagaactcgcctcctggtacgacaacctgttcaccacgacgaccccgaacccgaactcctacacgagcagcttcggtggcaccagcggtgcgaccccgatcaccgccggcgcctgcggcctcttctttcagatgtggtcccagtccctgttcaacaatccgtcgaacggaaacgtgtttgccagcgctccgaagaacaccaccgcgcgcgccatgatgatcgccagctccacccaatggaactggacggctggtggtcccaatggggacatcgatcgtgataagcagggatggggtcgcccagacttggagcaactctacaactaccgcaacaagttcttcatcgtgaacgaggccgacctgatcaccaacctccagacgaacacctacgggatcgccgtcccggctggtgagtcacaactcaaggtcactctcgtcttccgcgatcccccaggaacggtcaacgccaccaagcacttgatcaacgacctggacctcaccgtgacgtccccgacgggcgtcgtctaccggggtaatttcggactcacgaaccatgcccccggtgctacgggcgagaacctctggtcggttgccggcggaaccaaggagaacatcaactcggtggaaaacgtctgggttcagaacccggaggtcggtaactggaccgtcgcagtgaccgcggccggcatcgtttcggataaccacccggaaaccgccgccctcgacgcggactacgctctcgttgtgatgggctccggcaccgtggctccgttcttcaacctgcaactcgcgaccaccggtctgggggatgcgagcgtcacgatctcgaatgtcccgtcagggaccatcgagggttacacgctcctttccgagcaggccaaccatcccttgggttcgggcgccttcttcggtctgaagccgacggccacgaccctgactctcctgggccagcctgtggtccccggatcactcttccactggcaatggcctgtgagcggtttcttcccggacaccccgttcgcggtggggccgggcacgttgcccccggcgatcctgcccatcgaggccatcggtatcgccatcggcccgggcttcaccctcacgggtgtgaccccgctaaggcgcctgcagtagtcattctgggatcgacccggacctgaaatgccgcgccgcaaattctgcggtcgcggcatttttattttccacgccacgggcgcaaggtgaaaagaactcctgaaaactcagatgtgctctgagcgatgcgccctttccatcagaagggagctgcccgaagcgataacgaaactcggcgcgctaccggccgtccttcggcagcgtgctgttgcgagcgtgggctttatcgaaccactgcagcgcctcctgttcgcgtccctgaccgcgccgcgcctgccccatgagatacgcggagatggcgtcgtccggccattttgccaccatgcgctcggtcaccgtggccgcttcgtcgaaactccccgtggcaatcaaggactgagcgaaaaccgtctccaatccagcattcgtaggttgggcttcgtaggcgcggcgcaacggtccgacaacctccggaactttcttcgcccaccctccagccacgcggaagtagtcgcgggcgagcggtgagccttcgacctcgggcaagagcttggcccacaggtcgacggccgcttcgtacgcaggactcatcaccccctgatcggccgccgcaagggccgtggcgaggacactttgcctttgggcctcgtaggtctcacgttgttccgacgacaggtccgtcgcttcaaggatgcgcttcatcaccgcatgcgcaggcacgatttgacctcgtgccacaagttcgcggatcgactcgtggaccgattgcccggctttgccctgctcctcggccttgcgcaagagcatcgcggcttcaccaagacgctcgtccccttggctcgccagtaattgaccgaggtgctggtaggaattgccccagtgcgggcgcagctcgatcgccgcgcgcagggcggcttctgcgccagcgctgtcaccaagcgtcatcagcagccatgcgcgttcccgcgggatgcggatgtcctccatcaggccgtaggcctccgccgagtctaaatgagccagggcgcgccgtgcatcctctgcgtagccggcggtgtgcagctccgcgatgctcgggtcttggcgccaggccgccagagccaccgagggcggagtgtcttggacggtggccgacacgcgccacatcagggattgaatccacgcactgtggacgaggaacaaaagcaggagcgcggtgacgctcgcaaacgcaacgccggatctgcgccacactccctcagctttgagaacataggattgccacttcagctcgggccttcgcacgagacgccataacaggaccatggagaacgcggtcaccgcggcaatgcctagagcgaacagaagcggtgtgagttctaggtacagggctccggcccacgggacgatgggctccggtaggcctcgcaggatgaagagcgttacgacgaacacggcgacgagagccaattcttcttttccgctgaagctccaatcctttggtcgcaggtgcttgatgcgggccttctttgcgatcgcaggtcgcccaaagcccaggtagagcgcattctccgggcaggtgctcacgcagtccaggcacttcatgcaccccgggtccaccaccattccgaactcatgcacttccttatgcactaaaacgttggaggtgcagactgccgagcagtgcccgcatcctttgcaggcatcggtgacgcgtatccgtaggggcgcgaagggctccaccacaccgaacagtccaccgtacgggcatgcgtaggtgcagaaacccttggccccgagcaagtagaccatcccaaaacccgtcaacaggaaggtgagggtcgccaccatgggacccgggaacgtttcccaaaactcggacttaaaaaaatcggggacccaaggaggtgccggattcttatgagcccaccgcacaaacaccgggaagaagaacaggtgaatccccgccagcaggggaacccacatgagccaccgagagcgcagcggttttgggtgaatccccaccttcttcagcatccaggcgcacagatcttgcaacgcgaccaggtggcaggcccagccgcagaaccaccggcccaacaccagcgagcttccgagcgaaatcaacaggagaattgctcccgcattcacggcccccgtggccaaggtgtacatggcctcgctcggctccagaggcgtcaacgtctcgcccttcaacttccaatgcagaatgtgcgcgaagatcgcaacgtgaaccagcaccaggacccaagccctccgcttgcccatctttgaccgcttcacgcggcctctcttcaccatctctccggaaaattccccctccctcagccaatcgacccctcctccctcctcgcaccccaccgcacccttcttcacttccgtttccatctttcggctcatgccaaaagcctaccaagactcgacgatctgccgagcaggcaggacctccggacaaccactccggctcgcatactctcagccgctgcccaataaaaaaggtcgcgggacaagcccacgaccttgggtacgctccgatgtttccaaagggcgaagctcacggcagaccgaagtcatgccttactgtgtcaggccgacaacggacgctcacatacactgcgggtatggtaggctctgtccgcggggcgtcaaggcgacaacctgccaaattttctgtggagagatctcggatatggccaatccccaccggccctggatacttggaattgaccttggcacgaattccctcggttgggctgcacttgccttagaggacgatggctccggtcatccggaacaggcaaaggtcactggttttctgtctaacccccacgatccgaaagcgcctccgaccgtggggagccgcatcttcgaagcgggcaaggagaagctgggtcaggggcagggcaaggagagcaccaggaacgccgcccgacgccaggcccgacaagtgcgccgcaacctcatgcggcgtgagcgccgactacgaaagacctttaatctcctggtccacgcggggctcctgccagacgtcggccgtcacgagacggatccttccacccacgggggctccctcgaacgcgatggggtgatcaagaacctagacgcccagttgcacgcccactatcgttcgcaggttctggagtcagggggcgcagcggattccctgaggatgctcgagaatcttccctacttcctgcgcgctaggggcttggatcaaccgctcactgcccacgagtttggccgagtcctgtatcacttggcgcagcgtcggggctataaatccaaccgtaaggcggcgaatgcggacgaggaggaggacggcgacaagagcccggcctcgggtcggagcgatgcgccgtccaagaaaggaaaggtcgcccagggaatcagtcaaattgacgaagccatgaaggccgcgaatcatcgcaccctgggagagcatctcttgcacgagacgccataccgtcgccgcctccgggcgcgctggaccgcccgtagcatgtacgagagcgaatttgaaactctttggtccaagcagcatggcctcgggcacttgcctatagatgacaccataaagaaggcgctccaggacgcaatttttcatcaacgtcctttgaagagccagaagcacctgatcggcttctgcaccctggaagatggtgagcggatggtgcagctttcgacgggcgagctcgtgagaacccgtcgccgtcgccggatgccccaattcttcattgaagctcagcagtttcgcctccttcagagcatccacgaccttcggttcaaggcaccccttgaacctacgatcctccccttgagcgaacgcgagcgcgaactgttgcgagaggagttgactgcgttcctcgccggaggcaaggagccgtcagccaaggatctcgtgaagtctgccttaagggataaagcaccgggaaccctctccatggacggcaagcgtggcgtcaaggccatcactgcggaggagatccccaatctcaagtggatctgcgagaacttcggggccgccaccccactctcggaggagcagaagaacgtcctgtttcttcacatggagatcacttcctcatgcacctgggcggaattgaaggcccatcttggtttgcccaagaagggcaagttcacggcggaggaaggaggaggtaataagtttctcgggaatcacacttccgcacagttctacgaagtcttccagagccgttggctcacggcaaccgaggagcagcgcattaaagtggttgaggagtgctattccatcgatgacgatgtggccctgaagcagcgcatcaaagacggtaaggggccctggcgggccattaaggctgagcccacggatggggacaaggtgctccggatcagtacacctccggactaccttgcctattcccgcacggcggtgaagcggctgcttcctcttatgcgttcaggcatggacctcacggcagccaaggccgcgctctacccggaatccgaggggcaggagtcctgcgaactgttgccaccggtactcagctcgcttggcgatacccgcaatcccgtggtccaacgggctctcacggagctgcgccgcgtcgtcaacatgctgatcaaactctacggcaagcccagcttcatccgggtcgagatggccagggacttgaaggccagcgtcgatgagcgcaagcgcagacaggatcagatgcgttccaacgagaaggagcgcgacagtgcgcgggcggcgattgctcctctgatgcccgggcgcgaaccctccgccagcgacatcgaaaaatatcgattgtggcaggagtgcggtggagtttgtccttacaccggaagatccattgggatggcggctctcttcggggcaggaacggatgtcgacatcgaacacatcattcccttctccatgtcccaggacaactccttcctcaacaagaccttgtgctatgccgagttcaatcgcactcgcaaacgcaatcagactccgtggcagactctccatggaagtcccgacgaatggaatctcgcggtctcgcgtatgaaaggcaaccaggctcgccgcatgcatcctgccaagttggagcgctttctactcgacgacgaccagttagaggatttcctcggagactttaccagccgtcagctcaacgacacccgatacgcgtctcgccttgccattcgatacctcgctgaactctatggcggcgttcttgagcgcggggtagaccctgccgggcgtctgcgtgttcaagcggggactggaggcgtgacagcgactctccgttcggtccttgggatgtccagagccttgggcggtgagatcaagacgcgcgacgaccatcggcaccatgctatcgacgccgtggcggttgccctagcggggccgagattcatccaggccatggcccgttcctgtggccacagctaccgcgccgccttcggaaagctcgggcccatggaaccgccatgggagggtttcatgagcgatctcacccgagcgatcgaggtcacagtcgtctcgcaccagaaccggaaccccgtccgcggagcccttcacaagggaaccaacttcggacggcgcagggatgccgacaccggtcgcgtcctcgaaggcgaagctgaagaaacctcaggcaagtctcgtgtgatctaccaccagcgcgtgccgctgaagtcccttaagcagaaggaaatcgagcagatcgtggatccggtcgttcgaatgaaggttctgtctgcagtgggtgggggcgatcctgcgaaggtctttgcggatgaatccaagctgccacgcatggattctggggtcgtcattcgtcgtgttcgtgtgcggtacggagatgagcgccgctcaagcttcgggaagggccaccgccgccgcgactgcgcaacctctgaaaaccatcacgcggtgatctgggaggaagaaaatcgcggaaaggtgcgctggaagtgcgagattgtcggccttgcggaggctgcccgtcgtcgcgctgccaaagagcctatttttcagcaagatttgggcatgggcagacgcttcctgtttcaccttcaaaagggggatgtactaaattttccaggcgatagtcgagtgccttttgcggtggttaaaggaatctcaccgctgggtacgggatctgccgatattgagttaaggcctcttgctgatgcccggtcctccggaaacaaaaagcaggacattgccggatttgagcgaatcaggaagactcctggttcactggcagatgcgggggctcggaaggtgacggtcgactgcatcggccgcttacgtcccgcccatgctcaatcgaatctttgacctctccgagcagccatgccgcatctccgtgcgcttgtccaacttgatcatcgccttgagcgaggatcaagaggtgtctgctccgctctctgacgttgctgtcgtgatcgctgcccatccacagatcaccatcacgcagggtgctgttgctggattatgtgcagccggtggggccttgatttgctgcggttctgaccgacttcccatcgggatgatggtgcctctcgtggggcacaccacccaggtcgagcgtatgagtgcccaagtcgcggcctcattgccggtgaagaagcggatttggcagcagatggtccgcgcgaagttggagtctcaggccgccgtgctcggggatgtgcttcaggacgacgcagggctacgggatcttgcgagatcggtgcgatccggggatccacagaatctggaagcccaaggcgctcgtcgatattggacgctgatcttcaaggacccgaatttccgacgggatcgcgcggcccccggcatcaatgctctgctcaactacggttatgccgtccttcgcgcgatcgtggcacgagccctgtgcgcctctggcttgcatccttccatcgggattcatcaccacaaccggagcagcggatatccgctagccgacgatgtgatggagccgcttcgtcccctggtagatcgcgtggtcgtggacctggccgaccagggggggcctgatgcgcccatcgacaaatcgtcgaagcgcgctctgcttgaagccttgcagtacaagtacctgtgggaagacgagcgccgcagcgtgttcgacatttcagcaagaatgtcctcctccctcgcgcaggccctccttggcagttccaaggaacttggctggccctcgccctttggactcattcagtcggagcctgcgtcggccccaaaaccgccatgagtcgtcccctatcggagtttcgaggcatgtggctcttcactctcttcgacttgccggtggacaccaaggcccgccgacgcgatgcggccaattttcggaaggaactgctgaagcgcggattccaaatgctccagtactctgtgtacgcccagtacttcccttctgaagaatcctgttcagcgtgccgttcccaggtcaaatgcatagttccaaaggacgggcaggttaggattatggccgtcacggaccaccagtttggaaaaatggatgtcttccaaggaaaaaccatcctcaaagctgagccaccccccgagcagctactgcttttctgaaagcgaaaccgcccgtaaacccttgcttaccaaggccttacgggcggaagagtgtacgtgagcgtccgttgttggccagccacagctggggctatcaacatcgaggggtgtctcgtagtgtacgtgagcgtccgttgttggccagccacagcacggcccgaggggcccgaggggcccgagg

SEQ ID NO: 547 - DNA, 16017 bp, synthetic construct
  source 1..16017: mol_type = other DNA
  misc_feature 1..16017: note = Synthetic
ttcattataacctccaatctacctttgaactttggtaaatatattataacaactggaacttttattcctgttttaaaaaaattaattttttattaaaataattgacaaaaagtttaaaaatggcgaaagcataaacaaagaaaaattacaatatgacggtttagtatcatgtgtaacagtctcaactggtgcattcgttacaagatataaaaattgtgtaacaattagtggaaattgtttgttggattctgttcaaggaagaagtccaaacgttggctttttgcctgtggtttcgttaccagaattagaaacatggattgaaagctgggcatttttcgaatcaatacactctcgttcttatactcatattatacgaaatattgttaataatccaggacttatatttgatgatattgttgttaacgaagaaattttaaaacgtgcagaagctatatcatgttactatgatgacttaatttcttatacaaattattacaacatgttaggcgaaggaacacatgttgtaaatggtagaaaaattgtgattgacaagcgagaactaaagaaaaagatttatctttgtttagtatgtgttaatgttctagaagcaataagattttatgtttcatttgcgtagattgcgcctttatgtagaaatacataaagaaaaattgctctaattgctgggaaatccaaataacaaaatattaggacaatcagcagggaagtgttataaagaataacaaaccttcaacgaccagtcgaaagacgtagcttcaagtgaagcgaaatgggcaactatcacagtgtttagtaagtttaaaaactttacgaactctatgtgattaccgaattggtagcttaacagataatgctgaagcaggtgatatggtctgatctgcatagtaatatgcagcagtaatttgataaaaattacgaaatatgtctaacgaacatatttgaacacaaatggctcttttgcttttgcagaacgtgaattaatggaaggaaatgcaaaaattattaaactcatcgcccgttaaattggcggcattattcagtaatgaataatgaaaacccagttgttcaaggaacatccaaaacacaatttggacaatcttgagttacttaaattacaatatagtaatgcaacgactaccgaaagctacggatttatagaaaatcttaatgacaatgatgattaacaatttattggttgtatcaaagaaaaatacaattaaagcaagtagggtaaggtgcaagctaatggcatctgaaaagctgggattccttttaaaggaatatgatatagtctggtctgcatagtaatatgtagcagttcattagagaacgatattggatttgcgaaccaatatgaacattacggatgaagcactacacctgacttccacacaacacatgattaacttaatgaaatcaggacaagacgatcctgaaatgaaagaaattgcagatgaactagaacaagaaacaattgagattttcaaaattgcagcagaacaagagaaagactggtgcgattatctattcaaggacggctcaatgattggtcttaataaagacattcttgtgcaatacgttgaatatataaccaatctacgtatgaaagctattggactagaaccaatatatccaaaagcaacacaaaacccaataccgtggattaacaactggttatcatctgataatgtacaagttgcaccacaagaagtggaaattagttcttatctaattggacaggttgacgcagaaattaattctgatgaacttggtgggtttgaactttaagtttgaaaaagacttattaactaaataacaaaaacatgacatacaaatatatgtcatgtttttataataaaacaacataatcatacaattatgattacaatttaaaaaaacaagcttactatttaggaaaaactatgactaaacaaaattcagaattacatttacacaacaaaatagaagttatccatattaaacaaattgccgatttacaaaacgatagtaataataagttcatctacattggcagatataatccgaacatattgaaatatgattatattgaaaatgcgaatttgggcaatccgtttaaattagaaaaccaaacagaagaagcacgaattgattgcatcaacaagtttgacaaatatttgaaaaatttaaaaccaacagacagatattacaaaaatattgtctcactattaaaagaaattaaaaatagcgatgctaacaataaatttcatcttgtgtgtttctgtaaaacaaaactttgtcatggtgattcgttaaaagattttatgattgaattagacaataaaaagaaagataacaagtaaaattatatttaacaaaaacgaactgcctcattaaatagaagcagtttgtcatattaaaatcaaaacagatttcaattaaaacagaatttttactcttcattatttaacatgtttaacaattgttcagtctcacgactgtcagaaaaacgtttttgttcaatatttttatacgataatgcaatgacatcaatattttttgtatttaaagtattactgttgtcatattctaaatattgataatcgtaaatataagacatagttgtatcaaaagatatttatcaataataacacgaatatattagtatgttgtaactaatttgtcaatattgatatatgacatttacaaatacaaataatgtttgtaaatcttaataacaattcgattataaacatattgttttataattgaaaaaatgaaatcggcaataagaacgataaattttatcttgtctgtttctgtaaacctaaaatttgtcatagggatttaattaaaaatttcatgattgaattgagtaaaaattgaattgagtaatcaataaaaaaagattacatcacataaaaaatatgtgatgtaagtgcttttcaatacaataaattttagacttgaagaacaaaatgttctagaaatcaataatttaaagatttttttatagtaaagtcacatagcaggactactttgagtgagatactataaccatacgttttttgacagtttttaactcattttggtactacttttaaagggatattacaaaactataacaatgttaagttatgaaacttttgatataataccactcttcaaaataaaatgcaaataaaattgagattaaaatgaaatatattatcggattagattgtggtattgcttctgttggctggagtgttgtatctcttgaaaataatcaaattgttgactttggaatcagaacatttccagcaccagaagacccgaaaactggtgaattgtattcaaaaacaagacaagagcaacttggtaaaatgcgtaatattagaagaaaaagtcaccgcattattagattaaaaagattgctaaaatcaaatggattaccatgtaatccaacacacaacaatgtgtggcaaattagacacaaagctcttgataatctcataacaaaatcggaattttcagcaattttacttcatatgattaaaaaacgtggtccgatattgcaacgaattggtgaagagggtgcgattttgtccagcgtttcaaacaatcatgaattgattgcaagtggaaaatatagaacaccagcagaattggcttgtttaacctttaaaaacaatatccgcaatagagatggaaattataatcacaccttcagtcgttacgatattcaaaacgaacttcatttgatttttcaaaagcaaagagaatttggtaataaatttgcaactgtagaattagaagataaagttgataaacttttaatgaaacaaagaaaatcattatctggtgatgatattcttaaaatggttggtttttgctctcttgaagaaaatgaatatcgttctcccaaacatacatattcgtttgaaaaattttcacttttaacgactctaatgaatatacgcattttaaataacaaacttgaacaaaaaagtttaacaaatgaacagataaataagttaattttacttgcacacaaaaaggcgattacttacaaaacaattagaaaagaattaaatttatcagatgaagataaatttaaaggacttctatattcatcgaaaaacgatgtggaaaataaaaaattaccagaattgcaagtttatcgtgatgtaacaaaaattttagatgaacattacttgttacccaatattcttgatgcaattggtatagcttttacattatataaaaatgaagatgaaattgttgaatatttagaaaactcagttgcactttcttataaggcaattgaagaactgttgccaaaattgaattatacaggttttgctaatttgtctttaaaagcaattaaaaaactactccctcatctcgaaaatggaataagttactcaactgctgtaaaaacagaatataaagacattaacaaacaaaatgaaagtgtaaaaaaagaattcatatcatctaatgatattttaattgatacaaaatcaaaaactaaaattacaaatcaaactgttattcgctcattaagtcaaattagaaaagtaattaatgcaataattaaaaagtatggaacaccagagattatagcaatagaaactgcaacagaacttggtaaatcagcaaaacaaagaaaagaaatatataaaaaacaagaacaaaaccgacttaataacaaaaaagcttttgaagaattaaaaaaacaatttccaaagcaaaaaagttttaatcaaaaagatgttttaaaacttaaactatttaaacaacaaaatggaatttgtttatattctggtaaatatattgatagaagcaaattgttggataacaattatgttgaagtcgaacatgttgttccttattcgcgctcgtttgatgatagtcaaaacaataaaattttggttttagcttctgaaaatcaaaacaaaaaagagaaaacaccatttgaatggtttggtaatggtgaaaaatggaataattatgttgagcgagtttcaaaatgttattttagtctgaacaaaaaagaatttcttacaaaacaaaaaattgacgaaaaagaattcatttcgcgtaatctaaatgatacaagatacattaccagtcatttagttaatgtaataaaacaacatttgatttgtaatcaagttgttagtgttaaaggtggatttacagcaaatctacgacataaattaggaattgaaaaaactcgtgaaaataaaagacatcatgctgttgatgctattttagttgcactaagtggaatgatttttcataacaaagaaaaatataattggctaacaacaaacaaaaaagaaattgcaaaagagattaaaacaagagttttttctgacaattggataatttcacaaatgactaaccataaagtaacaggacaagctcatgatgaaacaattagatcaagtaaatttttacaagatgaatacagtacagtcagaacaccactaactaaaattaaaatcaaagatattgagagaattcttggttatccagatagagaaccagagttttacaaacaactagaagaacaattaataaaacataatgacaatccagaaaaagcctttgctaatggatttgtaaaaggaaatacagttgttaaaaaagtaaaattaaaatcagtacaaaaatctggagtaattgtcagaaaagatgaaaatggaaacagacatggcattgcaaaaaatgcatcattaataaaaattaagatttatcgtaaaaatgataaaaattatgcaattccagtttatgcttggcaaattaataaaaatattgaaccaaattcaaattatgaattcttgtttgaattgtttccaaatgatatggtttctgtcgatggtgaaattatgttgtataaatcatttgatagaagtatcggaacatgtagttttagtaaaattgatgacgcttctggtataaacaaaagaatgtcaattagtaaagtcgatttaaaattggttaagtttgatgttctaggtagatgaaaaaagattacctcacataaaaatatgtgaggtaagtgcttttcaatacaataaatcactaatttaaagaataaaaagttctaaaatttcaaaaaattaatgatttaaagatttttttatattaaagccacttgactactttatgtgggataatataaccttcccaatattgataatcataaatatacgacataactttataattcaataaaaaacaacgcagacatgctatcaatttataaaaagtttgtcaacttcatttacaaaacttaaaacaatcaaatcacaataagcaatcgttttgttaattcacaacaaaacgattgccagatgacaaacaaattgttataatttcattattattaacaacttttgaaagacaatactatgaaaacaaagttagctacactcacttcaatgtttgttttagtattaacaagtacatctgcttatgcatttgattcaatggacaattcttattcttatgataaaaacatcaaaaaaattgaacaagttgaaaaacttaacaaacttgacaaacaaacaaaatcacaaaaacacttgtctttaatcacagcaaaagaagcaaaagaaattgctttaaatcacgaacgcattaaaaatagtaatgatgttgttattcgtgatattgatttagaatctaaaacaatctttaaaaacaatattcatatgaaacgacccgtttatgatattgaactattgaaggacgcaatcgaatatgaaattcatatcgatgcacaaaccggtgaagttttaaagttaaaacaagaggatgattgattaaattcaaaatacaacaataaagttaaatattttatttagcttttaacttcaataacaagaaagatttttatatgaatagaatcaaatacaaacatattaagtctgatggaatttacatattcatttgtgaagcacttaaagaagacaatcaagaaaaatacgttgtttatcaatcggaagaaacgaatgttgtttggacaagacccaaaattgagtttgatgagaaatttgttagattaaaagattgataaacaataaagattgttatatgaatttagaacaaataagcgattcacaaaacaataagcaatcaaacaaaatatcattagcagacggaatcgatgatgtttctgaaatagcaatagatagtttaccaattctagatgtagaaacaataggagcaacatctgcttcaattttagatagcacattatatgttgttggtgatgcagttggtgatattattgatgggatttttagttgagttgaattttcacaattgtaagaaatattaaaagattaaaagcggaacatctatctatgttccgcttttaattaatcaacataacaatatttttacgatttaaaattaaacattcccaattcacaagtttttaaattctgaactttgtttaaaagccaacaacaaattttccaaattaaacgaatcatatgttcgcaaactcttatatccatcaaaaccaacaccagacattaaatgcgtttcaagaacttcaaaacattgtttattaccatcatctataaacatcaaatctaatgtaccgcttaaatatttatttttaaacattttatttttattatcgacaaaatattgttttgcaaattgttcaattttatcaataaagatttcactagatatttttttaacatcatagttttcctttaatgaattaggaacttcgacaattctcattatctcaatattgttatccttgtttgtaaaaaaataaatacgatattcgttaatgacattattatagaattttctaaataaaatttttaatttaagtttatcgtattcgtcagaactttgttgagcttgagcttcatctttatatctttcacatagaatttcataaatctgaaacaacatgaattccgaatctgcataaattgaatttgataaccaattacacaagttgtttctcttaacaacaaaaacatcaccctttttgttgttatatgaaatgtctttcacaataacacgatgacagtttaactcattgaaaatattactttgattgtcaattgcaaatatgtttataaagttattctctgataacgtactatcaaacatatcaaattcaacaacttttacgtctttcataactggaataattggtacaggaacaaaacctaaatcaccaattttagttaaacttctattattactttgactatcagattttaatagaacaacatcatctttttcttctaatacataaccactatcagctaatgaaatatcggaaaacaaacgattgttattactatcaactaactcatatagctcatcataaaaataatccttttgaattatgaaattattaagtgttttatcaattacatttttcatcttcagcttcgacttcgctttctttattatatttaatttgctgaagtaaattatttacttcctccataacatgatttttagctttttcaatacgatacttatgtcttttcaacaaatcacgattttcttcaagtaatttattttctttgtcataaattttatccaaaccattctttttctgttgaatttcactaaattcaagacttaaatcacccgctctatttttaaatatatagcaaccaagtgtataattttttaaatcatcatcaacatgtttatattcttgatgattgtcaaccaaatgaaatgcaatgtaattttgtcttatcattgattcagtgtaactaaaaatacaatgctgcatttgtcttttttcattcattacatcagaaacatagttcaattgtttaacatgaacatcatcaattgtttcattaatatcaaaatcaaaaaatgcttcttttcgtgagaacaactctgcttggtctattaaatattgaaagtcgctaaaatcatcatgtaaatcacgaaaactttttaaagtagtgtgtttattgattgaaaaacttcgtggtaaacaataaaaattcataggtatgtctgcaagtaattcatcattaaattcatcagtttcttcattacttctcatgcgttttattaaacattttttaaactcaaaaagtttatcagtattattagatagatattcatgaaaattcttacaatcatctggaatagtggaactaaaaccaaatttttgtaaatctgtttttacttcatcaacatcaaaagaagcaactttataaatgaaatcagtagaaattttaacatcatttaatgaatgctctctcgcaaaaaaattaacaatatttgttttccaatttatgtttttatgatgattatcaaattcttttataatttctttgtaaatcatgttttccaaaacaagtggttcaacactaggaaattttttatttttaccaattctagaaaaaaactcaaataagcattctaaataatatgcaacatatatcacaggataacgatatttatttttatcagctttctcatttaacaatgtaaaacatttttctaacataaatggaaatttgtaattagtatcaaataatcgcttaaatggatcgacttgtccatcttctaatccatacatttcacatagttctatttcgtcagttctaatcatattcaaatctatttgaatatgattattttcatcatttactttatgtaaactataatgtttatcaactaagaaatttaaaaattgaaaagattttcttttgttcaaatgatgaaattgttttttactgtcaaacagatgtttattttcttcatatcccaaagaattttgattaatttctaaaatatttttgtattttaaaaatggaagcaagtgttttgtgccgtcttgattatataaatcgccaataacactaaatttttcaaaatttccattggttttaaaaaacaaagttaaaaaccgatgattgtgattaaatggaacaacattatttttatattttgttggatgaaaattatatgatttattcagagaaaacagaaacttatcaagaaactcaaattttccaatcttgttatatgtaacaaaattatgcaattcatttaacataaaaaagaattgctttttgacataatgaaaattaattttgttaatcattgatgttgcatcagaaccactattatcaacaaaagtgatatttgaaagataattattcagccaatctgggaagacaaaatgatgtagcagttcatctaaataattgataacagacacactgttattgttacaatcattattatcactataatttttctctttaattaatttaacatcaaacagattttcttgttttaaagttaaaaaatatcgaatactattaataaaatcaaacgaaaaatttttaggagatgatttagaaagaaaatagttctgtgactcctgcgagcgtgaaaaagcatgtgttacattgcgattatgaaaaacatattcagagattgaatataaagataattttttaaattgaattcttttaatattttgatattcataatttgcaatatcaaaatattttttatcaaaatttttataaaatcccactaaatcattttcacaaaactgattgtctataatttttccatattttagagtgtcatttttaaaatcataaacaaaagaaataccaccaaaagcaatccaacacaaatcaggtaatgaatttttatctaataagccgattgaattattaaaattgttaacatcgacaacatcatatgtttcactattgtgtaaatctatattttttgatgtttttttatcttttgcaaaaataaatttcaaacgataagagaaaatctttgccaataatgcagaacgattatcaatatcttcaactaataaactattattaactttatcaaaagacaacgagtcgttcttgttaatataactaatcgaactaacagaatagccatctgaattatagttattcatatgataacttgtagaaaccagcaatttaagtttgtcttttaatttgttggatagtaaaactctaccagtaacaagtttgtttttctctacaacatctttatgaaaccgttttctgttttcagcagaaacagacatttgtttaatttcagaagaatctactttttcttttgagtaagacataatcaccagcacattgtttcaataaacgatttgtcattttatcaaaaatcaaagagtaaattaaacaacacaaatgcaaatttatgtaaacatcaaaatgctcttatctcacaaacgaatataacgacaagcaagcgtcaagatcacttgcattagtcaattaacaatgttataatcaataatctataaaaagtgaaaactcaatttgcctagcaattagcattgcctagcaattagcatttaaaaatatgaataacgaaaaaacaatgaataacaatattgaaatgagctacgcctacgccaacgtcaacaacggcaatagtaatgccattgcgacaactacaagtttaattaaattaatctctccacttgttacattggaagaaaaagtattttttctaaaacaatatgtttcaccacatgcaaaaattcattttgatggtaaaaataacacaattaaggttgatattgataacaaaaaagcaatttcattagacgaaaaattacttaacagagttggtgattatattaaaacaggttcaatatcgttaggtactttacgactaaacatttctcgtaaagaagctcttgacagactgaaaaatatgattgaccgtatcaatattcaatttgatatgtatgtacgttctaatcatatgattatgtctcgtataaaagataaactagataaaggacaacaagagtttgacagatttaacaacacacaagaacacttacaacaattgtttaatcaaattgatgaacaaattgctaacgataatctaaacgaacacagtcgaaaccaaagtcagactattactcaaatttcagataataacagtaatagtgttagcacatcatcaaatattgtttcatctaaaaatgcaaacacaaacaattcattaacaaatccagttcaatcatatccattaactgttgatacaaaagttaatggacttcatccatcatggagaaatcatcaattcagtattgattttgccaatctttgtagaaaacgtctgttatggtgtaacgcttttgctactggtttgggtaaaactgctactgcattattaaccatacaagatcaacaaaacctgaaacttaaaaacaaaacaatctttgttgtaccaagttcaacattaagtaaatggtataaagaagcatttgtgggtaaacacaacaaacacggcgaacaagttgtttcatctgtttatgacgaatcacttgaagatgagtgtttgttcgttggtcttgtgtcaaaatctgaatttaataagaaaaataccaataacaaattgattaaaaaattgcgagaaaatccacaatatcaatatttagcaaaagatattgatgaacaattggaaatgattgcagattcaaaatacaaaaagattttcatttcgcatgagaattttttccgtcttcgtttaaaacaaaaaacagttgaagattatattcaattacagaaatccattgatgatgattttgctatggcggaagattctgaaacagaccaatttgcaaaacgctcaaaagaatactttgatgttctttttgaagaaaatgcgattaatggtaaaaacaaaaagaatatcttttttgaagatttaggtattgatagcattgttgtagatgaattacatatttacaaaaatgcaaaagatacttatatcaaagcatcaaatggtaatagtgtaaacaacgtcaaatatctatccacaccaccactatccaatattggtatggatatgttggctaaaacaaattatgtaagacaaaacaatccaaaacatgatggtattttacatttaactgcaacaccacttactaattcaccagttgaaatttattctgtattatctttgattatcggtgaatattatctaaatgcactacttggtgttcatagtctttctgaatttttatctttgatttgtaatattgaagcagaagaagattatagtgttgatggtgaactacgaaactataatgtttttaaaggtgttcaaaatcttaaattattaagaaatgtgttatttcgttgtatttatttcttaatggaagatgatgaacgagtaaaacatattttagttttaccagaatcaaaagaaattgacaacaatgttcttatctcaaaataccaacaaaagaaaatctttgaatataaacaagcatataatgcttgtaaagaagcaaaacgcattttggaagatttaggatatgcagaatatatgcgttatatcactgaagatgaagattttaaacgaaaaacacaatccgtattaaataaattccatgaagatgtattaattgttgcttcaccatttaacttcattcgcaaaatggaacgtttaattcttgatgaagatttaaacgaaatggcaactatttattttattaaaaaagatacaatagataataatgaagtattcacacttgaaaaattaaacaaaattgttgataaatttaataagaaaaaattcaaacaaaaaggtttccgtttaaatgttcatacagatgaagaatctattttcaatacattagaaaaagaagttggcgaagaccaagaaacaggtgaaccaatttttaaaaccgtttatgaattttattcaaaagccaaaattgttgattttgatactgaaaaagataaacgatataatgatatttctgcttatgtgttagaaaataatggacacgaatatcttgaagatatgtatatgattgtattagatacaacgaaatacaatgaacaaaaatactttattgattgtttactaaaagaaaaattcaaattaaccgatattcatgttaataaatcatccaaaattaaagaattgattaaaaatatcaaacaagaacatgataatccacgtggcaaactgatgactaaagaaactactgatttagttaagcagcttattttttgcgaccaattatctgaacacatcaaactacaattgcttttaaacaatgaagttggtattgagtttgataaaactgttgtcgctactggacaaacaaatggtgagaacgaacaaattcaagctattcaagatggtttcaatgccgaagaagaagaaaatgtttatcaaattgtgattggtaatcaaaaaattcaagagggtatcgatttacaattaggtacacaggctattcaccatattacgattggctggacaccagattcattagtacaacgcaatggacgtggtgtaagacagggtaatcaaactgaatatgttaatgtaaatcattacgatgcggaaaacacatttgataactataaacgcaatctggtaaacaaaaaagaaagttggattagaacagttattgataaaaattctgatgttgattcggttgatattgaatacaacttaacacgtgaacaacaagaacgcatgattgagttaatcggctattcatcagaagaaaaaagcgaagcagaaaataatttaaaagcctttgaagaaaaaattcaaaaagaacgtgaagcattaaaaatcaaacaaacaaaagaaaaacaaaagatttatcttgattttctcatacctctgaacgagaaaaaacatagcaacgctaatgctgataatagtaaacaagaaaaagatgatgatattaaaaatgaagaaaactatgttcattattatcaagaaacatacacagcaattgcaagtgaaattggcaaaactgcacgaaaaatcaataagtttttaattgatgagagttacatcacaaataatctaacagtacagcagttgtttgaaccacaatataaagaaaaaatgacgatacaagtgttgcgtcaattaaaaacaattgcattaatgcaaaaatatctgaaagaattagttgaaacaaaactcatacattttattgttaatgcagatgtatggcatggtaaacttttatctgatattcaagatttgagtattaaagaaagaaaaataaaatatctcacggaaattgtgcctaacgaatacatcacaaacacaaaagcactaacatattgttttgcaacaaaaaacacgtatcacattattcaaaaaaatctgaaaagctacttctttattagaagttcagaatatgataattatattttgaatgatgaaacagaagaaaacgaacatattattcaaacagaaatcaaagatattaataagctgaattctgatattgaagaattatcaaaaaaatcatttgttgctttaactcaaaacaatccttatgcttactatccattaaatatcattaatagcaagcatatttataaagtattcaatgatatgattgcatatgaaacatcaatattgatgtctattaataaatctatcaattcattcaacaatgaacaaagagaatttgtatcaaataatgatgttattaatgcgattaaaaacatcatcgatacaaaacataatgtacaaaaaagtgaatattttattaaagcagaacaaattaaaaattatttattgaaaaatcgtgttgtgttgtctttgtttactaatgatgaagattcaccaataaaaatgtatccactagaacgtaaagaaaaactaagtttgttccaaaatcaagtggcaagtatgcataacaaaaaatatcatcgtcaatttattgatattgatgcttataattctgttaaacgttatttttcctttaaagaaaatcaactgccatataaatcacgagttattagagcttttgaattgaatttagcaaccatgaaagaatatattaatgacttggatttctatgaatattattctaataatgaagattatcaatatttgattattgcaatgtctctacttgaatattattacatgaacaaattacacaataatcgtgaatacgtttatgccagtcgaaaacatgataactgg

SEQ ID NO: 548 - DNA, 23678 bp, synthetic construct
  source 1..23678: mol_type = other DNA
  misc_feature 1..23678: note = Synthetic
ttaccgtagtgttgtttgactggtaaatagcttcgagcgtattcccaaacatagtagttgtaccctgaaggttgccggagtaagcaatggtgtacgggcgtgattgtaattgtgcagtagcatgtgccgaaaataaaaacagcagtgctagcgggagagctaaggcttgtattcgcttatagcaaatacggattgtaaaattttgcatgattaggagcggtttaagaaattaaaaaaataaagcaatgataaccggcctgtcagaggagataaattggagccttagtttgctcaacagaatatttagggaattaggagtgaatcagagagattggattaagtattttagaacgggggcgtccttaggtaaaactttactacagttagtgtaatgtgaagcaaaggtatggcaatatttttttaaaaaacaagctttcttaaaaaaatattttttttgatattttttataacatccatttatggtatataataaattaaaaaccagcttgttgtaacaagctggttgcgtttgaaattatttttgtaattgtatttaaaatcaacttaatatcttctgcttctggaattttccctgcttctgccttcttcctgccttcctcttccttcatcattcggccttctgaaaccaccatctgcttcgttcatacgaacctggcgtccattgtgttttttgccatcgatgcttttaatcattttagatgcagatgctttatctacttctacccagctattcatttcacgcatatctactttgcctaatacttctttattaaggctgctttcatctaaaaggaattgtaaaaaattcgctttataaaaaccatctttagtaccaaggttgatgaataaacgggtatagcctgtatctctttgtgggtaattgcttctttctcttctgctgccactgtctctgccatctctgctttctcttggattaccacccaattgtttatttctgaaatcgcctctgccgttcaggtcttcagcattttcataatattttaagaaatggttgaactccaaagctgctacacgttgcaatacttcttctttgctaacgtctgcaaatttttgttgcaggtcgttcatgtaggtttcataagctccgtttgaagtatctgcctgcattaatttatccatgaaatggaaaaactgtttacggcaaacatccggtccgcttggtatatccatacggtggaactgagcattgatcatcttttccagcgatttgatcttgaaagactccctgctatggcagatagaaatacagataccgcttttgccggcacgtcctgttcttccgctacgatgcgtatatacttcaatatcatccggtagttcgtaattgattacatgcgtaatgccatccacgtcgatacctcttgcagcaacatctgttgcaattaataattgcaggttcttttgacggaaacgagccattactctatcacgttgttgttgcgtaaggtctccatgcaatgcttcgatttcgtatccttcttttactaatttttctgcgatatcctgtgcatctaatttggtacgggtaaagatgataccatacataccgggattgaaatcaaccaaacgtttcagtgtttcataacggtgatgcgcagccgaaataaagtattggtgatcgatattaacgttgccgctgttctttttgcctactgtaatttctttagggcttgtcatgaagtttttagcaatagctcttacttccggtggcatggtagcactgaataaccagatgctttcacggttaacggtatttttcaatacaaaatcaatatcatccctaaagcccatgttcagcatttcatcagcttcatccaataccacatattttactttttgtaagtcgatggctttacgttctatcaaatcgattaaacggccgggggttgctattactacttgtacgcctttacgtaagttgcgtatctgcatggtaatagaagcaccgccatatacagcttcagtataaattcctttcgtgtgtttagtaaatgttgcaaggtcattggttatctgtaaacacaattccctggtaggacaaacgattaatgcctgcggatgtttttcagccgagttcattaaatgcaataacggcaaaccaaatgctgctgtttttccggtacctgtttgtgctaatcctacaaaatccattgttccggataataaaaccggaatggcttgttcttgaatgggagtgggggttgtaaatcctaaatcggcgattgcctgaatcaattgttcgtttaagcctaaggctttaaatgcatccatgtaaattgttttaagttctacatgatttgccgcttgcctgttgttatactctttgaaccaaaaaaaatcaaattcaatactaattcaacagccctttcaggcacttcatgtaacacgttgttgttaatgaggctgcaaaggtagtgttttttgggcggataaccaattgatgctgaaacagcgatgttaagtatgcgtaaacatttccccgttttactgttgtttaaactattttattatttgcatatcaaaggatttatttcctgtaattcagtcattttaaacttgttttgtttatcatcgcagttattataagtgtttaacaaactattgtatcgggcttaataaattggtatataagttgaagttgtaaaaccataacctttaatcacatattatgaaaaagataatttttgtatcaaccctattgttctttgcatttacagcatcgtatgcccaaagctttcatctggggcttaaagcaggtgctactatgaataaattagaaggacaaccatttagcgatgcgtttacgtatggatatcaggccggcgcttatgccgatattggtgttggcagtaaatgggctatccatccggaagtattgtttagccaaaccaatgtagatacggcctatagtttcagcaccgtgtataaattcaataacattaaccacatgaaattgaattacctcagcattccgattttgctggaatataaattgagtaggattgttgcgttacaggcagggccacagtttggcattttgatttcacaaaacgataatcttttgcagaacggacaaaatgcttttaagcaaggcaactttagtttggctgggggcttacaagttaaactgttgggcctaaatatttatggaagatatgtacaaggcttgatgaacgtaaacaatacgcccaatcaggatacctggaaaaatgaagcctttcagttaggtatcggctttaatctattataaatatcaggaacggataatggtatagttcccatcagcattccatttgataatggcagaaggagtcgcaggcgttaaatcatcctggcggtattgaaccacataatcaacgccacttttaacagcttcgtcaatatccctgtaaactaacggtgaggggtaacctgaaatattagcggaggtagatacaattggctttttaaaacgtttaataaggttcctgcaaaaatcttcttttacaatccgtatcgcaatggtgccatcttcattaataaggttttcggctacgccgatgcctccttcgtaaataaatgtagttggcttttttatgtctttgatataatcgaaaattttcaaatcgggttgtgttacgtaggtaagaatatctttttcatctgccagcagaataagcatcgattttttatccgggcggttttttaatttgaatattttttctaccgcttctttattggtagcgtcgcagccaatgccccaaatagtatccgtggggtaaaggattaagcctccactttgtaaaacgttcaggcattcttctatatcatgcagaaattccatggtatatgtttttattgatttaatgcttcttttactgtttgtacaattttgttttcatctaaccgtagtaaacattcaggtattccaaattgtttgcaggtattctttgtacaaggttcgcaaggcaattgccccaggcgtataatttttctgttggatgcattgtatggtgccgtattgttttcattgccggccccaaacaatacaatcgtttgcaaacctacggcattcgccacatgtgccggtccgctatccgttgtaaggatggctttgcaggatgccatcaaattaattaattgcggaatggctgtctgccctgcaagattgattatattgattggattggataatgcagcaaatacttcatctacaaaaggtttttctttggcgcttccaatcaaaattatttcttcattaatattggattgaattgcattgatgatactaattgctttttctttcggcaaacggcgggaggaagcttctgaattaatattaataataagtgcttcttttttttcgatgcctgttgcatttaagcctacagctatagttggaataattgtgcccgtaaactgttgcagcaaatcaacatattcttcaacccgatgcaggttttgtttttttgtaaaggcattggttaaaaacaaagagcgtaattcttttgtatagccaatacgttttgcagcaccggtagcttttgccattacagcagatgataaagaatctggcaggcaaaaaaacaaatcatatttttcctgtgcggctatttcttttccaaatttccaggcaccccgtaatcctttgtatggctgtttggaaaaaatatatcgtttgcgatgcggagggaaatggtccagcaatacatctattccttgttttacaattaaatctataatagcattgggatatgtttcctctacagcttttacaaaagccgtactcattacaaggtcgccaagccagttaggtaatcgtatgaggattttttgttgcaatggttataattaaataagaaataacccccgtcccctaaaggggagttatggaactactctgcttctttcgatagcaggagggcttttaattttattacagttttatttatttagtcgcttcgttcttcgccaatcaggtgaatcataataatcataaaaatcatggttcagacaatctccgcttcgataaaagtccaccaaaggtatgccgtacaagagtgcgacgcaacgatgctgaacagtattatttatgccgggagcaaaattgcttttttttatttgttatgtttgcaaaaaattttaaaaaatggaattgcaacaattaattgcggaagtttggagtaaccgggaattattaaaagatcaaaaatattcggatgccgtacgtgcggtaatagaagaagtggataagggaagattacgcactgcagcaccggttgaaggcggctggcaggtaaacgaatgggtaaagcaagccatattaatgtactttggcatacagcaaatggaaacctttacattgcctccgtttgaattttatgataaaatgaaattgaaaagcggttatgcggcactgggagtaagagccgtgccacatgccgtagcacgctatggtgcttacctggcaaagaatgtagtgttgatgccctcttacgtaaacatcggtgcttatgtagatgaaggcaccatggtagatacatgggcaaccgtaggaagttgcgcacaaataggcaaaggcgtacatttgagtggtggcgtaggtattggaggtgtattagaacctttacaagcatctcctgtaattgtagaagatggttgttttatcggcagccgttgtattgtagtggaaggtgtacgagtagaaaaagaagcagtacttggagcaaatgtggtattgacaaaatcaacgaaaattattgatgtaagtggcagtgagcccgttgaatacaaaggtattgtacctgcacgcagcgtagtaataccgggcaattacacaaagaaattcccggcaggagaatatggtgtaggttgtgctttaatcatcggacaacgcaaagcttctacagacttaaaaacaagtttgaacgatgcgttgagggattttaatgtagcagtatagaattataaattaggagttataaattataaattgccgaatcattcataattcataatttataactcctaattcaaaaaagcccgggtggcgaaattggtagacgcactgtgttcaggtcgcagcgttcgcaaggatgtgctggttcgaatccagtcccgggcacttaaccactcattgagtggttttttatttcccataaattcagtatttacgggtgtttcaaagaaattgttttcagtttattccacttctaatcagtctatttcaccaattaccgtcactcctatgtcactcaatgactaagattttatacctttaagggtacaaaagtgatttaaaccatgagtgttacattacggaaaagggaaaacaaagatggaaccatatctctgcttttagatatttaccataatgggaggagaacacgggaatttctcaaacaccttaaacttgttaaaccttctaataagaaacatttagctgataataaggatagattaaatcaagctgaagcaattgcaattagaatggcaggcgatctgtcctcgaatgattacaatatggtttccgattctggaaagaaaactttagtcatcgtgtggatggaagattatatacgtggatatacgaaaggggataagagaaatttgcaaggtgctgtaaacaggtttaaagatttcctcattgaggaaaaaaatcaatctataacatttaataatctaacccccctgctaatagaagacttcatggattacctgcaatccaaaagtgttggcgaaggagcattaagttactttgcacggtttaaaaaaataattaaacatgcatacagaaaaaatctgatgcccataaaccctcttgataaagttgaaaaaaagataaaagggaaagcaagaaaaaaagatactttaacgcttgatgaaattcagactttgaccaaaactaaaactgaaaaccccgaaataaaacgggcatttttattttgctgttttaccggattgagatggattgatgttaaacacaccttgaaatgggggaatatagatttaaaaaataaagaaatgaacttgattcagcagaaaactaatgaacatctcactatgccattaaatgctgttgcaattcagttgctgggaaaagcaggtgataaagaaagtataatatttacgcttccttctgcaaatggtgccaataaaactttaaaagcgtgggttaagagagcagagatagataaaacaataacctggcataacggtaggcattcgtttggaacgaaccttatatataataatgttgatctcttaacagcatctaagctgttaggtcataccacagttaagcatgctcaacgttatgttgatacagcaaagaagatgaaagaggatgctgtaaagagtattaatgtgaagctgaaattataaacttaaatattttttaaataagtttaatacaaagccggggaagctgcaaaactttctggggtacatatcaatactattactaaaattagaaagttaagtatgatttaaatgtcatggaaataaataaagtggtttcaatgttaaaatcgcctgatacggagttgaatgaacttgcctatattgctattaatgctaagattgattttaaagattggaaatatttaattgagttaaaaagactcttggacatgaaatacaaagtactaacccagattatttttcaaaaaaacagtattcacttttcaacgaacagattgaaaaagcattcgaaatattgaacaatcaaaactctattaataatgtctgaagttaaaattccttttccaatattagctactgattatatattggaacaagtcgccgaatatggtaatttcaataggtggcatgtaatgcaaaattttaaattcgatgcaactaaaactgatattgatattgctggatttgaaagttcaaaaggaatccggtttgaaaatgtaattggttgggcaatggggaaggggtatattttaaaatggggtgaagatcaagattcttattatttaacagatctgggtagggaagtaaaaagaaaaggaggacataacaagtatagtcagtttattgaaaaacgtgataacgcagtatttgaatctcttgaattaactaaacaaattttaaaagcaactgaggatacagcaactgctactgaaaatagttcaagatatactaaacagtcaacaagcttgttgagaatttatacaattattactttggtaatagctgttacagctatagcaacgtgttattatcaaaaacagaccccaaacgataccacaaacaaaacaaaatagttgttgaatcttaattcagttaattatgtcaaactgggatttagttataaaccaagccgccaaagctttccaaacaaaaacggaatggacatcttttattaaaaagaggagatatgaaattaaagaagttcatgaaaatgaatttataattaaaaaattaagtggaggaaaagatgtacccttaacgagaaaaattatagaagctgcaattgaaaaattgaagcaagcaaaaagattaaagaaaacaaagttattgccttcggtctcaagggagactgccttaatttacttgcatccttatattcattgggatagtgctgccaaagaaacatattgggatccaaatgaaaatgattcaactgaaacaatttcacaggttatagataatgcttcagatgatgatattgagtatatcaaacgcctaataagaaagaggaaaaatcaatcaaagttcaggaaaagtttaataaaagcttatgaaggcaagtgttgtatatcaaactgcaatacactaacagttcttgaagcagctcatattatcaatcattctattacaggcatcaaccactcttctaatggattgctgttacgttcagacttacatattttgtttgatgagaatttgcttttgattcatcctaaaaaaatgaccattcatttacatcctgatttgttgcaatcagaatattcaagatataatggtaatgttatcaattcacgtattgataacacgcttcccaatttcaaatatttaaaacagaaatgggattctgcaaacttgatttaatcctaaatactacactatgacaaaagaaaaatttgaagaattatttaacgataaaaatatagtaaaatttggcacgaccggttattgcatatttaaggatgtagaagatataacagctattcaagttgcattttcacattctggagattcttcagaattgcctcccaaaaaaagaatattcttatcagcgttcccacttaacgacttagttaaagatttcccagagccttatcagataaaaaacaatcaaattttgattttagcgaatgctgatatgcatgattatgcattagcttatcatcttactattaatccttctgaaagtactattgaagttaaactctacgaatatcctaccgttggagaaaaatttattacacaagaggaaattgatggcttaaaaatttattattaatttttagcagtagagttttaaaagcacaaacatgaaatgacattttaaaatccgctaattaatttgctataccttccctatctgaaagttgagcctttgggtttgattttatatgaacaattatcataagccgggagaaatcccggttttttaaattatgcacaatgaactggacaaaatttcttacctatgcatgagtcagcagaatacttttgaaaccttttgtaatcaatacaagcgataattctctctaaattttttaagcccacttgtaaataatgcactttagttgtaatataatgtttgaattattatattgtgtaatattcgttaaatactcactttctcaatacctatgaaatagttaccactaaatgcaggaataaaaaaaggcgacttacgccgccctaaatgttttcacaacgataaaatcttattgtgatttgcttcgatgtaaaagtaatgacaaaattgtaataaccaaactttaaaaacttgcttatgagaaagattcttgggttagacattggaactacctctataggatgggcaattgtagaagcttctgatgagaaaaatataaatgatgttacaggtaaagaagctctgacagatataaacaataatcgtattggtatttatgaagatgctgttggcgtaagaataatagcacaggatactgaaagatttaatagaggacaaacccttaatgatccaaaaggtaatgcattaactccaactgcaaataggcgaaagtaccgcagtagcaggcgactgaaaagcagatataaattaaggagaggtaagcttaaaaatgtattagattttatacacatgagtcctgataaagcgtattacaccaatgaaaagggaaaaagaggtgaaaaaaacgatattgggaaagcgatatatgaattgagggatatggccattcgcagtaaaatcaccctgaatgaattgggaagaatattagtgcatcttaatcaatggagaggttatagcagcgatagatttgccgtggaagaaaaatcgaaatttgattactatgtagcagaaatattagaagttgatgatacaaacaaaattgctatcactgatgaaaataataaacaagaaattaaatactacaaaatttctattaaaataagatttgatgagccatataatcttggggatgaagaaaataaaattattattactgaattagagggtgttctttttaaaaaagaaattgattttaaaaaaggggatttcgtcacagttaaaaagcctgaattaaaacaaaacaaaaaggggaaacaaatattaaatgaatactataaaataagctttactacccccgacccagcagattggaattacaaatatcaaacacttcaaaaaactttgactgagtggtgtgaagcagggaacactgttggatcctatttctatcacaatttttataaaatccattcaattgaacgtatcagaaaccaagtagtaaatagaaaatggtatgaagatgaattggacaagattttcaactttcaatatttacaacataaaggcttttttgaacaattaaatattgaagaaatagtaaaagtcgctttcaaaaattatcaagctattctcaatgatgttttaaagaaagatggcattaaggaacaacttagatacttaattaaagataaaataattttctttcaacgtccatggcagcaggctaagaacaaggggcagtgtcctttcgaaaaaattaaaattaaaaaagaagcaactataaaaggtacaggcaaaaaagaaattattgaagaatatgtaggaaggacagttattccccgaagccatcctttatttcaggaatttaaaatttggcagcaaataaataatgtaaggatttctctaaaaatagaaggtgagaaaattgatctatttgctgatgaaaagaattttgaaaaatacgttggcaagaaaatttcagaagtaaagcaagctctttatgacgcattacaaaaaagcaaaacattatcatggaaaagctttggggataatgaattaggattaaaaaacaagaaagagattgtagataaggatactggcgaagtactaaaatgtcattttgaatacaacttcagaaaacttaaaagagataaagttacctgggaagacattaaactaaaaggcaataatacaaaggcttctctacaaaatattttggttgataaaacagaagattggttcaataaaatacattcggaaaaacagaacatcacaaacctccaattgctttgggaacttatttacgacataactaatagtgatgttaataaggtgggtacaataattgagaatcattttaagtttgataaacccatttgcttacagttagctaatttaaaatttgatgatgcaggtatgggtaatttatcagccaaagctatcaggcaaatattaccattaatgagcgatagtaaaggcattaatgataaaacactcgcaaaagtcaattcgcttcttagtcttaataataatgaggaagaaaaaataaaggataaagacgaaaaattagaaaaccttaaagattttattcctgataaaaaagcgaggctgaggctctcaaaatttaattcagcaaatgatttcacttatttaaattattgggaagctatagcagtaaggtatggttctcattctacaaaaaagatcacagcattaggtgttataaaacctgtagaaagacatagcatgaacaatcctattgtagaaaaaatagtaaatgaaacaatcgctatcgtaaatgaaattaaacagcagtacggctttgatgaagtaaggattgaactaagcagagatttaaaagcgagcatgaacgaaaggcagcaaatgcatgaagcaatgactgctaatgcagataaaaatgaatgggcaaaacaaatgcttagagaattaaaagctgaatttgcagaactggatacagattcaacaaacaaaagcaacttagacaagattaaaattattgaagacgttgtaaagtataagaatgccgaagagtataaagtaaaatcgaaagagtataagctaagcgagccatcaaaagcagaagtaaagaaatacttaatgtggcttgagcaaaattttaaatgcccatacactaatcaaccaattccattcaatgatgtattcgcaagaggcaaggttgtagaaattgaacatataattccaagggaaaggtattatctcaattcgtatgcaaacaaggtaataacttggagagaagtaaatcaggcgaaagctaacaacggcaatagaacagcttatgaatttattgttagcaaacgagtagaagacaaagtcaaagtaggcaacaatgaattttcgctcgtcaccaaagaagattgggaaaatcatgttaaatcaatgtttccccgaggaggcaaacaaactaatttgttacgtaaggaaattcctgaagatcctataaaccgcacacttaacgaaacgcaatacatcaataaaaaactaaaagacaaattaggagaattggtaggcgaacaaaaagtatggataacttctggcgcagtaacggatattctgcgagaccgttggcatttaaacagcattatgaaggaattaatgcgtgatcgttttgaaaactttaataccggcgaaaaaaaggaaaagcagaatctcacacattttacacaacaatacaataacaaaactggtaattatgaagatgtagaaatttttgaaggctattctaaaagattagaccatcgccatcatgctatggatgccattatcattgcctgtaccaaacaaaaccacattcaatacatcaataccctcaatgcattcaatagtgtagaccaagaaaacgataacagtaaaaaagcaaaatacagttcgcttaaagcagatgtatgtatcggcaatagtagcaaacgctttaaaactccatgggttgaagataaatttatacccgatgtaagaaaagcattgagtgagattgttatctctcataagaatacgaggcttttaatcagtccatcaaaacatagagtagataaagatattaagccaaataaaatagcatcaataagaggcgaattgcataaagaaacaaactatgcaaagaagaattactttgaaggtgggaagatatttattaataaattaatcctaaaatattaaaagagaaaaaagagaaccaatatcaaacaatggttcattttaaaacatttgaagaaataattaaagaaacggtactaaaagaaaaatatcaggatatacttattccgttatttcagaaatatgaagaggagcaactaaatgacctgctctgtaaaaattacggcaaagcaattcttaaagaaattgatgataataagctacttattaactctaagacaaaggacccattacaatggctttcatcttacgcagaaaaagacaaatcatcgagaccaaatgggctttcgatgaatttgaatgatgcaaaagaagtaaatagcattgcagacccacgcataaaaagattggccggttataggctaaaatatgttaatgaccaaaaagcagcaattgacaaaatgggtattgacacgaatgagaaaaataaattaaaaaggcaggcagaaacattaaagctatatagcaatgctatttatgaagtaagaacaatacagaaggatagcagctataaatggatagaacttaaagatcttgatagtgcagattttgataaaatagattattcaaatttgaacgataaaaaatacaataagaaaaataatacagaaaaagtaaagaagctattagctgaaaaggatattaaaaatttaaaacaaagttattttgataaccctatattcttatcggctgttcctattgaagtaaagaaggttagacaaatgtcttatttccaaaatttatatgaggttactcctaaaaggtacgtacaagttgaagaaacctttatgacttatttctttcaagaaaaaaataaagagggaaataatgaggcgaacaaaccaaaaatacctaaattcttgaaattcatagatgcagtcaatattatcaatactgaaaggccaaacctaattgattacaaaaaactgattgaaaaagaaagaacaaatgaagaaatacagaatgggattgaatacgatttagtattcacgctttcaaaaaatgatatagtttatttaccagataacaacttaacaaaagaacagattgagaaaattaactggaatgacaaacaaaagattgtaccttatctatatatcgttaaagacatgaatccaagcttaagtaaaattgtatttcagcaattttataaagcagattctataataatatcagaaacagattcaaaatctttatttaataatccagatttaaaagggcaaacggaagaaataaaatatggaactgttcctatgttgcaacgatgcataaaagtatttacagacaaacttggcaaaaaaattgttccgtattgggtgttcccaaatggttgttggagcaaggaaaaagcaaaagatttaaaattaatttagtgatatgataaagcgtaccctatacttcggcaatcccgcttatcttaaaacaaaagatgagcagttggtttttgaaggtaccgatacgggggatttaaaaacagtacctattgaagatattggtgtattaattttagaccaccagcaaataacgattagtcaagcattaatagcaaaactattagccaataatgtggcacttataacctgcgataactctcatcatcctacaggcttattattaaatcttgatggtaatactctacagagcgccaaattccaagcacagatagatgctacagttccgttaaaaaaacaattgtggcaacaaacagtaagttgtaaaataaataatcaggcagcattattagaaaattgccgggtgactgtaaaaaatatgcgtaattgggcaaatgaggtaaaaagtggtgacagtgataatcatgaagcgcaggctgccgtatattattggaaaaacctgttccagctttttccccatttcaaaagagaacgggaaggtttacctcctaacaatttattgaattatggttatgccattttaagggcaatcgtagcaaggaatatcgttgcatccgggatgttgccaacattaggcatctttcacaaaaaccaatacaatgcctattgccttgcagatgatataatggagccataccgcccttatgtagataaggttgttttaaatattgtaaatcttaatgggaactttttggaactaacacccaatatgaaaaaagagttactcaacataccggcaatggatgttatgattaatgatgaaaaaagcccactgatggtagctgtacaaaaaacaacagcatcattggcaaaatgttttgaaggaaaacaacgaaaaatactatacccggaatttacgtaacaatctatagttccggaaacagggcatgaataaccgcttaaatgcatatcgtattatgtgggtactcgtattttttgacctgccaaccgaaactccaaaggagcggaaaattgctgcgttattccgtaaaaatattatgaaagatggatttcaaatgtttcaattctctatttatctacgccattgcagtagccgggaaaatgcagatgtacatatacaaagggtgaaaaagatactccccgagaaagggcatgtgggaattataagtattacagacaagcaatttggtatgatggaaatttttcacgggcataaattgactacgaccgctcctcctgttcagcaattagaaatgttctaattacaaaaaacaggattaaaaaattgcaataaatatcaattttttaatcctgaaaatcaacttagaaccaataccagcaaggctcttaaccaatcctgttgtaaaagaactaagttaattaatagtttgaaagcaaatcacaacgttcaaacggttattccttacattacaccgttgtaaaagaactaagttaattaatagtttgaaagcaaatcacaacgatgcgtcatattgaaagcacggtaccctgttgtaaaagaactaagttaattaatagtttgaaagcaaatcacaacgatttaacggcggctatcttagtaatagaagttgtaaaagaactaagttaattaatagtttgaaagcaaatcacaacacaatgtctttgcagctttggttgcaaatggttgtaaaagaactaagttaattaatagtttgaaagcaaatcacaacatgaaatgcacaattacccaaatacaagacgttgtaaaagaactaagttaattaatagtttgaaagcaaatcacaactactgaatcattgaaaacataccaagattgttgtaaaagaactaagttaattaatagtttgaaagcaaatcacaactaggtgaatttgctggcgaagaatatggtagttgtaaaagaactaagttaattaatagtttgaaagcaaatcacaaccgggcgaaacgcttaaatcgatcaacctgcagttgtaaaagaactaagttaattaatagtttgaaagcaaatcacaacccaattagacctatctgataatcagcaattgttgtaaaagaactaagttaattaatagtttgaaagcaaatcacaacaagaagattggctactgtctttaagtttaagttgtaaaagaactaagttaattaatagtttgaaagcaaatcacaaccgcctgacgacacggatgaaagcgacgaatgttgtaaaagaactaagttaattaatagtttgaaagcaaatcacaacacataccgccccttatacaaaagtatatcgcgttgtaaaagaactaagttaattaatagtttgaaagcaaatcacaacacgatcttatttcataacagaacttaaacagttgtaaaagaactaagttaattaatagtttgaaagcaaatcacaacttatttgcaatgacagatatgtttgaaactgttgtaaaagaactaagttaattaatagtttgaaagcaaatcacaactaaacacgtctgcgtatatctgcggaggctgttgtaaaagaactaagttaattaatagtttgaaagcaaatcacaaccactagctgattgtttagttacagtatttgttgtaaaagaactaagttaattaatagtttgaaagcaaatcacaacaatcagccttctacttcttctatgcatgcagttgtaaaagaactaagttaattaatagtttgaaagcaaatcacaactatttaaactacagggatggcccgaagtgtgttgtaaaagaactaagttaattaatagtttgaaagcaaatcacaacaaaaaaacatgcaacaatctctttttgaaagttgtaaaagaactaagttaattaatagtttgaaagcaaatcacaaccctgttgggttaagcctgaaaaggtgcgtagttgtaaaagaactaagttaattaatagtttgaaagcaaatcacaaccttttagctctagcttcccgtttatcagcagttgtaaaagaactaagttaattaatagtttgaaagcaaatcacaacagcaaccgaacaggtaacaccttctttaggttgtaaaagaactaagttaattaatagtttgaaagcaaatcacaacgatacaggggtataatcggagtgaacgtagttgtaaaagaactaagttaattaatagtttgaaagcaaatcacaactgtgatttatgttttaatcagattcatttagttgtaaaagaactaagttaattaatagtttgaaagcaaatcacaacgagtatgacgattggataaatttatcctttgttgtaaaagaactaagttaattaatagtttgaaagcaaatcacaacaacaacgaacctttgatatgccgcacatcagttgtaaaagaactaagttaattaatagtttgaaagcaaatcacaacgtttattcgtttaatagataaatccatgttgttgtaaaagaactaagttaattaatagtttgaaagcaaatcacaacgcttgaatgcgacgggcttgcagcttaatagttgtaaaagaactaagttaattaatagtttgaaagcaaatcacaaccttttaggttttcgcctgtgtcgtcgccgtgttgtaaaagaactaagttaattaatagtttgaaagcaaatcacaacaccttggctagcatatagtcttctatactggttgtaaaagaactaagttaattaatagtttgaaagcaaatcacaacagttccttatgaatgcgaccgtgcaaattgttgtaaaagaactaagttaattaatagtttgaaagcaaatcacaacgcgccagtctttatcatgttttggttcatggttgtaaaagaactaagttaattaatagtttgaaagcaaatcacaaccatactttaccgtattagcgaccatgaaacgttgtaaaagaactaagttaattaatagtttgaaagcaaatcacaactacgcataatattacgtttactccattgtggttgtaaaagaactaagttaattaatagtttgaaagcaaatcacaactttaaacagggctaagatggctggttattggttgtaaaagaactaagttaattaatagtttgaaagcaaatcacaacacttcagcatgcagaggttccaaggaaagagttgtaaaagaactaagttaattaatagtttgaaagcaaatcacaacaaaaaaggagtagaatggctttacaaatttgttgtaaaagaactaagttaattaatagtttgaaagcaaatcacaacttgaaatggttctttaccaaagacaaccaagttgtaaaagaactaagttaattaatagtttgaaagcaaatcacaacggtggtgttttcaatgaaaaatgtgatattgttgtaaaagaactaagttaattaatagtttgaaagcaaatcacaactatcgatatttattatcttccattgaaggagttgtaaaagaactaagttaattaatagtttgaaagcaaatcacaactatttctgtttcggatattgtgcctaagaggttgtaaaaaaactaaattaatcaatagtttgaaagcaaatcacaaccttaaccaatgcaacaactaactaaataaggttataaagaacctcttaattaaactcaaaagtaatcatatcggtaatcaaaaaacaattgttttatactccaatcaacgagtagctatcagtaataataattgaaaatatacttgtaaatattaaagctttttgtatatttaggtgctgttgccatattcaattagccctctcccccacaaccaacacaactattattaaacccaatcatgatgactaacaacatccctgagaaaataataaaccggattagcgaaggtttgaaaaaattccaacctattatagctgctaacaaagccaaagacgtaaacgaatccgatacagtaacccttataatagatattctttcagaaatatttgggttcgataaatataatgacataacaactgaacacaatatcagagggcagtattgcgatatagctctaaagattaatggaaagattaagttgcttatagaggtcaaggctattggcattgaactaaaggatacgcatgtaaggcagattatagattatgctgcaaatgagggattagattgggttattctttccaatggattaacctggaggatttataaagtaatattctctaaacccatacaaaatgtattggttggaattattaactcccttgatttaaaatataaaaacaaggatgatattcagaaaatatacatactgactaaagaagctatttcaaaaagtagtctcgatcagttctttactcaaaaacaagccactgataaatttatggtaggcaatcttctttgtactgacaatgttttgaatttcctgaaaaaagaattgcgtaatatattccctgatattaaagtactccctgacgaaattaaaaatgtcctgttacatgaggttataaaaagggaattacttgaaggagaagaatctgataatgcaaaaaagaaaataaataaaattataaataaacagaaaaggcaggttgcaaataaacaaggatcaatccttcctgctgacttgtccagttccgaagttgatagtactcttcagtagctgaattaaaaattgtcaattgtcttctatttagttcaacgttcatttttttcattgtttccatagagtgccgggcattgtgcaagttatagaatgcttctttggttaataggtattaggtttacaaatttgattccgaggaattaccagactaacttatttgatgatacacgaggatcggtaaaatagtatcaacaatagacaatattaaaaaacagtttggtgagaggttgtaatgagagcagttggaatttgaaatacttcctcttaaaattaggtattttttaaaaatccttaaaattaaaacatgagccgtattgccctttattacccatttataaattttccaaaccaagaatggttgaaaaatgccatattatataatgataaagttggaacgatagtaccattttcaaatcttgaaacgataaaaatatcggacgatataagagaattagattcttacggattgtatcaaccatattatacgaatgatcttccagggagaacatttgagggggtagagaaatttcatcaaatatttaatgacgcaataacttcggaaaggtttagacaactgaggaaccaaaatttaaatttcataacttttgatgtttattcaaacaagctaatagagggcatagaagatacactcgaaagggaaaatttgattatagaaaggcacggtaatcaagttaaaatgtttccccttgctgcggaactttacatgtcaatgctcagcgaattgttagcaaataatgatgatgtaaatatagtaaccccaacaacagaccaacgaagaattgaaatcctaacttatgaatgcactaataatccatcacctacttatcaacttgaattacaaaaatgtcttccagttgtaagtcctgatgctacattaagtcaagtaatagaatttagaagaacacggcatactgaattgtttaggtttagaagcgtattaaaggaaatgcaagatgatatatcagattccgttaaccagaaagaaatgaatgacaaagtaaaatattgggctgaccaaattacacaagctattaaggatctacaaaatttatatggaagatctgaaatggctttttctttaaagtcaatgaaagcgttactgacttttaaaaaaccagaaggttttctttttggagcagctgctacagaagctgcgaattatcttgcaaaatcagaggtttcaattgctggatacgttagtggagccatcgggttagctatggtaggaatttcaggatatagaagaaatgccaaacaactatcaaaagaagcatttagttatttatattatgcagatcagcaaggcttattggctcaaagttgaattatatattgtctggtattcacaagaaaagaagaggtattacggtagcgaggttcgaaaggaagccattaaaatgagtaatttaacaaggtcggttgcaataggaacaatcagcttattactttgggagatatttaaagtggcatatcatcattttatttacttacataaattattttaataaatggaaagatatttagcagtagtggatattctgggatttagtgatttggtaaataataatagtcataaagacttagtaagtttatatgaaaattttaggattcatattcaaaaaactctagcgaaggacaaggttagaatggatgaattaaatagagctgtatttgatgtaacaaattcaaccattaattcaataattatttctgattcagttattttttggagtaattcaaatacggttgaggaattttttgatcttattgaatgtatatattcacttcttgaatttagccataatacgaccaaaatttatttacgtgcggctttaacttttggaaatttttactttgactatagtggaattgtaaaagggaaaggatcatttttgatgcatccattaatggttggaaaagcattagtcgaagctcatgaaattcaaggcagccttaaattaattggtggagtaatcactaatgaatcaattactaatgctgaaagttctgataaagtcatttttaagcaaaaatgggatcaattattagcagaaaacaagattgtacattatttagtaccagttaagaaagggaataaagaatattggactatcaattgggttcaaactcttgaaaaccctaatgaagcacagataaggaacggttttagctcgtataaaaagactgttgttgatgttgatgttaaattgaaaattgagaatacaataggttatgtgaatcatattagagatacaatacttaaaaatagtgtatggaggtaaaaaatgatttacctttttatatatacattgtatgtgatataaccgaagcctaactaagattttgaaaaagagaatttgtcataacacccgatgctttaggatattttaaattttattctgcttatttggaaaggatatgtcgagattttgccttgtgaaaaagtattgtatgattcaaaaaaagaaaccgggtattattcgacaaattaagaattagccagcaaagtattcatttttttgtcattctattgtcactctatatttaattaaaccagtatttaccggtatctacggtcattaatatgttccagtcccgggcacttagcttttcttttgaaacctttcagaaaggatttagttttaattgtccataaataattttgtttccaatcttcttttaatatcctcaatggctacggtttaatagttcgattatttgctactattaaattgtagtgtatattcttactagctttttttaaaatgaaattaattccttggtaaacatcaatagcatcaggcattcctgttattttaccttttgtatcagtatacttttgatgggttggattaatgacaattgctttcccgtcatcagagaaattaatcgctttctttttatcccaactagttactcctggagggatttcttctaagttaaaagttagtgactctgcatcgccaaaactatctttatatgtatat

SEQ ID NO: 549 - DNA, 16411 bp, synthetic construct
  source 1..16411: mol_type = other DNA
  misc_feature 1..16411: note = Synthetic
gaagaaatcctgctgaactggaaaaattactgacagattttcttgccatttccaaaaaatacagagttaaaaataatcttgaggcaaaaagctgggtaaaaatgatttatgctccccaaaatcctcattttgaagtgcagtatttcattaaagattatcagcccaaaagaaatgacgataatgaatattataattctgacatcgaagttgattcagttgctgctactgtagatgaagagggaaatatcgtaagtgatagtataaaaatacgtcagtttaatcctgaaattaataatcaggtctctccgcaggattatgttaaaaacaatgtcaccgattattattactgtacagatcatatgaaagagctgttggaaaacgtagacagggtaaaaaatgaagacttcttttcagaaaacgttcatatttatatctggattgcattttttctttcaacatttattttcagttttagaattacaggacttaaatctcttctgttcagtataatcagcgcaggattgctcgttttgggggttacgttggtcatcgtaatgtacactgcagttacaggacttagagaagagtttttcgttttatatttcttgctgctggtttcgctggtcatcctacttatcccgattttgaaaatggaatctttaagcaaaatggtttcttctgtttttgttaatatttcgatgaatggttttgtactatttcttcttctgatttttggaattatcagtatgcatcaaaaagcagtgtgcggtatagagatttatgacagctatgatatttctcagactaaaacctgtgtcacggtatttgattattttggacttgggataagctatattcttcttttaggagggtttgtttttatgtatttctatacttctgtgctgcaaaaatggaaggcgatgccgaaataattttatcaataacaatatttaaacctcataattcttgtatgaggtttaattttatctataacagccatgaatataattaaaacacttcttgatgctcatatttttcagtctaaaaaacagtgaagcgtcatcagtttttgaagttaagcggagaaaaagacacgaatatttattttattgaaaaagggagtgtcagaatttttataaatgaccagaacgaagagcgtatcatccgttttggctacgaaggaaacatcattgtatctttagactcgttcctgtcggggaatccttctgatttttgcattcaggcaatcaaaaaaactgaagtactcattgccggaaaaaaagacttctacgactttattcagtcttccggggaaaacctgaaattgtggactataattctggaagatcttgttctgcagcaagttgaaagagaaaaagacttgctcatcagcgctcccaaagaacggtatgaaagagtactgaaaagaagtccgcagcttttccagcagattccggacaaatatattgccaattatctcagaatgtcacccgaaactctttccagactcaaaaaatcttgactctcatcaatatttatgattactcaaagccggatctttgccataaaattgacatgaaaatgaatacacaacaattgattgatgaactgaaaagtattacgcaggataatctgaattttgcagagaaacttctcaatcagcctgatgaaaaactcaatttcagattttcagaaaagagctggagtattttggaatgtctggaacatcttaatttgtacggaaaattttatctgcctgaaataagaaaaagcattcaaaattcagataccacatttatagagattttcagttccggaatgttaggaaattattttgcaaaatctatgctgccgaagcagaaactcaataaaatgaagactttcagaaacatgaatcccattcacagcaatctggatagaaaagtgctgaacgagtttattgcccagcaaaaacagatgacacagcttttaaatgatgctggaaaagtaaatttaaatgctataaaaacaggaatcagcatttcaggttttatcaggctcaagctgggagataccttccgctttgtcatttatcataacctgagacatgtcgaacaggcaaaaaagcttctgcaagtttaacaaaatttatcaaaatcgaaagactgttttatgaacttgattttgtatttttaaacaaatttttaaaaaagtgaaaaaaatattattagcagtttgtatatcggcttctgccattgcttttgcacaggattattctgtaccggcagcaagcccgcgccaaaaagttgagcagcagttttcaatgtctaaaattaccgtagattacggaagaccgggagtgaaaggaagaaaaatattcggtgagctcgttccttacggtcaggtttggagagcaggagccaactcatctacaaaaatcacattcgggcagtcggttaattttggaggtaaaacagttcaggcaggtacgtatggattatttattgttccgactgaaaaagaatggaaggtaatcttaaataaagacttccagcaatggggagcttatacatatgatcctaaacaggatgttgtagatgttacggtgccggtcaataccttggcagataagcaggagtggtttgaaattactttaaatcctactgatgaaaactctggaaatctggtgattaaatgggatatggctcaggctgaaattcctttaaaaccagctaaacctgatgcggtaaccaaaattgctgagaaattaaaagaaattaagaaaatagaatcggacgctgcaaaatctaaaggataatgctataaacaataaacatcccctttataacgaggggattttttgaaccttagtttttaaaaatatttatatatgaaaaagtataaaatccagaagtcaccctttgtagttcccaccaacgatggtaagcttattcaggaacattggggcaactcaacagaaaatcccaatatatctattgcacacatgattgcaccgcctaattggagcgagcctcaccaaacccctgaatttgatgaatttaccttgatcatctccgggaaaaaacaatttgaaattgacggtgaagtaattgttttagaaaaagggcaaagtattatgatcgaaaaaggagccagaatacgttatagcaatccttttccggaagaatgcgagtatattgctatctgccttcctgcattttctatggaaaaagtaaacagggaagatgaaggagtagattgatgtaaaaatgtaacaatgcaccaattattttctatttgttacactgttacatttttgttttgctttagtgaatggatgtcgtattacttcaggatttctttcaaaaataaaagtgtatgattccacgctctttttgccataacgggattataatcaggagattttgggtctgtaaaagtatgtttagaatcagcatatgtaatgatctgccaatctgcttttccgtctttcatttcttttacaagattatcgtaatcttctttgctaacgctttggtcttccgcaggattttcgaccagaacttttgtcagaatcttcctgttttctctggatgggtctttcccgatacttccatgaatggaaaccacaccggctacgggaagctgtcctcttgccgactccaaagctcctgttccgccgaaacagtagccaattactgcaattttttctgcggcagccccatttttcttcagttgttccaaagctaatgcaattcttttctgataatcgttaaaattcttcttgtaatagcctgagctttttgctgccgatgcattatccgtgggaacatttccttcaccataaatatcagcaataaaagcaatatagccttgtttttccagatctgcagcagcagttttggcttcatcatcaatccctttccaggcggggagaatcaacactccgggaagtttttttcctgcatttgcagtaaccagtccgttcagtttttgtgagccatcctgataagagacttttttaagattctgacccagaacagttccggatgtcatcagaaatgcagacagtaaaataatgcgtatcatattttgtaattttattgatgtcaatcttttcgtagcagctcttaaagttttgatgattgtatttcaggttcattattttcaggagctttttcccgctttccgctgtatcttttttgaacggactccgctttgctccgtccgctcaaaaaaggatgccgctccaatcggggctattttattccgatgaaagaataagcaaaaatcgtactcgaatttaaaaaggtaatttatttaagtttgaatctaagctttataaaaaagatactctccgctttcataataggcacgaatatgctgcaatccgtttgtcagaacaatttccgaagctccgataatagagttgtatcttgcggtttgctcaaaggttttttcggtaagcttaatttgaggtgctttacattcgatcaaaattttgggttgggctttttcggtgatcagaagatctatccgtttcgttaagccattcagcaagatctttttttccgtaatcaaagcggagacagagtaggattttaccgtaagataataatggatccaatgctgccgtacccattcttccggagtaagcaaaagataagttttgcgtaccagatcatagataaaaaacttatctttgtctttcttgaatttaaaatcaaaagtttcctgaaaattcagtttgggaagttccattagtaaaagatgaaagaattagatttaatcctcaaaaatattaaaaataaagaagttctgccgatttatttttttcacggagaagaaccttactttattgatcttgctgtaaaagctctggaaaatgattttcttgaagaagacgagaaagcctttaaccagactgttgtttacggaaaagatacaacatatcaggaagttctttcgctggcaagacagtttccgatgatgggtgataagcaggttatcattgtaaaagaggctcaggatctgaagcttaccgaaaatgaaggcaatgcactggaagcgtacattcagaatgcggttccatctactgttttagtctttgctcataaacataaaaagatggacagccgtaaaaaggttaccaagcttctggaaaaatcaggagcattatttctgagtgaatcggtaaaggaaaatcagcttccgaaatggattgcagacgaatgtattaaactgaatattaaaacggctcccaatatttcgcatcttcttgcagaatatcttggtaacgatctttccagaattgccaatgaactgaacaagcttaaaatcattcttaaacaaggtgacattttagatggaacgatggtagaaaatcacatcggaatcagcaaagaatttaatgtttttgaattacagaaagctttaggaacaaaaaatgccaatgcagcttttaagattgcccattttatgggtaaaaatccgaaaaacaacccgtttgtgatgatgctggcaagtttatacagttatttttccaacataattatttataacactatggctggacagcctccgcaggttatcgcttctcagatggggatcaatccttattttattaaagattacgccgaagcagcgaggttatatccgctaaagcattctaccagagtaatttctattttacgggaatttgacatgaaaggaaaagggcttggagcagttaacatgactgaagctgaacttattaaagaattggtgtacaaaatcatcaatgtggataaaattaagatgaaagtgtgaaaatgaacaatgaatagtcattcatttcaggtgacaatttttggatgaaaaattcacaattcacgcattgactttaaaatcgaccattcatatatcagatattgacaactatcatcaaaataaatttaattagaaagtaaaatttacgaacttagcacccgaattttttaaattattgaaaaacagattatggagcaaaatattttagattgtgtaatagtaggatccggaccttctggttttaccgcagcgatttatgccgcaagagctgacctgaaacccgaattatacacaggtcttgaaccgggcggacaattgactacgacgactgaagtggataatttcccgggatatcctgcagggattaccggtcctgaaatgatgatggatcttcagaaacaggcggaaagatttgatacgaaagtacattacgaactgattacaaaagctgaattctcccgtgaagttggaggagttcacaagttgtatgcaggaaacaaagagattcttgcaaaaacggttattatttccaccggagctacagcaaaatatctgggtcttgatgatgaaaaaaaatatgccggaggaggtgtttcggcgtgtgcgacttgtgacggtttcttctataaaggaaaagatgtagtagtagtgggagcaggagatactgccgcagaagaagccacttatcttgcaaaattgtgcagaaaagtaaccatgctcgtaagaaaagatgtcttcagagcttctaaagcaatgattcacagagtggaaaatactccgaatattgaagtgaaattccaccatgaactgatcggaatagaaggcgccaataatctggtagaaaaagcagtgatcatcaataatcagacacaggaaaaatctactgttgatgtagaagggatttttattgctatcggtcacaaaccgaataccgatgtttttgttggtcagattgatgtagatgaaaacggatatatcatcaccgaaaaaggctctacaagaaccaatcttccgggagtatttgcagcaggagatgtacaggatcatatctacagacaggcaattactgcagcaggaagcggctgtatggcagcaatggatgccgaaaaatatcttgccgaactggaatagtataaggattacttttaatttatataagcaaaaaaccgccattcaagagattggcggttttatattttactaaactgagtttatactaagtttttccaataaaagtaaattgtattatttactttgatcaagcactttattataatacaggagatcattgttttcatcaaaaccaataataatgactttaaattttttagcatcatcgttattataccattggataacagttggttcagatggtttactttccacatacggattccagtaaagaacatctcttttatcctgagcaatgttcctaagacgttcatcctcgtaaatattattgataaaaggtacttctttattgtagccggtaagtttgacttcagtcaatgtagatggcagactaggatctatggttgctcccgaggtaccgccgcgtttagtataaattgcaatagctccgtctccgcctccaaagtttcctgcaaaacttccccggataacttttatcatcgcaatagagggaaccggaatgttggatatctgtgatgcgtccattctcatttcatccaggaaaaatgcaataggacttcctctaaaactggcagtataatttcctccctgcatttgaatctgtaagccggcaacccgtccttgtaaccattgtaatatattgaaagaagcttgtgctcccatattatcatttacaaaatcaaaaaccacttcattattacttttaaataacggactgctgagttcattattaagtttttttgtaaggtcttttttttgtgcttttatagtaacttcctcaattaatgttactttttcattaaattcagctgtactgcgtttgttaacaatagctctttctatctcctgagaatttttatcacctccattacgggataccaattgatattctgttttcggaaggtttattttcagtggcagaaatgcaaagtttggctgaaaataaacctgtactgcattttttgtagctttttcactattcagctgataagaaaatttcatatcctcttcaaaaatcaaaccgttcaaggtaaacagaccatctttatcggtggtaacaacattatattttattccctgattcggcattttgaatatgaggtttatttctgcttctgaagcaggctttcccagttgcatggctttacctttataagaaagatacatttcaggtttgtatttgataaccgggaaatttcctgttatgattgtttgccagctaaagcggttccacttttcagtgatgagcaaggcatctagagcttcaaaatttcggtcagagttaaaatactgtgcaggtttataaatctttgaggttagatcgcctgtaagccataattttgaaggcagactttcttctgattcatgacttcctgcttcaccatccataacagcaactgtataagagtcaattgctttattctgatcaatattaaaagaattgctgtctcttttttgggtactgagtgtaatattttttaaagccggctgactgatttttaaaatttgcggctgtacgaaacaaagtctgtgggcaacaatattttcattttcatcaaataccgtaaggctcaaaataccattgatcaattgattggtaggaattgaatattcctgatctgatattttactgattttagctttgtatacaagctgattgtttattgtacctaaaactttaaattgagagtcagcactaacatttttagatttaagagtaaattttatagcatcattgttgctctttacctgcaaattaatgcccgaagaagctacctgaggtaagctgactgtcagtttttttccgtttgcgtcagatatatttacctgataaacttttcctgattgtggtataaaactgaaagaccctacattctggtcaaaccctttgaagcttacaattttcttttcgggatttaaagactcggtgacatatccttcccattctgacggagtttcaccttttgacttcaatcttactgcaaatttggtctgaatgccgtcaataaatgttccgccttcggggaaaacttcagcagtccatggtgatacagtatctttaacaagtttttccggtgaggatggattatagactaaaataggctgtatttcgttaaattcatcactaaagttacccatccaggtggtgtaagctctcagataatacacatcttctttcagatcttccggtaatgtgatgcttccgctgcctttacctttgatcaggggatatagctttttgctgattaactttttgttctgatcgtacaactcaataaagatgctcgtcgaaattgtagatggactgtatccctcaaaaacgaaagaagtaaaccacagattttcaccggcgacaaaactatttttacttagtaaaagatgtattttttcctgcgggtaattttcttcaaatttcttaagggcggcttcggctttatcctgagcaaaacagaaattggcagttgccatgagaataccgaggctgatttttcttgaaatactaaaattcataaactgttgtgtttttttaatcccacaaaaatacattttatctttagatagagaaataggaattgttttaatttaaataaagtaaaaatagtaacagtgattgtgtatataatgaggactgtaatactttgctaattaaaaattgcttagtaattccaataaaaaaggcgagttgccccaccttgaatgttttcacaacattaaaaatttattgtgaattgcttattgcaaatatataaaaacattttttttgttcaattacggttttccataatcaaatgatattctttctatttatttttagaaattataaaacagatggcagagaattatgaaaaaagcaattcacaactcgtttctcaaattctataaaacaaaatttgaataacaaacaaattctgccatctgatgaacaagttgttaattttattatctaatgagaataataaaaatcaaccatttgataaatgagttatatattttgttaactttgttcattacaaatataaaaaaaataatttaagaaacgaaacttcataaattaaatattatgacaaataaaaaaattctcggactggacattggtactactagtataggctactccataattgaagtcaataatgaaaaaagaaaaaatttaatttcagataagtttgcgacttcagatatcaataacgatcgggttggaatttttaaggatgcaatcggtgttcgaattattaatcaagacacaagtagatttgacagaggtttaaaattaaacgatcctaaaggaagtacacttactccaactgctaatagaagaaaattccgtggtgtgagaagaatgcgtaaccgctataaattaagacgtaataaactttataaagtgctttcaattttgggattaactcctgatgaatcttattttaccaacaaaaaagggaaaagaggaaaagagaatgatattggtaaagccctttacggattgagagaaagagctgcgagagaaagaatttcgttgtctgaattagccagagttttacttcatttaaaccaattgcgaggttatagcagtgaccgctttgcaaaagacgaagaaacaaagtttgattattatttgacggaggtggtagaagttgattgggaaaatagaactgccgtatttgataaaggaagtacagaagatgtaaaatattatcaattcaaagcaaaactacgttttgttgaaccttatgtaattattgaagatgatgaaaaaactatcctttatgaaattgaaggttacatctttaaaaaagaaattgattttgaagttgggaaatttataacaataaaagcaccggaatttaagcaaaataaaaaaggtaaagttgtcgtagaagaatattataaaattacaccaacgaaaccggacgcaactgattggaagtacaaatatcaaactttacataaaaatctttcagattggtgtaaagctggtggaacggttggttcttatttctacaaaaatttctatgaattagctaccctttcaagaattagaaataatgtggtaaaccgagaatggtatgaaaaagaatttgatgctatttgggctttgcaatatgagtttcacaaagacttttttgacaaaattgatgtaagcaatttggtaaaagatgttttcaaagattatagcactgttttgaatgatgtaattaataaatctggaaataaagcacaactacaaaccctaataaaagataaaatcattttctttcaacgaccttggcaacaagctaaaagtaaaggaagatgtgagtttgagaaaataaaagtcaaaagggaatatgcaattaaaggaactggcacgaaagaagtaagagaagaacatattggaagaacggtggttccgagaagtcatcctatttttcaggattttaaagtttggcaacaaatcaataatgtaagattgatttggaatacaactgacgaaaaaataaatctttttgaaaatgctgaactattcgaaaagcttacgggcaaaacaattgaagtagtaaaagaacttttattcaaaaaattacaaggaagtaaaacactgagttggcgaacttttgtaaaagaagaattagggttagatacatacgatgaaattgaagaaaaaaagaaagtgaaagtttctaaaaatcaaggattagatttagaaacaggtgaagttgtggacgagtttttttcagtcaattttagaaaaagaaaaagagacggaacatatgatgatattaaattaaaaggaaatacgacaaaagccgaacttcaaaacattctgaaagaaaaacctacggagtggtttgaatctcttcacgaccaaaataaaaaagtaaccaatcttcaactgctttgggaaattatttatgacattacaaacactgatgttgcaaaagtttcctcaatcattaaaaaacactttgattttgatgaagatgtttgtttaacactttcaaaagtacagtttgacgattccggaatggcaaatttatctgcaaaggcaatccggaattttctaccattaatgagtgatggaaagaattattcgaaaatagcaaaagcaaaagttgatgaattgatttctttaaatagttcagaaactgatattgatgtagatgaaaaattgagtggattaagagattttgtaactgacagaaaagcaagagttcgcttgtcaaagtttgcttcggagaatgaatttaaataccttaattattgggaagcagcagcaatcatttatggttcacattcatcaaaaggaaattcgcaagctggaattatgaaaaaggttaaacctcattcaatgaacaatccagtagtggaaaaaattgtaaacgaaacgatttcaattgtaaatgaacttaaaaaagaatatggatttgatgaagttaggatagagttgagccgagagttaagagctagtgcggatgaacgtcagcaaatgtgggaaggaatgagcaacggtgcagctaaaaatgaatgggctaagaaaatgctccgcgaaataaagcaagcgatgttggaagataacagagatatttctcaattagatacagagatttccggaagtaatttagataaaattaaaatcattgaagatgtagtaaaatatcaaaaacaagcagaattcaaaaacaaagaaaaagagtataaacttacagagccaaccaacgccgaggttacaaaataccttttgtggttggagcaaaactttaaatgcccttacatcaatcagccaattcccttaacggatgtttttgcaagagggaaagtggtggaaatagaacacatcattccaaggcaacgatattattctaacgcttatgcaaacaaagtaataacttggagagaagtaaaccaagaaaaaggaaataaaacggcttatgaatttatcgtaagcaaacgaaattctacaggaattgtaaaagttggcaagaaagaaatttcgctcgttgctgccaatcaatgggaaaatcacgtaaaagaaatgtttcctaaaggaggtaaaagaaataaccttttgcgcaaagaaataccagaagacccaattgaaagaaccttaaaagaaactcaatacatcaataaaaagctaaaggaaaaattgggtgagttagtgggttcagataaagtttgggtaacatctggtgccgttactgatattctaagagaaaaatggaaactgaatgacatttggaaagagttagtagaagagcgttttgtaaagtttaataacggagaatcaaaagagcggttaaatctaaaatataccacaaaacattacaatagtaaaacgaatcaatatgaagatgttgagaaatttgctggaatgtctaaaagaattgaccatcgccaccacgctttagatgcgattattatagcttgtaccaagcaaaatcacattcaatatatcaataatttgaatgcggttaacagtgcagatattgaaaatgatgatagcaaaaaagcaaaatacaaagacataaaaaatgatgtttgtataggagatagtagtagtaaattcaagtttccttgggatgaaaataaatttattcccgaagtcaaacaagctttgcaaaatgtattgatttcccataaaaattcaaatgttttaatcagtccatccaaacatcgtgtaaacaaagatattaattcgggtaaattggcttcggtaagaggtgagttacatcttcaaaccaattacaccaaaaagaaatattttgaaaatgagaaaattgatattttaaaattgattccacttttgtttaaaaagaaatttgaaaaccaaaaccagacattggttcgtttcaaatctttcgatgaaattattaaggaaacagttttaaaagagaaatatcagaatgttttaatttctttatttgaagaatatgaagtcgagaaattgaatacacaaactgtaaaagttttttctaaaaaagttttgaaaaagattgaagatgaaaaactatttattcacgaaaagtctggcgaaaaaatgacttggttgtcaattttcacagaaaaaaatgcctctgtaagaccgatgggattatcaatggatttgaatagtgacaaggaagttaaagatatttcaaatccgagattaagaagaattggacagtaccgcttgaattatatcaataaaaaaattgcggatataaaagccttgaaattaacttttaaggaagaagaaaataccagagtccgtgaaattagagaaatcccactttacaataacgctatttatgaagtaagaataaaacaaaaagatggaaaatatcaatgggttgaaataaaagatttacaacattcagatttagaaaatattgaatatgcaaaacctgaaacaactattgctattaagaataaacttaaagaattttcactcgaagaattgaaagaaagatatatttcaaaaccgattttcttgtcagaaaaaccaacacttgtaaagaaagcacggcagaaaagtttctttcaagatttgtatgaattgaatgatgggcgatacgtttattcgagagatgtctttatgtcctatgtttttgttccagaagattcaaatcggaaagatgctaaacgagaattggagtttttaaagttttttgatgcagtaaaaattgtaaccttagaaaaacccgataaaatcgattataaaaacttattaaaaaaggaaggttacaaattactgtttacattatccaaaaacgacatagtgtatttaccagatgaagttttaacggacgaacaaatagcagaaattaattgggaaaataggagtgaaattatcccaaaactatttgttgtgaaagatatgaacccaagcagaaatgaaatattgttccaacacatcaataaatctgattcaattaaagtaagtgcagatgaagctaaaaacattttaaacactgacaaactagaagaagaaattaagtatggtgatacaaatatgtggaagcgttgtattaaagtaagtattgacaaacttggaagagagataaagccttattgggaaagcagtaaaataatattatgatcacccgctccatctacatcggaaatcccgcttatcttaaactcaaagacgagcaattgaaaattctctgtccggaaaccaaaacggaaaaggggagtgtccctgtggaagatttggggttgttgatgctggatcattatcagattaccatttcgcaccatctgattcagaaaatgatgggaaacaatgttgtggtggtgagttgcgatgcccatcatttaccgcacggaataatgcttccgctgtacgggcataccgaacattccgaccgggtaaaagatcagttggaagccagtgaaccgctgaaaaaacagctttggaaacaaacagtggaatgcaagatcgaaaaccagaaaaatgttctgatgaaactggggaattactatgaaccgatgattgaatatcagagaaacgtaaaatccggcgacattacgaatatggaagggattgcggcacagcattactggaaataccttatcagtctggattttttgaggcagcgttttggagattcacccaatcagttttttaattttggatatgccgtgcttagaagcattgtggcaagagccattgtagaaaccggactgttgcctgttctcggcatttttcataaaaataaatacaatccgtattgccttgccgatgatttaatggaaccttatcgtccgtttgttgatctactcgtgatgcagtggctgaaaattcatccggataccgaagaactgacgaaagaatttaaagcacatattctccagattgcaaccaaagatgtgcgtattgatgacaaaacaagaccgttgctggttgcagtaaaaacaaccgcttcatcgctttacaaatgctacacaggagaaaaacgactgatttcctatcccgaattgatgtaatttttttatggcagctttatccgccctccgttcccgcttttttgcagatttccaaccgcatttttccagaaccaaaatctgcaaaaagagctccactcaggtcgggctgcaaacgttacgacaaacaaacaatagtcaccaaaaatgaacgccgaaaggtttaatgcataccgaattatgtgggttttagtattatatgacctcccgaccgaaacgaaagcaaatatgaaagatgcaaaccgttttcggaaggcattgattgatgacggatttaccttatttcagttttcgatgtatgtgcgtcattgtccgagccgggaaaatgcagaagttcatatcaagagagtcaaatttatgcttcccaaagccggaaaggttgccattatgtgcattaccgataaacaatttggagacatcgaaatcttttttgccagaaataaagaagaaccgccaccgaccttccaacaactcgaattattctgaattttaaatcctgaaaacaaaataaacccactgtaattcagtg

SEQ ID NO: 550 - DNA, 8209 bp, synthetic construct
  misc_feature 1..8209: note = Synthetic
  source 1..8209: mol_type = other DNA
gggcttacctagggttacttatgggcttacctagggttacttatgggcttacctagggctacttatgggcttacctagggttacttatgggcttacctagggctacttatgggcttacctagggctacttttgggcttacctagggctacttttggccttacctggggtaaggtttgcccttatctaaggttttgccgatatacttgttgagtattggtaagctatagatgtaaaaaggaaatcacacaatcggagccactgagcggaagtaatggtattgtggcaagctgatttttactttttgtttacgcagcgtccctttacaaagacgttaattgcaagaaaaggggctgaataaaatatctgaggtttaaaaaaacataaaatatgtaaccagtattgttagttatatgtgtaaaatcattattttgaggaaaagattatatgataattgggtaacactgaaaggtcaaataaaaaaagcgacttgcgccgctttagatgttttcacaacgataaaatcttattgtgatttgcttcgttgtaaaattaggaataaatactattaaacaaaataatatgaaaaaaattcttggactagacattggaacaacttctatcggatgggctattgtagaggccactgatgaaaaaaatgtaaatgacgttacaggtaaagaggcagaaaccgatattaacaacaaccgaataggcatttatgaagatgctgttggtgtaagaattatagcacaggataccgaaagatttgataaagggcttacacttaatgacccaaaaggaagtacacttacacctacagccaatagaagagttaagagaggtgttagacgaatgaaaagccgatataaactacgaagggacaaattgggaagggttttggattttattggcatgaaccccgataaggcttatttcacaaatgaaaaaggaaaaagaggagagaataacgatattgggaaagctatctatcagttaagagataaggccgtaaaagaggcaatttcattgaatgaattgggtagaatattgtcccatttgaatcaaacgagaggttatagtagcgatagattcgctaaggaagaaaaaccaaagtttgattattatgttgctgaagtcttagaagttgacgaagcaaataaaattgccatagttgatgaaacaaacaaagacgaaatcaaatattataaggtttctatcaagataagatttgatgagccctataaccttggtgatgaagaaaataaaaaaattgttactgaattagagggcattcttttcaaaaaagtaattgacttaaaaaaaggtgattttgttacagttaaaaagcctgagattaaacaagataaaaaaggaaaagttattctggcggaatactataaaataacccttacagtccctgaccctactgattggaattacaagtatcaatcactgcaaaaaaccttaactgaatggtgtgaagcaggatatacagttggctcttttttctataaaaatttttataaaaaccaatcaatcccacggataagaaatcaagtggtaaatagaagatggtacgaggacgaattggataagattttagacttccaatacaaataccatatagacttctttgaaaaattggatatagaagcaattgtaaaagttgctttcaaagattatcaagcaatcttaaatgatgtgttgaagaaagatggcaataaggaacaattgaaatgcttgataaaagataaaatcattttcttccaacgcccttggcaacaagccaagaataagggacaatgtccttttgaaaaggttaaggttaaaaaagaaaaggctattaagggaactggcaaaaaagaaattgttgagcagcatataggcagaactgttatcccaagaagccatcctttatttcaagaatttaaaatttggcagcaaataaataacgccagaatatttttgcatattaaaagtgaaagacttgatctattctctaattcaaatgattttgaaaaatacataggcaaaacaataccacaagtaaaaggcttattctacaatgcactgcaaatgagtaaaacgttgtcatggagaagttttgctatcaatgatttaggactaaaaaagggtgtagaagtagttgataaagacacaggcgaaatgacagttgcttttttcaattacaatttcagaaaacaaaaaaaggatggcacctacgaagacattaaactaaaaggaaacaatacaaaggtctctttacaaaatatattgtcaactaagccagcagattggtttaaccaaatgcattcagacaaacaacaaataacaaaccttcaactactttgggagataatttatgatataacaaatagtgatgcaaacaaagttgcgaccattattgaaaatcattttgcatttgataaagacatttgttttcagttagccaatttaaaatttgacgatgctggcatgggtagcctttctgcaaaagctatcagacaaatattaccattaatgagtgatggcaaatacatcacagataaaacaacggagaaagtcaattcacttttagcccttaatacaagtaatgaagaaaaagcaaaagacaaagacgaaaaattggaaagtctgaaagaatttattcctgacaaaaaagcccgacttagactttcaaaatttaataccgcaggcgactttacttatctgaactattgggaagcaactgccgtgaggtatggctcacattctactaaaaaaggttctccaattggcacaatgaagcctgttgaaaggcatagcatgaacaacccaattgttgaaaaaatagtgaacgaaacaatatctgttgtaaatgatattcagcagaaatatggatttgatgaagtaaggattgaattaagtagagaactgaaagcgagtatggatgaaagacaacaaatatgggaaggcatgaatgaaggagctaagaaaaatgaatgggcaaaacagatgctaagggaattaaaagccgatttaaaagaagggaaagatgctataccaaaagacgttaaaacatggtcagagaaattgaagaatgcaaatcttgaaaccgaaacatctaacaatagcaatatcaataaaataaaaattattgaagatgtggtaagatttaaaaatgctgaagaatataaagtaaaatctaaggagtataggttaagcgaaccaactcaactagaagttaaaaaatatctaatgtggcttgaacaaaattttaaatgtccatacacaaatcagccaataccctttactgatgtttttgcaaggggcaaagtcgtagaaattgaacacattatccctagagaacgatacttccttaactcttatgcaaataaggtcattacctggagagaagtaaaccaagctaaagcaaataatggcaatagaactgcttatgagtttattgttagcaaaaggttagaagaaaaagtaaaggtgggtaacaacgagttcacccttatttcaaaagaggaatgggaaagccatgtaaaatctatgtttccaaaaggtggaaaacaaaccaatttattgcgtaaagaaatacccgaagatccaattaatagaacgcttaatgaaactcagtacatcaataaaaagctaaaagaaaagttaagtgaattagtgggtgcgcaaaaagtatgggtaacatctggtgctgtaacagatattttaagagaccgttggcatttgaatgacatcatgaaagaattgatgcgtagccgttttgagaattttgaaataccaaccggcaagaaatcaattaagctaaaaacgcttgctgaacaacaagtaatgtttaataatattcagagcgttttagataatccaaatggttttgaagtttataaaattccaactggcaaaaaatttattgaaataagagatattgaagaacttaaaaaaatacattcggaattagaaacattgataaaagaaaacacaataaccattaaccagaaaataaagtcttacggctactcaaccagtgaagaagcatttgaaacaaaaagtttaacacattttacccaacagtacaacaataaaactggcaactatgaagatagagaggtgtttgaaggttattcaaaaaggcttgaccatcgacatcatgcgatggatgcaataattattgcttgcaccaaacaaaatcacattcaatacatcaatacactaaatgcaattaacagtgccgaccaagaaagtgatgatagcaaaaaagcaaaatatagttcattgaaagctgatgtatgtattggtaagagcagtaaaaaatttaaaacaccttggattgaagataggtttataccagatataagaaacgctttaagtgaagtcgttatctctcataaaaatacgaggctacttattagcccttcaaaacatagagttaataaagatattaagcctaacaaaatagcatcaataagaggcgaattgcataaggaaaccaattatgcaaaaaagaattattttgtagaaggaggtagaacttttgtcaacaaattaattccacaaatcctgaaagacaaaaaagagaaccagggtcaaacacgtgtgttttttaaatcaatagaagaaataattaaagagactgtattaaaaaagaaatatcaggatatacttattcctctttttagtaaatacgaacatgataccttagatgatgaaaaatgtaaaacgcatagcaaggcaattttaaaagaaattgaagaaaataagttgctcatcaattcgcaaactaaagattctttacaatggctttctacatattcagataaagaacattcttcaagaccaatgggtctttcaatggatttgaacaaggctgatgttattgaaaagattgcagacccaagaataaaaagattagcactttacagacttaagtatgtaaataaacaaaaggtagcaattgacaaactggatatagaaaaaaaagacaaggacaaactaaaaagagatgtcgaaactctttcattgtacagcaatgccatatatgaagttagggtacaattggataaccataaagacaaaatgaagaggaacgaaaaggcatataaatgggtagagttaattgattttgattggaatgattatgataagatatggtatgcaaaagacgaaacaacaaaaaaaataaaggaaaaattaaatgaaagggattttgaagcattaaaacaaacctatttcacttcacctctttttttatcaaaaacacctattgaagttaaaaaatccagccagcttttttcttttgaactatatgaaattactaaaggtaggtatgtttatgcaagcgatgtttttatgacatacttttttagagacaaaaacgagacaacaaaagatgcaaaacgaagtattgcgtttttgaaactacttgatgctgcaaggatagcttcatttgaaaaacctgataaacttgattattcaaaattcatttctaaacctgaatctgaattgatttttacgttgtcaaaaaatgatttggtgtatttacccgtacaaaatttatcaaaagagcaaatggacgaaattgattggacaaacatgcaatcaataatgccccttctacatattgtcaaggacatgaatccaagtagaaacgaaattaaatttcagcaactctctcaagcagattccataaaaataactgaagctgacagcagatcactctttaataatcttgagctaaaagaacaaacagaaactatcaaatatggggatactaaaacttggcaacgatgtatcaaagtttttacagataaacttggcaaaaaagtagtcccttattgggagtttccaaatggctgctgggataaagaaaaagcaattgaattaggattaactaaaaacggcttatgatcaaacgcaccatctgcatagaaaatgcttgcttcctaaagttcagcaatgagcagatggtagtaagttacggtcatatcaaaggcatggaagataagcccgataaaactgtacctattgaagaccttggcatacttgtgctggagcatcagcaaataacccttacacattacctgcttgataaactggtaagtgctaatgttgccgtaattacctgtaacgatacccaccaccctaccggtttactaatgcctttggaaagtaatatactgcaaagtgaacggttcagggcacagatagaagctagtgagccgctgaaaaaacaactgtggcagcaaacagtaaaggcaaaaatcagcaaccaggccgcagtgataaaaaagtgggagggtaaatacaacctgcttaccagcctggctgccagtgtaagaagtggtgacgaaggcaacaatgaagccgtggctgctgcccattactggcaaaacctttttccaccctcgtggaacttttacagaaagcgggatggcacagcacccaataacttattaaattatggatatgccattgttcgggcgggtatggccagggctattaccggtgccggcttattaccaacccatggtatttttcaccgtaaccggtacaacgcctattgccttgcagatgatatgatggaaccttatcgaccttacgtggatgtggttatacgcaccataattcacaatacatctgccgtggctacactaacacaggagttaaaagtagaactgctgaaaatacccacgctggatgtgctgattgacggtgataaaagcccgctgatggtggccatgcagcgtacagccgtatcgcttgcccgatgctatgcaggtgaacagcgtaaactactgctgccacaaatgccatgaaaagtgaacgcctaaacgcataccgcattatgtgggtacttgtattttacgacttaccaaccgaaaccaaaaaggaacgaaagatagctggtgattttcggaagaagattatggcagatgggtttgccatgtttcagtttagcctttacctgcggcatagtgccagtatggaaaatgcacaggtgcatgtggccagagtaaaaaagatattaccggaaaaaggaaaagtgggcattatgacaattaccgataaacagtttggtatgatggagatatttcatggccaaaagacggctgagcgtggcgatgttccccaacaattggaactattttagataaataggataaagaaaatgcctcccggtcaaatgaccgggaggcattttaatgatttttcgccctgtacaattaatgataaacccttgctgacattgacttttgccgtaaactgttgttatcaaatgtacaaagagctgaagttgaaagcaaatcacaaccataaccacaccaccggcaccaaattgaagttgttatcaaatgtacaaagagctgaagttgaaagcaaatcacaacccaacatgggtactacatcaacaggcaatagttgttatcaaatgtacaaagagctgaagttgaaagcaaatcacaactattgagaatgtcgttttagaaacgcatccgttgttatcaaatgtacaaagagctgaagttgaaagcaaatcacaacatatccacattgttgttgtagaaaacaacgttgttatcaaatgtacaaagagctgaagttgaaagcaaatcacaacctaccggaatagcttgcatcaccgccatacaccgccgtaatattatgtgaggaaacggttaaattagaaacacttaacgttgcaataccggatgaaagaactccggtacctattgctacaaggccgtctcgaaacgtaatactacctgttgctaaagttgtatttattgttgctgtaaatgtagtcaactgattaaatgaagttggattaaccgatgatacaagggctgtcgttgtgggtgttattgatgtgcctgtagtaccattgtttattaatattttactaccccatgccggtattgttagcgtgttgttataaacattacccagcacatctttcttacttaatcctgtaaatgttactactcttggtgtgttgctggcattgtattctaaatacccggcagaaggtattgcggttgaattagtttcttttcctgctgtacctgttaagtaactaaaaggtaaattctgttcaatgtacccggtggcattataaagggtggtaatagttttcaaagaggtatccgcccccgttcttaacaggtaaaaattactgtcaattatgcctaaattctgaatactttgtaa

SEQ ID NO: 551 - DNA, 7655 bp, synthetic construct
  misc_feature 1..7655: note = Synthetic
  source 1..7655: mol_type = other DNA
tggtttgcttgcccgaggggaaattgagtttgctgcagcctgcaaggatggagagtaaggcgaagagcaggagttgtgttgtttgtttcatgtgtttgtttttggcttaaacaatgattgtttagcgttatatccggctggtgggggaaatgttacccgggggaggacacagtttgaatcacactcctcccgctgcccgactgacattggtctttgctttaccgacgttggcatttgcgggcaaacgcgtcccgcgtctctcttcgaggatggtcattgtttgaccggagctgcctcttgcttgacattttccctgtcttgcatcttgctacttctcatctcgctactattcctgatatgagattgaaaaaaaaattacgtttggttgaggagttctttggtggtgaaatcttcatagtcctttatgcttttgtacacgccttctttgatcagccattttacggttttccgttctccgggtgaactgattttataccggaaaccgataggaaacttcctcccgaagattccggtcatataacccggcgatatggctggcctgttttgcttcacctggtataaaagtataacttttgggatcaaccggaaatacgcggtcaatgattgtatccgggataaaagggtgttttacctggtctgtatgcaggggaaaaacacccttttttttgttcctgttttgcgagtggtattcactatgcttttttttactacattgttgcggtaaaacctaagggatgcgatatcgagctttgaccagtatatgctgccggggatggtgggttgataattttaatataatgtgtgtgagggtatgtagaataaaaaaagcgactttcgccgctctaaatgttttcacaacgataaaatcttattgtgatttgcttcgttgtaaaagtaaataaaaaaatgataaaacaaaataaatatgaaaaaaatacttggacttgacatagggactacctctattggctgggcaattgcagaggcaactgatgaaaaaagagtagacgggattactggaaaagaaactgaaacagatataaataatgaccgggtcggaatccataaggatgctgtaggaataagaataattgcacaggatactgaaaggtttgatcgtggcgaaacgcttaatgaccctaaagggtcaaccttaacgcctgccgcgaacaggcgtaaatataggggggcgaggaggatgcgaaacaggtataagttgcgccggggtaaattagagcatattttagctttcatcagtatgaatcctgataaggcatactatactaataacaaaggaaagaggggtacatataacgatataggaaaagccatttatcagttaaggtcaagagcaataaccgaggaaataacattgaatgaattgggcaggatattaattcaccttaaccaatggcgggggtatagcagcgaccggtttgcaaaagaggagaagcctaagttcgactattgggtagtggaagtattagcaattgatgacatgaataaagtcgccatttatgaaaagaacagtaaagaagagattaaatactacgagttttcaataaaagtaaggtttgcagaaccttataatctgggcgatacagaaaaggataatactgttacagaactgtctggattcatctataaaaaggaaatcaaatttaaacaaggtgatttcataacaataaagaggcctgaacttaggcaagtcaaaaaagggaaaactgtcatttctgaatattatacaattacggatactataccagaccccacagattggaattataagtatcaaacacttgagaaaagattggcagaatggtgtgaagcaggggggaccgttgggtcttatttttatcagaatttttatgaaacaacaattcttccgcgtatcaggaacaatgtggttaacaggagatggtatgaagatgagttgaataaaatattagattttcaatattcagttcataaagacttctttgataatcttaatattgaggggctagtaaaagctgcgtttaaagattatgcaccagtattagcagctgtaaccagcaaaattggcattaaggaacaactcaaatgtctgatccgggataaagttatcttttttcaacgaccgtggcagcaagccaagaataaggggcaatgcccttttgaaaaaatcaggataaaaaagaaggtaactataaaaggtacaggacgggaagatgttgttgaagactatgttggcagaaccgtcattcccagaagccatcctttgtttcaggagtttaaaatctggcagcaaatcaataacgtaaggatttatgcaaaaatagctggtgtaaaggttgacttatttgctgatgaaaatgatttcaagaattatgttggaaaaggtatcagggaagtaaagaacatgctttatgatgctttacaacaaagtaaaacactatcatggaaaaactttgccgaaaatcagttggggctaaggaacaaaaaagaaatagtcgatatatcaaccggcgagttgattaaatgtgacttcgagtataatttccgaaagcaaaaaaaagatggtaattatgaagacattaagcttaaagggaatactacgcgggtagcactggccaacgtactaccggatgaagccgatgattggtttgatgaaatacattctgaccggcaagcaatatcgaaccttcagttgctttgggagttgatctatgacatcactaatggggatgttttaaaagttgcggctataataggaaagcatttttgttttgatacagatatttgcttaagtcttgcgaacttaaagtttgacgatgcgggtatgggtaacctttctgcgaaagcaatccggcaaatattaccattaatgagcaatggtgaaggtcttacaaataaaacattaactaaagttaatgcgcttatcgattttaataatagtgcttcagagatggaagcggaggagaaacttgcttctctccgggatattattcctgataagaaagcaaggcaaaggctttcaggatttaccgctatcagcgatttttcttacttaaactactgggaagccactgcggtaaggtatggctctcattctgcacctaagcgcatggttattggcagtatgaaacgggttgagcagcacagcatgaataaccctgttgttgaaaaaattgtcaatgaaaccatttctatagtaaacgaattgtataaagtgtacggatttgatgaagtgaggattgagttaagccgggaacttaaggcaagtcgtgaggagcgccagcaaatatgggaatcaatgaatgctaatgcagacagaaatgaatgggcaaagcagatgctgcgtgaaatgaaaagggagtttgcgggacttgatactgatgcgtcaaataagagtaatattgataagattaagattattgaggacgttataaagtataagtatgccagtgagtataaggttaaagaaaaagagtacaaccttactgaaccatcaaaagcagacgtaaaaagatacctaatgtggcttgagcaaaactttaaatgtccttatacgaaccagccgatcccttttacagatgtttttgcgcataataaggcagtagagattgagcatattattccgctcgaacgctattatcttaattcttacagcaataaggtcattacatggcgggaaataaatcaggccaaagcagattatggaaacagaacagcgtatgaatttattgttagtaagcggaaagatgattttatagtgctgtctgatggcaggaaagtgcctttggtagcaaaggatcgttgggaagaacatataaaggcaatgtttccccggggagctaaacaagcgaatttattgcgtaaggaaattccggaagacccggtaaacagaacaatgaaggagacccagtatataaacaagaaattgaaagagaagctgggggaattggtaggggataaaaaggtatgggttacatcgggcgccgtaactgacattctgcgtgatcggtggcacctgaataatgttatgaaagaattggttcgtgaccggtttgaaaatttcgaactcccgaccgggaaaaagactttccggctaaaaacgctggaagagcaggaaagggtgcttaatgaaataggaaagatattagagggtactgatgattttactacatatgagattccggcggggaaaaaggttattgaattaacggaaattgaagaactcaggacggtatatgctgaactggctgaggttattaatgaaaacacgtttaccggcagcaaaaaggttaccccctatgtgtattcaacaagtgaatcggcttatgaaacaaaaagtttggtacatattaccagtcagatcaatactaaaacaggtcattatcaggatagggaagtatttaatggttattctaaacggctcgatcaccggcaccatgctctggatgcgattattattgcttgtaccaaacaaaaccatatccagtatatcaataccttaaatgccatcaatagcgctgatcaggaaagcgatgaaagtaggaagcgtaaatacgcattgctcaaggcagatatttgtattggtaatagtagcaaggcatttaaaacaccgtgggtggaaaatgaatttttacctcgtgtgaaagaggtcttaagcggtattgttatctctcataaaaatacccgattgcttatcagcccttccaggcacaggaataaaaagggcattgaatcagggatgcttgcttcaataaggggagagttgcacaaggagaccaattatgcgaaaaggagttatttcaatgggggaaaaacgcctgttattaagctgattccgaatatatttgaagcaaagttcaaaaatcagtcacagacgatggttcactggaagacattttccgaaataatcagggagactgttttgaaagaaaagtaccaggcaatcctgattcctttatttgaccagtatgaagagattgtacttagtcgtaccctttgtaaggagtatgggagtattgttttgaatagaatccatactgaaaatttacttgttaattccgggactaatcagccattgcaatggctgtcaacttatgcggagaaagataaatctgcgagacccaatgggctttctatggatttgaacagtaaaaaggaagttgatagtattgctgacccccggattaaacgtatagcgggttacagacttaattatgtgaatgagagaaaggctgcaattgataaattggaaattgataagaaagaaaaagacgctcataaaaggaaagtggaagcactgccattatacagtaatgccatctatgagataaggattaggcttaacgataaggaatataaatggatagaattgaaagatattacccaggctgatgtagaaaaaatctcctacccggaaccattaaatcatgtagcgggcaaggtcggtaatacagaaagggtgaaaaaaatactaatggaggttggtattgaagttgcgaagcatacttattttgataatccgatatttttgtctgataatccgatcgaagttaagaagacgaggcaattgtcttattatcaaaagtctctttatgagataacgcccaaaagatatgttcaggttgaagagacattcatgacttacttctttaaggaaaagaaatctcactcaaaccttaatattagtaatccgttaatccctaaattcttaaaatttattgacgctgtaaatattgtaaataatgaaaaaccttccgcaattcgttacaaagacctgatacaacaagagataactaatgaggaattgcagaatggcgttgaatatgatttggtatttacgctttcaaaaaatgatcttgtatatttacctgacaaggtgttaagcgcagaggaactcgaagcgattgactggactgattttgcgaccattaataaggatatctatattgttaaggatatgaatcagagtcagaaaaaaattgtatttcaacagcaattcaaggctgagtctataacaatatccgctgtggatgccagcgctatttttggaaatgaacagttgaaggagcaggtagaagaaataaagtatggaaatattccgatgctgcagcggtgtattaaagtttttacggataaactgggtaagaaaattgttccttattggaaattccccaatggttgctgggacagacaaagcgcaagagagctgggtctgataaacagggatgccgaatgattaaacgcactttatattttggcaaccctgcttatcttaaaacccgcaatgagcagttgatttttgagagtccggatacaggcgaagtgaagcaggtgccgattgaagacattggggtactgattgctgaccatcagcagatcaccatcagccaggccttgctggccaagctgctggccaataatgtagcgtttatctgctgtgatgatagccacctgcctacggggctactgctgaatttagacgggcatacgctccagagcgccaaatttgctgcgcaggtggaagccagtatgccgctgaagaagcaactctggcaacagaccgtagcggcgaagattaccaatcaggccaggcttcttgctgcccagcgcataccggtaaaaaatatgcttaactgggctgaggaggttcgcagtggtgatgcggataaccttgaagccacggcggcggcctattactggaagcatatttttgccgggtttcccgattttcgccgtgaacgctttggcgacccgccgaataacctgctcaactatgggtatgctatactgcgtgcggtggtggcgcgtagccttgtggccagtggtctgttgcccacactgggtatttttcacaggaaccagtataatgcctattgcctggcggatgatattatggagccttaccggccatttgtggacagggtggtggtggagattacccgtatgcatgggaacttccttgaactgacgccgaatatgaagcgcgacctgctgcagataccggcgggggatgtactgataaagggggagaaaagtccgctgatggtggcggtacagaaaacaacggccagtttggcgcggtgttttgaggggaaaatgcgcaagattgactatcccgaatttgtggggctgccatgaacaggggctaccagaaccgtttaaatgcctaccgcattatgtgggtacttgtattgtttgatctgccaacagagacgaaaaaggagcggagagcctatacagacttccgtaaaaagttgctgaatgatggttttcagatgttccagtttagtatttatatgcggcactgcccgagccgggagaacgcagatgtgcatataaaaagggtaaaaaaagcattgccggagaaggggcatgtgggtattttccagtttacggataagcaatttgggatgattgagctgttttacggcaaaaaggagcagggagccagcccgccggtacaacagttggaaatgttctgagcaggatgagaaaaataagaaaaaaggcgatttttttatcctaaaatcgcctttaaatcctttgtggtagcggcttttggccaaatcggttgtataaagccgaagctacataataattgaaagcaaatcacaacattgaggaagagtgcgaagtta

SEQ ID NO: 552 - DNA, 23447 bp, synthetic construct
  source 1..23447: mol_type = other DNA
  misc_feature 1..23447: note = Synthetic
  variation 14754..16710: note = n is a, c, g, or t
tccttattatcgtcttgataaaaaacagggtcggcgatcaaggcatccatgttttgtaattcttgattcaggcgttgcaactgttgctcaatcttatcgagcttggtttgcaagggtttacgcaattgcgataaacgttgacgctcctcagcctcaaggcgtttttgagtttttctatcgacagaactggcttgagcatcgtctgagtccgtttgtacttgaccacttgtttgttgtttataattgaaaagccactgtttatagtcatctaaatcgccatcaaaatcctgcaacttaccatcggccacaatccaaaaattatcgacagtggtttttagtaagtgccgatcgtgcgagaccaataagagactgccctcaaacaccgccaaagcttctgcgagggcttcgcgtgtttcgacgtcaaggtggttactcggctcatccagtaacagtaaattaggcttttgccatactaaaagcgccaaagccaagcgtgctttttctcccccagaaaaaggcctcacggcatcagtcgctttatccccctgaaaaccaaaactgcctaggtaattgcgtaattcttgttcgcgactctctggagcgagtcgctgtaaatgcaaaaggggactggcatccaggtcgagcatatccaattgttgctgtgcaaaataggcaattttgacgcctttagaaaaatgcaattggcccgcaagcgcaggtaattcacccgcgagggttttgacaagggtcgatttacccgcgccattgacccctaaaatgccaattcgcgcaccgccacgtaccataaaattcacatcagtgagaatcactttgggctgatcggcccctgcataacccgtttgcaagtgctcggcggtgatcaagggatcgggcatggcttgtggctgaggcaactgaatataaatttgacgctcggtttgcaagggcgcgagctgttgcatgcgtgccagcgccttgacccgactttgcgcttgttttgccttggtggccttagctttaaagcgatcaataaaactctgcatatgcgcgatttcgcgctgttgcttttcgtgagcaagttgtgtttgtcgcgtatgttcagctttttgttctataaaggcatcataattgcctttatagcgaataagtttttggtgatcaaaattaagaatatgctgcgccacattgttcagaaattccgtatcatgcgaaatcaacagcactgtgcctttataggcacttaaccatttttcgagccatagcatggcatcgaggtccaagtgattggtgggttcatccagaagtagtaaatctgacggtttcatgagggcgcgtgccagggccaagcgcatttgccagccacccgaaaaatagcgcacagattgttgccatagttcgggttggaaacccagaccggcaagcaattgctcagcccgagactgggccgtccagacgccggcttcttcaagcgctaattccaactcagcgatgcgatggccatcactatcaggcgtttcttgacgtcgtcgctgtaactcacgcagatgctgatcaccatcaattacaaattcggtagcacgtttatcctggtcgtcaatcacctgtttgacactagcgatttgccaagcgacaggaatgtgcagatcgcccgcatcagcgtctatttgaccttgcaacagagcaaataaagtggttttgccagagccattacgaccaacaatgccgagacgttcacctggattcaccacaaaactagcgtcttcgagtaaaactttagtaccgcgttgcagcgttatgccatttgccttaatcaatgtatccctttttatattgattgctgttaagtgctgttaactgcttttaaatgctattggttaggcaaaagcttcaagcaagtgcgaacgttgtagcagcatgatttgatcatcactattggcggtttcgagccagataggttgtaattgcggaaaaacttctgtgaaaaaatctatctcgtgaccaatttctaagactaaaaagccatcatccgtgagatgctttggcgcttgctgcaggattttttggacgagatccatgcccttagtaccgccatgcaaggccagcgccggttcatgctgatactcagggggtaaattctgcatgctttgggcattgacatagggtggattacaaataatgatgtcatagactttattggctaactgctcaaataaatcactttgaataagcgttatatcgtcttgcaattcatactcagcgatattttgttgagctagcgcgatagccgcttcattaatgtcaaccgcatcgacctgcgcattcggaaactccatggcggcaataatcgccaaacaggctgaacccgtgcacatatccagaatccgcatatcgctatagggatcagcgacccagggctgtaatttctcaacaagaagttcggcgattggcgaacgcggcacaatcacatcatttgaggtaataaaacggtagccctggagccaagcttcgccggtcaaatagggtaggggttggcgtgtggcaatgcgtttttcaatcagacccagaacctgcattttttcttcttgaactaaacgacaatttaaaaacggttgcaattgatctaagggtaaagacaaacggtttaggacgagattgaccgcctcgtcccacgcattgctattgccgtgaccaaagctcaattgcgcttgattaaaacgtgaataggcgtagcgaatccaatcgttgacggtatgcaaatcctgacattgattcatgttgtactcttaggcagtcactaatagttttttgagaatagaaaaataaatattcttgagcggttcaagactatcgacagggatatgttcatcgacctgatgaattgtggcattgagcggaccgagttcaatcacctcgggacaaagcttagcgataaaacgaccatcggaagtcccaccggtcgttgacagctctgtttgggtgcctgtttgttcataaatcgccgcactggccgcctcacttaaacgccctttaggggttaaaaacggctcgccgctcagcgtccaatcgattgtataatctagcgcgtgctgctcaagcaccgacgccacccgttgttgtaattgctcggcgctcacttcagaagaaaatctaaaattaaaaagcaattctagagagcctggtaccacattggttgcccccgtacctgcgtggatattagagatttgtaacgtcgttgcaggaaaatactgattgccttgatcccattcagtgtgcaccaactcatctaacgctttgagtgctagatggatcgggtttttggcaaggtgcgggtaggcgacatggccttgtaccccttgaatcgttaatttgccatttaaagaaccacggcggccgtttttgaccacatcgcctaaggtttgacttgaggtcggttcaccaacaatacaaaaatccagtgtttctccgcgcgcctgcagcgtttcacagaccttgaccgtcccatgcgtggccggtccttcttcgtcagaggtgagcagcattgcaatcgaaccttgatgctctggaaattgctgcacaaattcttgtgcggctaccgcaaacgccgcgacagaactcttcatatcggcagcgccacgtccatataattggccattggcaatagtcggtgtaaacggtgggtgcgtccaagcctggggatcgcccgtaggaacaacatcagtatgaccggcaaagaccagcacggggctggtttgacctcgacggagccagagatttttggtatcggcaaaaagcatggactcggcttgaaaaccttgtggcgcgaggaagttcgcaatcaagtcttggcagcccgcatcctcaggcgttactgaggcgcgagcaataagttggcaggctaaatctacaaccgctgacatggtgattgacctactaagctcgtaataaatcgttaatactggttttggagcgtgtttgggcatcgacacgcttgacaatcaccgcacaattaaggttatgcgtaccatcttctgacggtagagaccctggcaccactacagaaccagagggaatacgaccatacgtgatttctttggtctcacgattgtagatcttggtgctttgcgacaaaaacacgcccatggccaagacagagttttcttcgacgataacgccttctaccacctcggagcgggcgccaataaagcaattatcctcaataatggtgggattggcttgtaagggttcgaggacaccgccaatgccaacaccgcccgataaatgcacattttttccaatttgcgcgcaagagcccaccgtcgcccaggtatcgaccatggtgccttgatccacaaaggcaccgatattgacataagacggcatgagtacaacatttttgccaataaaagcaccacgacgcacgactgcattggggactacccggaaaccacctctttcaaagtcctcctgacgatagtcttggaatttgagggggactttgtcgaagtattggagaggaggttggtcaataatcgcattttcatgcaaacgaaacgacaataagacggcttttttgagccactgatgaaccacccattcgtgctcaattttttcggcgacacgtaattgaccttggtctaagccgtgtaaagccgtttggaccgcgtctttgagttcagcagcgggatccgcaaaattaatttggttgcggttatcccaagcgttttcaatcgtgttttgtaaacattggctcataatatatccttcaataaaataaattagtcaattctttgctttacaaaatcggctaggcgttgtgcgccctctatgcattcctcaagcgaggccaccaaggcaatgcgtacgcgctgatgtccaggattgaccccatgtgcagtacgggctaaataactccccggtaagacggtcaccttgcactgttggtacaaatcgcgtacgaatgattcatcatcatacggggtccccgcccaaagataaaaagaggcatcgggtaagcgtacatctagatagggttgtagaatcggcaatactgccttgaacttttcttggtaaagacgacgattatcacgcacatgcgcttcgtcctgccaggcggctatactggctttggcaaaaacgccactcatggcactgccatgataggttcgatacaacaaaaactgctctaataactgggcatcacccgccacaaaaccagatcgcatacccggtagattagagcgcttcgataaactagaaaaactgacaatattcttatagtccgtgcgaccgcatgcatgggcagcttgcagagccccgataggcgcttgctcaaaataaatctcagaatagcactcatcacttgcaatcacaaaaccatactgatcggataatgcaaataattgctgccattgcgcttggtcgatcacattgcctgcggggttaccgggagagcaaataaagagtaaatcggttttttgccacacttctgcgggtaccgactgccaatccggtgcaaaattgcgattgctgtccgcattgacataatatggttttgcgcccgccagcagcgcggccccttcataaatttgataaaagggattagggcaaaccacccagcgatcgccagattgaccattgaccatggcttgcgcaaaagcaaacaaggcttcacgcgaaccgagacaaggcaggacttgacgctcagcatctggggtagggatgtggtagcgttgagcgatccagtgggcaatcacttgccgtaactcatcgctacccttggtgggtggataatgactgagctgattgagatgctcagcaatggcgtgtttgaccagcgcgggcgcagggtgtttgggttcacctatcgataaatcaataaacgaatcatagtgctcagcacaacgaacctcgcccaggagcgatttgagtctggcaaaagggtaaggattgagcaattgcaaattcgggttcataacgttccaattttgtggcacagcacaggcatatatgaatacaataagtgttacattttacatgatgcaagactcgcctgtcttatgagtgcattcgcacggcgtagtctcataacattacggtatccctttatgattttaatcggtcttatcctcttaatcgcctttattgtagtggcgacctccttcttaaaatggcatccctttttagtgctattgctcgcgtctttatttgcagccctttattatcaaattcccttgaccgacatccccaaaaccatagggaccgggtttggtggcttactcggtaatattggcattgttatcgtactgggcactattatcggcgtgatcctagaaaaaacgggggcggccattgtgatggctgatatggtcgtgaaactcatgggtaagcgctacccaaccctagccatggccatcgtgggtgccattgtttcgattccggttttttgcgactcaggttttgtgattctcaattccctcaaaaacggcctgagcaaacggcttggcgtctcggccttagccctgagtacagcgcttgcgggtggcttatatgtgacgcataatctggtgccgccaacaccgggcccgatcgccgctgccggtacgctaggactgaccagtcaaatgggcttggtgattggcgtaggtctattaatttcggtgcccggcgtgctcgtcgcctggctctggtcgcaacgctttttaaaagagacacccgatttagaagaaaccgtcacggagccagaggatattgaagaagaattagcccatccagccgctcatcacttgccaagcccttttatggctggtttacccattttattaccgattatcttaatcgctgttgcctctgtggcggcgtatcccagccatccattgggacaagggtcattggctaatgtggtggcatttttgggtcaacccttgatcgctttattaattggtttatttgttgcgcttttattgttgcgcaatggtacagaccccgtcatgcaacgccttaatgaagccattgtcaaaggtctaactgtgagcgcgccgattattctgatttcaggcgcgggcggtgcgcttggggccgtcctcaaaaacagtcctttgggtgattatttagggacgacgctcagtagcatgggattagggatatttatgccatttgtcgtctcttctgcccttaaaaccgcgcaaggttcctccaccgtagcaatggttaccgccgcggtcattgtagaacccttactcaatgacctaggaatgggttcagacatggctcgagtcctcgtcaccatggcgattgcttccggtgccttaacaatttcccatgcaaacgatagtttcttttgggcggtcacccaattaagtaaaatgagcgcaccccaatgctttcggaccataactgtggtcaccgccttgcaaggcgtcatcatgatgttttttatctggctccttagccttatgtttttatgaaaatagtcatcgcccctgattccttcaaagaaagcctcgatgcgctcagcgtggcgcgtgccatccaaagaggttttgccaagatttatcccgaggcagagtactgctgcttgggcatggccgatggtggtgaaggcaccatgcaagtattagtacatgccctgaacggcacctggcaacaggtgaccgtagaagacccctgtggcagaccgattagcgcacactatggactgctgccagatcacaccgctgtgatggaaatggcgcaagccgctggcctacacctcatacacggtgcacacagaaatccactcattacctcgacctatggtgtggggcaaatgatccaggatgctgtcaacaaaggcgtacgccgtatcgtcttgggcattggtggatcggccaccaatgatgcaggcgccggcatgttacaagccctcggctggcgcttacaagatgccgagcagcgagacttagccagaggtggtgccgcgcttagtcaagtccaccagattttgcctgagcgccgtgaactcgaacactatgcaccacttcagacgttacaagatcttgaattgaccgtgctctgcgatgtggtcaatcctctatgtggtccccaaggcgccagcgctatttttggtccacaaaaaggcgctacagcagagatggtgcagcgtctagatagcgcattaggtcattttgccgactgcgccagtgcccatggctatgaggatgtccgccaccacgccggtgccggtgcagcgggtggactgggctttgcgctgcaggcctttttgggtgcaaaactcgaagcaggtgcgcaacacatcatgcatctcatcaatattgaagcacaactgcaaacagcagatttactcattacgggcgagggcagaatggacaagcagtcgggcatgggtaaggtgccttttgaactcatgcgcttggcacaacgctatcaggtaccgacgattgccattaccggtagcgtggggcaagacgtaggggatttgctcgccgctggatttagtgccgtgattcccagtattgatcaactctgcgagagcgaacaattattcgccaatacggccagcaatcttgaacgcagcgccgaacacattgccgcccttataaaattgcaactaaacacataaagcactggcaggatgagggtagctgctagttgactaaatgaccgctatccttgatgctcattggatatgttttttagaaaaggagacaaagcaatgagcaaattacaggacaaagttgcgattatcagcggttcggggcgtggcatcggccgagccatcgccctaaaacttgcgagcgaaggcgctaaagtcgtggtcaatgatctcgatccagactatgccaaccaagtcttacaagaaattcgcgaggccggtgggcaagcggtggcttgcaatggcgatgtgacggccgccgattttgcagagcgttttgtgcaaaccgccatggacgaatacggtgccttggacattatcatcaataatgccggctacacctgggacaatgtcatccagaagatgagcgatgagcaatggtatgccatcattgattgccacctgaccgcaccctttagaatcctgcgcgccgcgcaaccgattttcaagcaacaagccctcgccgacgcccaagcgggcaaacatatccaaagaaaagtcgtcaatatctcctcgacttcaggagtgtttgggaatgcgggtcaagtcaactacgccgccgccaaagccggcatcctaggcctcaccaaaaccctcgccaaagaatggggccgctatcacgtcaatgtcaatgccgtagccttcggcctgattaaaacccgcctaacgggcgatttaaatgctggcgaaaccgccaacatcgatggcaaagaaattaaattaggtgtcagatccaatactttagcgatgtacgaaaccgtgatcccacttggccgcggcggtagcgctgaagaagccgccaatgcggtgtatttgatgtgtattccagagtcggattatgtgagtggccataccgtgctgtgtacgggcgggttaacaggagggatgtagggggactttgacgtaagaaattaggcagtagaaaagaagatgcccctaatagcagatgctaataggggcagggcttcacaagtaattcttttattgtagtaacggattccactctgtagtgctacaactaagaataagtactcattatagtctttacttataaattaagcaagtgtttttgagtaagtcaattaaataaaataaaaacaatgattagcttctgcaatcattaaacaaaaggatatatctaacataagcatgaaatgctgttgataaatataaatttcttttaaatattaatagcttaatcaaggtcaatatttcaataattagtatcaatttatgtaataataggactgtatagcatggtgttttaaattagcagctgctaatgattaatcttctatcctaatttttccttccgctagccatattaaccattcaaatggaacttataaaatgaacaataatgacatcccccaagctacagatactttttcacaaacgcctgattttgtccctcatgatcctaagattctaaaaaaagagattgattatgtgattggtttagacattggcatagcgagtattgggtgggcggtgctagcactagatgaggaagataaaccgatagcgcttattgatcgtggagtgagattatttgataaggcggaaactaaaaaaggtgactctctctctttggccagacgtacggctagggggcagcggcgtcggattggtagacgtgtcaagcgacttgacttagctcggcagactttaattgagcacggggtcttgcaaccaaatgaccttaataataatccggatggtaatgattttgtggccaataggcctgataatgctcctggtaatacggtatgggacttacgtgtcaaaggtctagaccataagctaaaatctcatgaatgggcggcggtacttttacatttaattaagcgaagagggtatctgtcacaaggcaaaagcgaggcgaaagcagatgaggagactggtaaacttttagcaggtacagcagaaaaccataaaaaactagctaatggtaactacagaacacccgcagagttagctgtcaacacctttgctaaggagtctggtcgaataagaaaccaagcaggtagctatcagcatacatttcttagggaagacctacaaaaagaacttcagtcactctttgaaaaccaacgtaattctaaaaacccatacgcaaatgaaacacttgaaaaggcctttgatgactacttaacgtggcaaaaacctgcattgtcagatgatgcattacttaaaatggtggggccttgtaccttcgaagacggagaaaaacgtgcagccaaagccacctatacggcagaaagatttacctggcttactaagctggctaatcttaaaatcatcacaaacggtgtatctcgagagttaacacctgaagagcgagacaaactaaaagagttaccttttgagttgacaagccttacattttctcaagtacgtaaaaccttaggtttggatgaaaatagtcgctttaatttagcgagttacaaaagcaagaaaaaaagcaagaaaaacaagcaagatacacaaaaagaaaaaacgaagactgtaattaaagacgctgaaaaagaaaccttcatggagtgtaagtcctatcatgctatacgtaaggcgctaggaaagacattagattcagagtgggaggcaatcaaaaacaatccagacttacttgatttgattggtacgacgtttacgatttataaaactgataaagctatccgtaaagaactaaaaagtcatctatctcctgaagccattaatgcccttcagaaaaatttaagttttactaagtttttacatgtttctctcaaaatgattaagaaaatcatgccgtatcttgaagaaggcatgagatatgatgaggcctgcaaagaggtttatggtagtcattatggcaatagcactcaaaggcttctaaaacaatttttgccgcctatggatagcgaagaaaatgtattaaatgatgtaattcgcaacccggtggtggcacgtgccgttagtcaaacgcgcaaagtaatcaatgccattattagacgctatggtagtccgaccaaagttattatcgaaacgggacgagatttaggtaaatcatttcaagaaagaaaagaaattaaagatcatcaaaaggaaaatcgcaatcaaaaactagctgctcaagaggaattcgaaaaacgatttggtgtatcaccaaatggtggtgatctgcttaaaatgcgtctttacgagcagcaacaaggcaaatgcttgtatagcggaacgactatagagttgaatcaactcttagacaaaggctatgttgagattgaccatgcactgccatttagtcgtacgtgggatgacagttttaacaacaaagtacttgtaatgggatctgaaaatcagaataaaggtaatagaaccccttatgaatacttagacggagagcatgatagtgcgcgctggcaaacatatgtagcgttagttaatggttcaaatatgtcttatttaaagaaacagcgcttgttgactaaagagattaaagaagatgaatggaaagcgcgaaatcttaatgatactcgctatattgcgatttatttgcgtgactttattaaggcaaatttactattaaaaagcagcaaagagaataacgtgctcactacgaatggtcgagtgacttcactattgagaggccgctggggattagctaaagatcgtgaagctaacgctcgtcatcatgctatggatgccgtagtcgtggcgtgtactacgccttcatttattcagcgcatcaccaactatatgaaacgtaaagaggctaacgagcgtcttgagaccaccgatccagtcacgggtgaagttaaacgagtgcattttcctaaaccatgggacggttttagatcagaggtattagcgagtatttttagagaaaatcctcaggaggagatccccgcctacagaaaattagttttagatcaatatttggatgtagattctattaaaccattattcgtctcgcgaatgcctagaagagtggtaaccggtgaggggcatgaagcaactattcgatctgctaaaagactcaaagagggactcagcacagttaaaaaatcaattaatgatttgtctaagtctgatcttgagaggttcgttaataaagatcgggaaccaaaattttaccaaattttgaaggatcgtcttgaaactattgaaaatttagttaatgctctaaatgagtctaaaaatacggatgaagaagctcaaataaaaaataaacttaatgaagttaaagaagcacccgtgcataaattgaataatcatggtatgcctacaggtccaatagtaaagtccattcggttgttagttactccaaaatcaggagtaggtattagaaaaggggtagctaataatggtaagatggtcagggtggacatctttaaaaaaggtgagtccttttatggtgttcctatttatgcgtggcaggtagctaaggggatattgcctaataaaggtgtcaatagtaaaaagtcggaaaatgattgggagcttatggatgaatcagctgagtttcaattttcttgttttaaaaatgatttgattaaaattgtgcccaaaactggtgatcacatcttcggttattacgtaggctttgatagagatagacgaagttttacactggcaaaacatgataagggttctacgaatggagagggagataaatctggtacgtttcgattcagtatcacaacaatggcaaaggaaattatcaagtgcgagattgacgtcctcggccatacaataactgaagtaaaacatgaaaaaaggttggattttagtaaatcgagcaagaaaaaagattgattcacttttttattgagtctcataggagcaggtatgagttggagaactctactcatcactcaaaaagcgtatttatgcttgcgcaatcaacaactaaggattgagcaagagttagagacgtttcatgttccgattgaagatatagccgttatcgtcatagaaaataattgtgtgacattatctgtcgctttgctaagtgccttagctaaaaataatgtcacactactcacttgtgatgaaaatttcttaccctgtgggcaatggttagcgttccagcagtatcatcgcccactaaaaatacttaaacttcaaatagaagccactgcccccacaaaaaaacgtatatggcaacaaattgtgcaatcgaagattaaaaatcaagcacaagtactggtctatgctgagcaagtagataaagctaaatatctatttgccatggcaaatcaagtcaaatctggtgataaagaaaatatagaagcaagagctgcagcgatttattttaaatcgcttttttttcgagagtttactagaaaactcgatcacgtgattaacgcttatttaaattacggttactctatactacgctctgcagtagctagatccctggttagctatggctatcatcctagcttagggttaaatcatagtaatgaattaaatggttttaatttagccgatgacatgattgagccatttagacctttagtagatttatatgtttggtcgttatgtgtaaaagaaaaaatagatgaggaattaactgttgttgctaagcaaagactcatccaattattacactaccaactgagctgggataataaaaccacaagtgtgcttaatgccattgataaaaccatatcccatttgcaacaagcgtatataagtaaaacgcaggccaagttaaccctccctgaaatcctttatctaaaagaacacagctatgagtgagccatttatgcgtattatcgttttcttcgacttgcccgtaaagtcaaaagcacaagtcaaggcagctaatcagttcagaaagttcttaattaaagacggttatcaaatgctgcagctatccgtatactccagattaacgaagggacgtgaagctacacgtaagcaccataatcgattaaggcagaacttacccaaggaaggatcagttcgttgtttagaagtcacagaaaaacaatatgcttctatggaaattctggttggtacattaagtactgacgaaaaaaaggtcaattcagatcagtttttgcttttttaaatcgatttttatacaaacgaaaatccccaaaagccttatgtannnnnnnnnnnnnnnnnnnnnnnnnnnnnnnnnnnnnnnnnnnnnnnnnnnnnnnnnnnnnnnnnnnnnnnnnnnnnnnnnnnnnnnnnnnnnnnnnnnnnnnnnnnnnnnnnnnnnnnnnnnnnnnnnnnnnnnnnnnnnnnnnnnnnnnnnnnnnnnnnnnnnnnnnnnnnnnnnnnnnnnnnnnnnnnnnnnnnnnnnnnnnnnnnnnnnnnnnnnnnnnnnnnnnnnnnnnnnnnnnnnnnnnnnnnnnnnnnnnnnnnnnnnnnnnnnnnnnnnnnnnnnnnnnnnnnnnnnnnnnnnnnnnnnnnnnnnnnnnnnnnnnnnnnnnnnnnnnnnnnnnnnnnnnnnnnnnnnnnnnnnnnnnnnnnnnnnnnnnnnnnnnnnnnnnnnnnnnnnnnnnnnnnnnnnnnnnnnnnnnnnnnnnnnnnnnnnnnnnnnnnnnnnnnnnnnnnnnnnnnnnnnnnnnnnnnnnnnnnnnnnnnnnnnnnnnnnnnnnnnnnnnnnnnnnnnnnnnnnnnnnnnnnnnnnnnnnnnnnnnnnnnnnnnnnnnnnnnnnnnnnnnnnnnnnnnnnnnnnnnnnnnnnnnnnnnnnnnnnnnnnnnnnnnnnnnnnnnnnnnnnnnnnnnnnnnnnnnnnnnnnnnnnnnnnnnnnnnnnnnnnnnnnnnnnnnnnnnnnnnnnnnnnnnnnnnnnnnnnnnnnnnnnnnnnnnnnnnnnnnnnnnnnnnnnnnnnnnnnnnnnnnnnnnnnnnnnnnnnnnnnnnnnnnnnnnnnnnnnnnnnnnnnnnnnnnnnnnnnnnnnnnnnnnnnnnnnnnnnnnnnnnnnnnnnnnnnnnnnnnnnnnnnnnnnnnnnnnnnnnnnnnnnnnnnnnnnnnnnnnnnnnnnnnnnnnnnnnnnnnnnnnnnnnnnnnnnnnnnnnnnnnnnnnnnnnnnnnnnnnnnnnnnnnnnnnnnnnnnnnnnnnnnnnnnnnnnnnnnnnnnnnnnnnnnnnnnnnnnnnnnnnnnnnnnnnnnnnnnnnnnnnnnnnnnnnnnnnnnnnnnnnnnnnnnnnnnnnnnnnnnnnnnnnnnnnnnnnnnnnnnnnnnnnnnnnnnnnnnnnnnnnnnnnnnnnnnnnnnnnnnnnnnnnnnnnnnnnnnnnnnnnnnnnnnnnnnnnnnnnnnnnnnnnnnnnnnnnnnnnnnnnnnnnnnnnnnnnnnnnnnnnnnnnnnnnnnnnnnnnnnnnnnnnnnnnnnnnnnnnnnnnnnnnnnnnnnnnnnnnnnnnnnnnnnnnnnnnnnnnnnnnnnnnnnnnnnnnnnnnnnnnnnnnnnnnnnnnnnnnnnnnnnnnnnnnnnnnnnnnnnnnnnnnnnnnnnnnnnnnnnnnnnnnnnnnnnnnnnnnnnnnnnnnnnnnnnnnnnnnnnnnnnnnnnnnnnnnnnnnnnnnnnnnnnnnnnnnnnnnnnnnnnnnnnnnnnnnnnnnnnnnnnnnnnnnnnnnnnnnnnnnnnnnnnnnnnnnnnnnnnnnnnnnnnnnnnnnnnnnnnnnnnnnnnnnnnnnnnnnnnnnnnnnnnnnnnnnnnnnnnnnnnnnnnnnnnnnnnnnnnnnnnnnnnnnnnnnnnnnnnnnnnnnnnnnnnnnnnnnnnnnnnnnnnnnnnnnnnnnnnnnnnnnnnnnnnnnnnnnnnnnnnnnnnnnnnnnnnnnnnnnnnnnnnnnnnnnnnnnnnnnnnnnnnnnnnnnnnnnnnnnnnnnnnnnnnnnnnnnnnnnnnnnnnnnnnnnnnnnnnnnnnnnnnnnnnnnnnnnnnnnnnnnnnnnnnnnnnnnnnnnnnnnnnnnnnnnnnnnnnnnnnnnnnnnnnnnnnnnnnnnnnnnnnnnnnnnnnnnnnnnnnnnnnnnnnnnnnnnnnnnnnnnnnnnnnnnnnnnnnnnnnnnnnnnnnnnnnnnnnnnnnnnnnnnnnnnnnnnnnnnnnnnnnnnnnnnattatagcactacagagtggaatggggaactacaaccatatatgtaaactcctagggttatataaattatagcattacaaagagaaatgggaggctacaacgtcggcgggaggcggtactgaaagtgctgaattttagccctacagaccaaagtaaatgaccataccgtaatctaaagagtccttaatataaataccgtaaataaaatatagcgtttcagatgagtctaacaaccctagccaattcatagaaaacatgcttcccatataaagaatagaaaatacctgagtattgtctatttatcttaatgctctttttatggctatcttttgggatcatttgttgtgcctggtcacaaaaaattcattaactatcgcttttttgagtatttatatttacctaactagctttgctcaacctgctgagaatatacaacacaaccgtatatccatcctcattttaagctatacactcagtggagctagtggaaatttatgcaccacattcgtctcattgcgcatataacgacaggtagcgaatttcttaaaccatctaattatacctaggtggttttttattcaccgataccactcaaataattcaactgatcaatcattaaacaaaaccaggcaaagtatattaaaaacaagaagatagatgatagagatatcacttgttcacctagttatgcacagaaactgtgaatagcaaacggccgtgataaagacaaactgatgactttgcacaaagtgtttgcgtatttctgcaactttgctggtttagcggcctcgtcgctcttgtatttcttaggcaaactgctatattaactggattattaattacttaatgggaggaaggaatggattttgatgtagcggtgattggtgccggtatggtgggtaccagtacggctgtatacctacaacaaaaaggctttaaaaccgctttaattgaccagaagttacctggctcagaaacgtcgtatggcaatgctagtttgatacaacgcgaggcggtttttttgacgccatttccaggtagtttgcatgatatcgcaaggattctacctaaccaaagtacggatgtgcgttatcgcgtggatgccatgctgcattatgctaagcctatctggcaatacaaacaaaattcgcgaccggtgtcattgcaccacatcgaggagcaatgggcgacgttaatcgagcactgtaccgaggagcaccaaaaactgatcgaattggccaaggccgaggacttaattcgtcgcgatggctggattcaactttatcgcacgccagcgtcttatgagatcggcaaacaaaaggctgagaaggccaaacgctttggggtggagtcacgtttactgacgactgagcagattaaagccatggaacccaatgtgaatcttagcaattatgtgggcggtattcactggcttaattcttggcaggtcagtaatccaggtgaattagtcaaacgttacgccaaatactttaccgataaacttgaagggatctttttacaagaaagtgtacaggcgctgacccagcaaggtgattcatggcaggtgcaaggggacaagacaacacttacggctaaacatgtggtggtgtgcatggggccttggtccaataaaatcacggcagcgctgggttataaattccctattatccccattcgtggttatcatcgtcattttaaagtcacccctcagaaccaaatcaaacatagctttatggatgcggatgcgggctttgtgattagtcccacggatttgggaattcgtattaccacgggagccgagatggcaatgcaggatgcacctgagcgtttgcagcagctcgataaggtctcagaaattgctaagcaaatcgtgccgctagaagaggccacgcctgagccggcttggtttggttcacgtccatgtatgagtgatatgaagcctgtcttaggacctgcaccacatcatcaaggtttgtggtttgccttcggtcatggtcaccaaggctttacattggggcctgtcacaggccggattatggcagagctcgtcaatggcgaaacgccatttgtcgatgtcgccccatttagtccagatcgtttctgattgacaccactactacaagactcacaaaaatccccatcatttgatggggatttttattcaaaggtagcttaagtgaatgtattaagaagtgatgcgatcgtactgggctttgtcgagtaagccctcacttttactgacctctggggcctgtcacaggtcggattatggcagagctcgtcaatggtgaaacgccatttgtcgatgtcgccccatttagtcctgatcggttctgatcgacaccactactacaagactcacaaaaatccccatcatttgatggggatttttattcaaaggtagcttaagtgaatgtattaagaagtgatgcgatcgtactgggctttgtcgagtaagccctcacttttactgacaagagcagtacctgccatatcgccagtgacgtttaagctagtgcggcccatatccaaaatagaatcaatgcctaagatcatagcgtaggccgccgctaccgctgagccttcttcgatgtctagaccgacggatttgagtacgataagtagcataatagcacccgcgccgggtacacccgctgtgccgacagaggcaagcaccgccgtaataataatggtcagttgttgcgctagactgaggtcataaccaatggcataagcaataaacatcgcgcagaccccttggtagatggcggtaccatccatattaatggttgcgcctaatggtagggtaaaggaagagatctctcggctcatccccattttgtcgcagcacatcatcgtgagtggtagggtgccactggagctacgtgtgacgaatgacgtcaacatcgcaggacgcgctttttgtacgaaggtgcgtaaacttaagcgattgatcaaaagaaacgcgccataaataaatactaagtgcaacacaaaaccaatataggtcgcactaatcaccgtggtgagcgaaccgacgatattggcgctttctttggcaaagactacggctaggagcgcaaaaacaccaatcggtgcatattccataatccagcgtacgactttaaacatgacttcggcaatcgcattaaagacgctaaacagcacttcacccgctttggcgagcggttcctcgtggcttgcacgcaaatatgacacgccaataccaaataggatggagaaaaagattacgggaaggacatcgcccgcggcgatcgatttaaagatattcgtagggataatattaagaaaggtatccatgagggatggggcattgagttccttacccgccgcctctgctgaagactgcaagtgtaaacctaggccaggtttgaataaattagccagggctagaccaatcgcgacagccaaccctgaggtgacgaggtagaagaccacgattttaacgccagcacgacccaagcgcacggggctgacattagcggcgcccaccactagggtactgataatcaatggcataacaatcatttgtaataaacgcacaaagactttgccaaggggatcgacccagagaattttgtctttgaaaagcatccctgctaagacacctaagatcagaccgattagaatgcgccacagcaaattagtgcgaaaataccagctaaataagccttttttgggagcgctagtcattatgaaattccttacaaaaaaataaagccccattactttatagacaaattgtaaaaatttctaccttggttttccagaatatgactgatgacaaaaaatttgtgggtcttatacgacagcacgcttgatgcgcggattgtcttacttcgtaacaccaaggacgagtagggagctaaagacggttaagtttgaaggagggtgaatgggcctgctttgctttaagaggagggactcgttggcactgtgaacgcactatacaaaatacttaatataaatataagtcaatgcaagctataagggcgagtcgttcagcagtggggcgttgtctagttaaaaaacggcgagtaaaagctaaaaggccgaaaaaagggcgaaaaaaaagctgctaaccatgtagcagctttttaaacactatatatataacgaattttggaacccacagtgagaatttaaaaattctatgaacttatagaggatattttatgaattttaaataattttagtggtgcgagcgaagagactcgaactcttacacctctcggcgctggaacctaaatccagtgcgtctaccaattccgccacgctcgctttagaatcactaaagaatatatttataacccatttttgctaggtttggcaagtatttttttgtttttttctaattaaatttttcaccgctgcttatacacaacaaaacaacggtgattatggcaattaatacgcgctaaacattacttagctgagatcactctcggatacggtttcggagaacaattgccagcaagtaataaatagggccgccatcagtgggccaatcacaaacccgttgggaccaaatacggtaagaccccccaccgtggtgacaagcacaatatagtctggcaggcgagtgcttttgcctaccaggatgggacgtagcacattatcacttaagccaatcacaatacaaccgtaagcgatcaagaagataccgctaccaatgtggtcggtcgcaaggaagtaaagtgccacaggtaaccacacaatggcggaaccaatggccggtaaaagcgataaaaagcccatgagtacgccccataatagtgaggcctcaatgcctaagatcgcaaaaataaccccacctaaaataccgtgaaccacagcaatcacgacattacctttgacggtggctttgacgactgaggtaaatttctcgaagagatgattgcgatagtcgcgtttgagggggatggcttttttgacggcaagcatgattttggagccatctcttaagaaaaagaacagcaaataaatcataatgccaaaggctacaaagaactggaaggtattggtgccaagctgtacggcttggttagccaaaaagcgactggcttcggaaatggaagactgcaacttagcttgtaattcgtccatgctattaatattaaagaggctcaggccatcattgacccaggaagggacatgggacgtcatctcgtgcatataatgactaaagttgatttggcccgaatcgatacgagaataaaaagtgatgatttctcgcaccaaggcaacagtcgtaatcgccagcgggataatgccaattaaaatacagatagtgagtgtgattaaggccgaggtatttcgtctgttgggcatttttgagagaaagtaattattgatgggtgaaaaaatcaccgcaaagattactgcccagaaaattgcaccataaaagggaaatatcactacaataaagccaattgttaccaaagccagtaacaatacaaagaagttaaaatttattttggatgcagccataggtaacctttttgctgatgtcttgtagaataatgacggtattgtaactttttttaagtttaaataaatttaaagcgatagctctgcttaaataggcgggccggtttttattggcaagaagtttgtctagtttttaagcaaaaacaagaggttatgttttatgggtggcactggtttagtgactaaatggcacaagcacctctggatttatggtttagttagcttggctgcactgtctgggtgtagtaccacgccgccgagtcatccagataatatttgcgaaatctttactgaaaaaccaaagtggcatcgctacgctgaagcctctcgtgccaaatggggcgtgccgccgcaaattctcatggcgattttgtttcaggaatcctcttttaagcatgacgccttaccgcccaaagatcatattctctgggtgatcccatgggggcgcgtcagctccgcaaaaggttatcctcaggcaaaggatgaggtctgggaggagtatcagcaagcggtggggcattctgccagtcgcagcgatatggaagatagtttggattttatgggttggtacctcgataaggcgcagcaactcaatggcgtctctaaatgggacacgtataatttatatcttaactaccatgagggttggggtggttttaaacgtggcacttatcatagtaaagcttggctcaaaaaaaccgctactatagtcaaggatcgtgccgatacctatggtgcccagtattttgcctgccgcgatcatctttaaactgctatctatttgtgttgagtctagctaatggctgattcaagaaaccgtctcgtcatgtttactattcattctacttgtttacgatctgttttggcgctcagcaaaacattgagtgttggcctagtgttgagtgcttttttacccacgcaggctcatgcagccgcagatgatcccaacgaggtgattattgcgacgggttctgaaaatggggcctattatgcaacggctcaaggtatttgtgcggctttgcaattggatgcacaagaaagtcagcgtccgattaagtgcacgattgaggggtcgggtggcgccttagcgaatttagatcatttacgccagggtaaagtgaccctagcgttggggcagagtaatatcgtttataacgcctatcatgccgaagattggtttgcgcaaaggccatttaagaatcttcgaacagtctttaccttgtttg

SEQ ID NO: 553 - DNA, 14254 bp, synthetic construct
  source 1..14254: mol_type = other DNA
  misc_feature 1..14254: note = Synthetic
tgttcttcatgagcatggctcgaccggaaatttttctcttgctgaaactaatgaacctgaagtcgtagatggtcatgtagtaattagagtttgtgcatccagcctaaatccggtcgattgcaaaatcagaagcggaatgttggccgcgataggtcctgatctaccaggagtgcttcatggcgatgtggccggaatagttacagagattggaaatggagttgagaggtttaaggtgggcgatgaggtctacgggtgtgtaggaggattcaagggaatgcccggcgttttatctgaatatgcactggctgatgccaaacttttggccagaaaacctggaaatatttcgatgctggaagcagcatccctgcctcttgttggtattacctcatggaatgcactgattgaccgggcaaatataaaagctggtcaaaaagttttggtacacgcgggagccggtggagttggaaattttggacttcagcttgcgaaagtcatgggtgcggaaactcactcaaccgtatccaacggccaaaaagctaatcttgctcaagatttgggtgcggacgaagtgatcaattattctgaatttgaagttcaagaatatgtagagaaatttacgggtggaatcgggtatgatctagtttttgataccgtgggaggtaaatgccttgatcaatcatttcgggcgaccaaagaacatggaacggttgtatccattgctgctcgttcagaacatgacctgactcctgtacatacgaaaagccttagcttgcatgttgtatttatgcttttaccaattcttcgtaatacctgcagagaaagccatggagaaattttgactaaaatcagtgatttggttgaacaagcgaaaatcaaaccattattacataagcaaagattttccttcgaagaggttggccgtgcacatgaatgctgggaaacaggtaatgcaatcggcaaaattaccctggaaaatacttggtaaatccatggtttatgacacaagaaagagttgcaaattctgcctcctaaggtcagaatacagtttcgttctttaaaacacgccatttgttgcatccatagacaacccagctattgggttaccaaccgagtgcgagagctcctacggtggtacagggtcttttccgggatgcgcggtcctggcacaaccgaaaacagcgctctcctcgctcagtttgcgagtgaagcgtataaaccgaaaggaatacgcaaaatgaataattcattattagttcaaacagaagaatcggctattcgcatagacaattctaacttaaatcaccatctttggaacaacaatggtacatggtggattcactacaccatctacccaactccggtaacagctgaaagaattcggcattctcttaaaacaagaaatcttagtgaagcgaagcatttgagggatcaaatccttaaggatattctctcccagtcgggcaaactggctgcctgacttatttgttaaggttttactttcttgctttaccaagggttgcgaagcataaggtaagtttgtgccgacttttcaatttaatagaagcgactgtgaattattattaatgtctttcttaactttggtaacgacgattggaagaacaagatatcctcacaggagaggtaagcattatatgactaaacatggatgagagcagtatctcaagttagcaaatttacacttcacataaagtaatgattcccaaaagtttatttaaatatttggagagagtaaatctgatttactctattttatttttactttccactttgtattgtgggggtaaccaaacgattacgacaattgcttttggttcatgccttaaagaaacgagaccccaaccgatatggaagagtgttatcaatcttaaaccggatattttcgtattgttgggagataacatctatggggatacgcatgatatgacgaaacttagagagaagtggaacaaatttaattctgttgaaggatttcaaaaacttcgctcagattgccgacttttagctgtctgggatgaccatgattatggtgaaaatgatgctggcttggaatatgtacccaaggcagaatctcagcagatcttccttgattttttgaatgaacctaaagattcgataagaagaaacactccaggaatttatgacagtattattctgggttccgatggtaaacgagtgcagtttatcttactggataccagatatttccgaacttctctaatgcgggccatggaaagaaaaagtgggaatggtccttacaggccagatgactccgagaaagcagaacttcttggaacggaacaatggaactggttggaaaaatctcttaaggcaccagcggatctccgaatcatagcatcaagcattcaagtactatcttcaaatcatggctgggagacatgggggaattttcccaaagatagaacccgtcttttaagcctcttggagaatacaaaaggagagattattgtaataagcggtgacaggcattcagcagaaatttcacagcttcatttaactaacggatttccgctgttggatgttacctccagtgctatgaaccaaagacagaggccaaactcggaaaaaaacaagtaccgtattggtgaaaaatactttaaggaaaattttggtcttattgaaatagattggtcccaaaagaaaccatccgtagaggtaagtattcgtgacttagatggagagagtcgaataaaacatagactagattataatcgaaagtgataaatttatttataaatgcttgggtcagtaccaaggcatccatgaattcttgaaacagcttctgtcttatcttccaacttggaaagtgcatcctgtgcgaaatccagtctatcttgaatgcctaatctttcagatgcttcgcggttaatatgatcttttaggaattcctctaggtactccaacctacctcgccaataactttccgctacattaattcgggtctcaagtctttgcctgtaccaatcactcccaataatcgattcaggttcaaaaagttttctgaactcaggatcctttaggcctttaccttcccagcttcccttgaccatgacttccaaaagagcttttaggggtgggcatgcacgatcgatacaaccatcctcaaaataccttgaggcaaccatctttccagcctccaccagatttaacaaactgtcggcgtactgatcttcgtcttgcaactcgggcttcaacatatcctctgggaagattgatattggatctgtaaaaattctgcctaaaaattgatgagcaaatcttcgtgttattcgaaatccaaggtattccgtgggtaattcattccctttataagtgagttcaggtaccttctcaaggtatcctttatttatcatatcctgtggatcattttcataatccctaagtcggctccatatttcgggaattaataaactaacatcatgagccactttgtactttggtccaatatatccggcagatgtgacaaatgcaccctgtccagttgatgcataggagactagagccgcattaagatcatgaattggaagaaccgcattgaatggagctttggtgagtgctccctctgaaccggcacctgtcgtcgaaggtgacttaccagttacggaaacaataaaatctataaaaagctccggaagctctaaataatgtatgggtgcgaagcaacagagtggtcgtattttaccattatcttccgcagggttgttccgacggccaggcagcactgacctgacaggataaagaacggaatgtttatgatttaacttccttcgcaagcgggtgccaaccagtgcgaggtatactgacctaggattgaacaaatcgggtcttgtttgtaaatacctcgggtttttagtcggtttcccatctacgatacgcggatttgcagaagaaacgaattggcttgcttccgcctcttttccagaagcggataaaatcagttcccgcatcgggtccgtatattgatcaaaggtgagggttttagaaacttgttcctttgcatccttttcgtcaagacactggaaattactgatgaaatttccaggtcttgaaagatctttttcggtttgtttatcaaacccccgataaattgcatcatccgggcgctgaaaaagacgatattcgcaattgtggacaaatttggctgactccttaaatgttcccggtccaatttcatttaacaaatgtaggggagctaccgtagatacagtaatatcatcttcagctaataatttaccagcgggggcaaagtcttttcgtagggcaaaaagtctccaagatccgttttgatcaaaaccgacccgtaagagtcgggttatcaatttttcacctttaaatctcaattcattagcaggctgcccattaacggaatccacgctgaaatatttctcccaatcatcatcccattctgttcggtatcttctctttattatgagaaccaaatccttcacccgttggggtatagtttccagccattgattaaatccttcagtgtagagggactttgacggggtaaggagcttgataactgaaccaagagaacgctcgggatccagaatagaacggtttcttattttccctttttctgaatcaagaaatctacccgaataatccttgtcgatgacttctcgggcaagcctcatatcctccttccaattggctataaaaacaggaccgcagacgattgcatcagtcaaaggttttgaaatctcagacttccctcctcccgataccgtgcaaggcttgtgacaaagaaagccctctcccactgttcccactaatttccatggaccatcattttcaactactttcatttcgaccttgtagccagatggtagcacataagaattatcaggtataagtgacatcgttttggaatcactttgataagtccatgaaatggactgttctcggaggctgaatttggcattttcaggtaaaaatacaatcgaagggaaatgagggtcacaatacgtaccttcaggtgcctgagtttcagagataccgagagttttgagagtatcctcaaaagtatggggtgtacttggcaaaattgcctgtggatcaaattcttcgcccaagtcatagctggggaaaacaactgctccgcctgcgtgctcttcctctgatagtccagacagattagcagagaaactaacctgtgttttcacctcttttttacagtaaccaaaataattatcagcaataaccgtaacaacaagaccggacgaatcacgaaaggtcagcttaaaagcaccaccgttgttgtagagttcatttggattttcataatacataccgtcacgaatttctctttcggatgcatttgatttagacggcagattgagaatctgtttcggagtgcctgctagatgtggagcgacaatcacgcatcccgtgtgcccggtccaattttcaatatccaggccggcatcattttcagccaaaaagggatcacccccatttccaaaaatactctcaacgaaatcaagatttgccacacaaccgccgggtgcaaaaaatctaacttccatagatttctctctgatataaccttccactgcaggacatacgacagggcgaagcataagggatacccagcacttcgctggatcttcttctccagaagaaaaggggaagatcatgtcactctggggtggattcaaagcaatacgaagaagctctttggctgcgtttaagggaacgactttcttatcatcagcagccggtagtcccacatcggcgacatggaagacaccagatgtggttcttcggtcgcttgccgggttatggagaactccttgagcaatcctttttgactccatgatcgtagaggaaaagttgtagtcatcccgaggtaaggaggtgacacgtgccagtccgtgacgatccagaacgaaggactcggtagggagactcgggcgatccgtgccaagtattttggtaagaaagtcctgtattctacggtctgcaggacataagtaccctcgtaataagcgtaccttttctcgatattcctttaccagggaaccacttaatctcagactggggttgtcactctgatccccgaccgtgggtaaaccaagggtagcaagcttaagattggcataatttattagctcattgtattcaggagatcctaagttgtatcccgaaccaatgcctagttgttgttgtttttcttctgcaagtattgttttcatgggataaagttaacctttttaagaagactccatgccgaggggaaagaaaataataaaatggataaaaactatccacttaatggtgggcccgctcggattcgaaccgaggaccaagggattatgagtcccctgctctaaccactgagctacgggcccattagttgataaatactgatgaataagcattttgcttgcaatcaaaaaaaagcttttgtaaccctattttataaccctcacaaaatgaacgaaagtaaacagacctcttttcggaaggtagcagagtgcttatatcgcaatgaatcatcaaaaatatactatgcttttgtgaagagaaacggaagacaaattcgtcgctctctgaaaacctcagaccgcaaactcgccgaaagaaggctcaaggaatttaggggagatgcggacaaattagtcagcggtggaagaaatcggatgtcttttacccaactgggagaaatctggaaacctgtagcctgtgccaaccttaagaaatcaagtgcagatagaatcggaagatgcttaaggactttgaatacattttttggtgataggatcgtttcttccataaccatgcgtgattgtgaagaatgggaggtttccaggggtaaaggaattgccgcttctacattcaataaagatgcacaggtattaaaggcatgcctacaatatgcagttgatcgaggaatgcttttagataatccatccattgtgattaaacacagaagaataacggacaaaaggattgttattcctacaaaagaacagtttgaaaaattatgtgacacgatattagggttggatcctagggcaagagaagcatttccattagtaaaactactggcaacttctggaatgagacttgccgaagcaatcaacattacatggggagaaattgattttgataaggaatactttgtggtatcgggaggtgaagttggaactaaaaatcgacaggtaagaacagttcctttgtttcctgcaatgaagaagttcattaaatcattttatgatattgaaaacattgagtttgatgaatatttatttaaatttaagtctgctaggaaggctttagaaacagcttgtcgtatagctaaattaccccacttcactcaccattgtttgagacattattttgtcagtaatgctattgagaagggtattgattttaaaaccatagcaaactggatcggtcataaggatggtggtctattggttgctaaaacttatggtcatctgagagatgtacattcacatcaaatggcaaaattaatggatgaataagaaggaatatctggagaagataaaatccatggatcataaatctcccggatatttgaaggctattcttgaaatagaacctccaaaagaatattccgttaaagtcgaactttcacttaaaccagatgctcataaagataaaaatcttcctagatgggttcgaaatatacggaaaaatctaaataaaagtgtttttaaagtttaccaatatttaagttctagtcatgacgacccttataaccttggatttcatattggtgcagctcgtgaacttaaagaatatttatttaaaagctttaaaaatttagaagaatttgctggtaccgaaatagatagtgaagaagtcgaaatttataaaaaagattttaggatggttgaaggacttgaaaggaaaaccaagagagaattatcctcattatctcccagttatcagtcgatatttcataaaggtatatctgatggtttagtggctatttttacagaagatgggttaatgaagggcgaaaaagaaaacacaaagatatcattacttttgctaatatcgtggccgattttacacgatacaataaaaactagaaggcaactttatgactggctccttttttgtttaggtccaaatcaagttggtgaatttaagcgaattgaacaaatgctaatgaggattaagttttcacccgcaaagccaggtcgccctaagaagtcacactaattcatcttttaagaagatgtcattagcctgtctggcttacagacatatgctataatgatctaaatcattcattcctagccttcattgtcagatagtgatgtgtgacgaaataccttcacggatatagggcagtgaaggtattattatttgatcaacggtggtaatctaatgagcaatgaaacattactcaaagttcttagatcgtcttgcatactctagaatcgagactgcagaaattatggggatatctcctgttactttagatcgacttaccaagagaggtttaatcaatccatctagggcaacccgaaggccactttatcctaaatgggagatcgaaaggtttcttcgtgaaacttcagaaaagattaaaatatgaaagggttatacattaaagaatatatacctcgatcgtggttccatcctaaaggagttttaaaagttgtagatcgaattaaaccacatttaccagatgttaatggtagtctttttgttactttaactttggatcgccaatggtttagagcacaacaaatgggtccttcagaggcttatgattttgcaagaggccacattaggaaaatgttttttaaactgagacatggaatctcttgggaagacaaaaaatacaagattaaatctgcttactgcactaaagttgaatttcatgatgacgaggaagggtggcctcattttcatataatatggcttaccaaaaggtatatcccttgtgatcttttagcctcattatggggttacggtcgaactaatatttcgagaataaataacactaaatttaattatattttaaagtatgtatgcaaatctggtaaagttcccaattgggttaaaacaaaaaaatctattcgaatatttcaaccttcgagaggatttttaaataaatctatatcctccaaaaagaaaagtagatccacgcagcaaaagtcttatagaaaacctagtacgattggagaaagggtaaaagcttttggtaagacggcattagtaatagatgaacgttttattaatcagcctgttcaatatcgcaagatagaacttaaggataaatttcacattctcttagatcgtcttgtttattccatcgcacaagacggtcgatatttaggcgatggaaaaatacaaataaaagaaatggaggatttttatccatggataaaactaccaaaccactagtctctgccataggctctaaacctggcatatatgtaaacggcattgtaatttctaatgatgctagaaaagttaatctgaaggacggaacaacccgagtgtcagttaagcatgagttggctttagaccctggcttgatcagcctcgatcggtttatcgatccaaaaatgaataatgaagttaaattagtaggagaagagattaaggaatatccaaaacttactaaattcgaaccgattatagtgcgtgttcaaaaaatcaaagaatacaatggccaaatgacagcttcagattgggaattggcctcaaattaatgaagcactggtatgggctaggagcggcctttggccgccctgccctaccttttccttgtttatatgggtaataactgtctaaacaagtattatgaaaataaaacggcgccccagaagagacgccgtaaggtttacccgttagggatatccttcaaagcttagagctttttgttttaaaaagcgaaaaggccttgtttaaacacttcgtttaacttcttacttgcatagttctttgtcaattcaaagataaataaatgactaaaatactaggaattgaccttggcacatcatccattggttggagccttttaaatgaagaaaataagaaacccacttccataatcgacatgggagtaagaatctttccagaagtaactgatgctaaaacaaaaaccccaaaaaatcaggaaagaagggtgaaaagaggtctaagaagacaaacgaatagaaaatctagaagaaggaaaaaagtagcaagtattcttaaaagatttggtcttttatcttgtacacaaaacaaccaccaaaaatggcgggattggaatttcaaaatgggttgtccatatgaaatcaggaaaaaggcactagttgaaaaaatatcaaaagaagaattcgccaaagtaatggttcactttagcaaaagacgtggattcaaaagcaatagaaaagtagctggaggcgaagaaggagttgtaaaatccgcaatatctgaaattaggcaaaaaatggaatcttcaggattcaaaactgtgggcgaatttttgtataatcaggaaattaaacgcggaaaataccttcaccgagatatgtttgaagaggaatttaatcaaatatgggcaaaacaatcatctttcgactcaagcacatacaacgataagctaaaggaagagctatgggattccattttttttcaacgccctcttaaaattcaaaaacatctaataggtaactgctctttggagcaaaaccgaaaaagatgccctaaagcttatcttgcatttcaggaatttaggattctttcggaactatccaatttagagattaaagatcccattactggtgatcacgagccactttcaaccgatcagaaagagaggatttttgaggtacttaattttactgaaaaactaacctggaaaaaagttcgtaaagaacttggtttacacgatggcgagacgatcaaccttgaagcaactggaacaaagcatctacaaggaaataaaacagctcatcaacttattaaaatcattggtaaagaattttggtctagcttaagtctggctcaaaaagaacagttaatcacagatctgacgaccattgagctagagaaatctcttgaaaatcgcctaaccgatcactggaagattcagcaagacgcaatacaaagtttggttaaggtaagattggaggacggatatgggaattactcgcataaagctttgaataagcttcttccatatctaagagagggaaaaactttatctgaagccaagaaccgagcaggataccaagaacatgaaaagaatgaattcttaaatgccctaccccttcctgaaaatttaagaaacccagttgtaatgaaagcattccacgaggtgagaaaagtaattaatgcaatcatcagaactcatgggaaaccagacattgtaagaatagagatggctcgcgatttaaaacaatcaaaaaaagatcgtgatcaataccttaaaattgttcgggcaagagaaaaagaaaacgagaaaatctcctctaaacttcgagaagattctgaatttagtcttgttaaacctacacgagacgaccgcatcaagtatcaactctgggaagagtgtggcatgatatgcccttattctggccaatccatttccaaaacaatgctctttggaggaggtatagagatagaacacatcattccatttagtatttctctcgatgattcaattggaaataaaaccctctgcactactgccttaaacagagaaaaaggaaacaaaacaccccatcaagcatttggaaagcaacctgaatgggcagacatgctacaaagagtccgttcatcaagaatgagcttcggtaagaaaaagcgatttgagaccaaagaagtaaacttcgacaacttctcttcacggcaactcaatgatactcgttacatatgtaaagaagtatcaaaatatgttaagaagctcggagtcagggtagatgtaggtcgagggcaactcacacatgcaattcgccatcaatggggacttaatcgcctattaagcacagaaaatcaaaaaaatagagatgatcatagacaccatgcaatagatgcactgataactgctctcatctcgccaaggatgatgcaggaagtttcaagaatttctcaaagactggatggtgcatcactaagcgatcgactttttattctacctaaaccttgggctacatttgataaagatcttaaacaaaaagtttttggaatcattgtctctcatgcggaagataatcgcataagcggtgcatttcatgaagacactgcatacggaaaaagaaaggacggaacactttcatacagaaaaagtatagaagtgctaaatatcaatgagtgccaaaacaagatcagggatccagcagttaagacaattatagtaaatcaaatatctaaatataatggggatataaaaaaagcattggcagagcctatttttcataaagacggaaagacacccattaaaaaagttcgtctagagaccagaaaggaagaccactcactttttgaagtccaccaaaatggagaacctctcaaatatcatttgttagggaataatcatcacctagaaatttttgaagataaaaatggtaaatggatacctaaaataatttcgacctatgaagctgctaaacgagctagagtaaagaaagaaaatatttattcaaaagattttgaaggaaacaaattcattatgacactatcttcaaatcaaatgcttgagatatcgaatgaaaacaatctcgaatactataaagttcaaaatatttctgtctcatcaggaggaagagttcttctaaagagacattattcagccgatataaaagacttatctacaactgtagataaaacggtcaatgctttaaaaaaacttaattttaggaagattacaatagatcctattggtcgagttcagtctcgtaatgattaaaagaatagttgttgtagagtcttcagcgaaagtctcttcttctagatctcaaattcatataaaatcagaagaaaaagattcagtaagtataccagcagaagatttaggttctgttcttatagaatcagaccgaacattgattacaattccagcattgaaaactcttgctgaaaaaggctcatcattagttgtttgtgatgaaaagttccttccttctggtatttttcttccccttaaaggtcattttcaacaaacactaataattcgtgatcaagttagttgttccgttcctactcaaaaaagactctggaaagaaatagtgcagggtaaactttacaatcaagcaacagtcttagaaagttatggaattaatgcagaaagaattttcagattgtcaaaagaagttaaatcgggcgatcctggcaatttagaggcacaaggtgctagattatattggaagaagttttttggtagagattttcggagggaagtgggtggagaaaaacaaaaccttcttttgaattatggatatgcagtgttgagggcatgtatcgcaagaatcgttgtcgcaagtggattacatccatcaataggaattcatcattcaaatcaatttaatgcattttgcttagtggatgatttaattgaaccctttagaccatttgtcgacaaagcagtaaaagacatcatgcaggaaaatgaaattggtatgactcaaacaaataaggcgaaattaataaatgttctccatgagcaaactgtatggaacaaatcagtatttcaaattgaaactgtaatgccacatttcattaagaactttgttgaatgcctgaaagaaagaaaaaaactgcaaatacctcatctgttatagatggattccgtcaaatgtggctagttgttatgtttgatcttcccactgacactaaagattcccgcaaatgttacagagaatttaggaatagccttattgaggatggttttatgatgttacaattttctatatatgctaggcatacgattagtgacgaacaatgtacaaaacattcaagaagggttcgcataaatcttccccctgacggacaagttagaatgattcgaattactgatgcacaatttcaacgaatggaagtttttcatggcaaaatacgaggcaaaactgaaccaaatccagctcaactaacatttttttagctcataaaaacaaattaaattcatgatctacagatacttaaggacttattattagtgtttaaacaaggcctgtccgcaagctaaaaccaaaactacaatcgcatcaacaagcattatattagtgtttaaaca

SEQ ID NO: 554 - DNA, 23564 bp, synthetic construct
  misc_feature 1..23564: note = Synthetic
  source 1..23564: mol_type = other DNA
tcgtcaaattcaccaggcagggcaaggccatgcgcgccgtctccgaagacaaggaggccgccgtgctcatgggtatcaacgtgaactccaccatcgccctgacattcgccatcggctccggtctggccgcggtcgcctcgctgatgtactgcgccgcctacccgcaggtctcgcctatgataggcgccatgctgggcctgaaggcgttcgtcgccgccgtgctcggcggcattggttccatcccgggcgccatgatcggtggtctggccatcggtctgatcgaaagcctgaccaaggcgtatatcggcaccatcacggcgggcatcatcacctcggcgttctccgacgccatcgtgttcgccatcctgatcatcgtgctgctcgtcaaaccgtccggcattatgggcaagaacgaaggggagaaggtctgatcagatgaagaagacaatgctttccaccaaacagtcctatcttgtgtgcttcatcggcatcctcgccgcgttcggcatcgtgatggcgctgtgcgaatccggcttggccgactcctacatcaagggcatcatgatgaccgcgtgcatcgccatcatcatgaccacctccctgaacctcaccatcggcgtgctcggccagctgacgctgggatgctgcggtttcgaggccatcggcgcctacgtggccgcactgacctccaaatacatggtcgccgccggcattgccatcgaccccaccgcccgcttcctgctcaccacgctgatcggcggcgtggtggcctgcgtgttcggcatcctgatcggcattcctgccctgcgactgcacggcgactacctggccatcatcacgctgggcttcggtgagatcatccgcgtgatcatccagaacctcaaggtagccggcggcatgggcctcgacaagggcgccgccggacaggcgctgatcggcatcgaacgcaccgccaacctgtacgtcgtgttctggatcatggtggtcaccgtggtcgtgctcttcatgttcggccgctcccgttacggccgtgcggtcaaggccatccgcgacgacgagatcgccgccggcgcctccggactcaacaccacgtacctcaaggtgctcgtcttcgcgatctccgcgttcttcgcgggcatcgccggcggtatcttcgcccagtacatcggctcgctcaaccccaccatggccggttggctcaactccatcaactacgtgatcatggtggtgttcggcggcatgggttcgctcaccggctcgatcgtctccgccatcggcctgaccatcctgcccgagctgctgcgcgccttcgccgactaccgtatgctcgcctactcggtggtgctggtgctcgtcatgatcttccgcccgcagggcatcttcggatcctgggagttctcactgccgcgtctggtcaaccgcatgctgttccgcggcgccgccggcaagggcgcgaaacccgcggccagcgccaagcagcatgaccagtccgacgacaagaccgtgaaggaggcctcacgatgagcgacgcaacccagcccatcctcaaagccgaacatctcggcatcaccttcggtggtctgaaagccgtgtccaacttcaacatgaccatcaacaagggcgaactcattggcctgatcggccccaacggcgccggcaagaccacggtgttcaacctgctgaccggcgtgtacaagcccaccgaaggcgagttctggctggacggaacccggatgaacggcaagaagacctatcaggtcgtgcgtgccggcatcgcccgaaccttccagaacatccgcctgttcaagcagctcaccgtcgaggagaacgtgctcgtcgccttcgatgagtcgttcacctaccacatgggcagcgccatcttccgcaccccgggcttctggaagcaggagaacgagatgcacgagaaggccatcgacttgctgcgcatcttcaacctcgaggggctggccaccacccaggcggccaacctgccgtacggccagcagcgcaagctcgagatcgcacgcgccctggccaccggcatgaaactgctgctgctcgacgagccggccgccggcatgaaccccaccgaaaccgaggatctgctgcactgtatcaacacgatccgcgaccgtttcggtatcgccatcctgctcatcgaacatgacatgagcctggtgatgagcgtatgccagcgcatccaggtgctggactatggccgcaccatcgcatccggcacgccggaggagatcgccaacaacccgcaggtcatctccgcctacttgggcagcgacaacaacgatgacgcggacggcgattccaccaccaaggcggaaccggagccaagcattgccaagacactgacggaaggagcgcgctgatgctggaaatcaaggatctatgcgtttcctatggcgcgatcgacgcggtcaagggcattagcctcaaggtgaacgacggcgagatcgtctccctgatcggagccaacggtgccggcaagaccaccaccctgcacaccatcaccggtctggtgcctgccaaatccggcagcattacctatgatggccacgatctgctcaaaacgcatgcgaacaagatcgtcacgctgggcatggcccatgtgccggaaggccgccacgtgttcacccgcatgagcgtgcaggagaacctagagatgggcgcgttcagtctcaaagaccagtccagtctgggtaaggatcttgagatggtgttcgactacttcccgcgtttgaaggaacgtcgccgccagctggccggcacgctttccggcggtgagcagcagatggtggccatgggccgcgccctgatgagccatccgaagaccatcctcatggatgagccgtcgatgggtctgtccccgctgctggtcaaggagatcttcgacatcatcgtcacgctgcgcaagcgtggcatcaccgtgctgctcgtggagcagaacgcgaagatggccctgtccatcgcggatcgcgcctacgtgctcgagaccggcaagatcaccatggagggcaaggcctccgacctgctgcacgacgagaaggtgcgcaaggcgtacctcggcgcgtgacgtctcacattactatgctcccgctggcgggagctacctcacgaagtgaggctgagggtggttatcggagatttccggcaaccaccctcagtcagctccgctgacagctcgccagcgggagcattcatatatcactgcgcgtaatactgtagcgcggaagcatccttatccgtaatctcgcgaatcggacgggccggattacccacggccacggtgtgcggcggaatatcgcgcgtcaccaccgagccggcaccgatcacgcaaccctcgccgatcgtcacgccgccgattaccgtcacattgccgccaaaccagcagttcgagccgatgacaatcggcttgccatactcgcagtcgtatgcggaaccatcaggtgcctgcctcacgttacgatcctgccaacgcaacggatgcatcggtggcagcagcgaaacgttcgggccgaacagcacgtcgtcgccaatcgtcaccgggcaacaatccagcacagtgaagttgaagttggcgaacacgcgctctccgatggtgatgttgcagccatagtcgaagaaaatcggccccatcacgtcaaggccggcaccgtggccgggcagcagctcatcgagaatcgcggcacgggcggcatgatcggtacgcgacgcggcgttgaagcgcgcgcacaggtcgccggccttctcgcgcagggcattcaattcagggtctaccgaattgtacagtttgccggcgagcatctcctcgcgctcgctggcgcgcggcatacgcagttcgacgggaggcatggtggtggattcagcattgatttcgctcattgaacactcctgtaatttcgcgaaagagcatggatggactcattgtatctacggtctgtgcgtgtggggcgaatcggaaaacggcagtacggcaaacgagcgatgatgaactatgcaagtcggggcgcaatggtgcaatggtagattgtgaatacacaagcgaacggaggtggcgtgagcgtggaaggcggaacaacgctgaaagtcacggatgaatcgctggcacaggcggcgcgtgtcatccgggatggtggattggtcgtcattccaacggatacggtatatggagtggcgtgcgatccgcgtaataaggccgctatcgaccgtatctaccggctcaagcgtcgcccgcgctataaggcgttgcaggtactgctcgcatccaccgaccagcttgatgagctcggtctcgacctgccgtccccgctgaatcgtttgtcggcggcgtttctgcctggcgcgttctcgccgattgccgtagcccggcccgactgcacgttggagactttggccgacaccgccgatggtcgccccggcacgcaaggcatccgcatccccaattcggcgctgtgcctcgcgattctcaaggcgactggcccgctggccgcgtccagcgccaaccgttccggcgacgaaagcgcgcagaccgtccaggaggcggttgacgcgttcggcagcgaagtcgacctgtatctggacggcggtcccacccaaggccatgtctccagcaccgtcgtcaaagccgatccgtacgcgcgcgacggcatcgagatcctgcgtgaaggcgtcatcgcccaaaacgtgattcgcaaggccctccacctcaacggcggtggactcggcgcatgagaatctacctactgattgccgccatcgccggtggcgtcacctggctggtgactccgctgattcgccacgtcgccatcgaaatcggtgcggttggcgaggtgcgtgcccgagacgtgcacaccattcccacgccgcgcatgggtggccttggcatgctgatcggttttgccgtggctaccgtattcgccagtcggctgccttttctctcgggattgttcaacggcaattaccagatgtgggtgattcttgccggcggcatcatgatcagtctgctgggcatggccgatgacctgtgggatctcgattggatgctgaaacttgccggtcagctgctgatttccgtattcgtggcttggggcggattgcagatcatctcactgcctttgggcggttcgctgattaccgcctcgccgagtctgtccatggcgatcaccgcattcctgattgtcgcctcgattaacgcggtcaatttcgttgatggcctcgatggcctggcggccggtatcgtggcgattggtggcatagcgttcgccgcctattcgtatatcatcgcccggtcttccccgagttatgcttcgttggccacgctgatcgacgtgatgatggtgggtatctgcgtgggcttcctgctgcataattggcatcccgccaaactgtttatgggtgattccggttcgatgctgcttggctatctcatcacctgcgcttcgattgtgatgaccggacgtcttgacccggcctcgattcatgccagcatctatctgccggtgttcatgccaattctgctgccgattctggtgttgttcctgcctgtgctcgacatgtgtctggcgattgtgcggcgtttggccaaaggccagtcgcccatgcatccggaccgtatgcacctgcaccatcgcatgctgaagatcgggcattcggtgcgtggcgccgtgctgatcctgtggggatgggccgcgctgatcgcattcggttcgctgacgattctgttcttcaaagcgcagcatgtggccgtgggcatgcccatcgccgtggtggtgctgaccatagccacgatgtacccctatctgcggcatcgtattcccgagatccaagccgagaacctgacgctcgaatccgcacgcaagaacgcgcagcatgctacggttaagtcgcagtctgcagtaggggagagccgggattcgattggctctcaggcagcggattcgatgactgattcgcctgcggattcgcgggactcgcaggcgggtgaggtgcaggacccggcagcggataagtgagcgctcacaagcgtgtgtcgtgaaggtcagcgcgtgttcatatagtgtttgtatggctacaaacctcgatgaattgaacgcccaatcggcgtatgctccccttcctccgattttcgccaagctcggccttgcttatgatgatgtgttgctgctgccgaacgagacggatgtcattccctccgaagtggacaccagcactcatctgactcgcaagatcgtgatgaaggccccggtcctctccgctgccatggataccgtgaccgagtccgagatggccatcgccatggctcgtaacggtggtatcggtgtgctgcaccgcaatctgtccatcgacgaccaggccgctcaggtcgatgtggtcaagcgttccgagtccggtatgatcaccgacccgctgaccgtcaaccccgaggtcactctggccgacctcgacaagctgtgcggcaagttccacatctccggtctgccggttgtggacaaggaaaacaagctcgtcggcatcatcaccaaccgtgatatgcgcttcatcgcctccgaggattacgacaccctgaaggttaaggatgtcatgaccaaggagaacctggtcactggcccgtccaacatttccaaggacgacgctcaccgtctgctcgcccagcacaaggttgagaagctgccgctcgttgacgaggaaggccacctgaccggcctgatcaccgtcaaggacttcgtcaagaccgagcagtacccggacgccaccaaggatgagcagggtcgtctgcgcgtggccgccggcgtcggcttcctcggcgacgcctggcagcgtgcctccgctctgatggaggctggcgtggacgtgctcgtggtcgacaccgccaacggtgaggcccgtctggcactcgacatgatttcccgcctgaagcacgactccgccttcgacggcgtgcagatcatcggcggcaacgtcggcacccgctccggtgctcaggccatgattgaggctggcgcggacgccgtcaaggtcggtattggccccggctctatctgcaccacccgtatcgttgccggtgtcggtgtcccgcagctcaccgccgtgtacgaggctgcccaggcctgccgtgccgctggcgtgccctgcatcgccgacggtggcatccactactccggtgacatcgccaaggccctcgtggctggcgcttcctccgtgatgctcggcggcacgctcgctggctgtgaggaagccccgggcgagaaggtgctcctgcacggcaagcagtacaagctgtaccgtggcatgggctccctcggtgccatggccccgcgcggcaagaagtcctactccaaggaccgctacttccaggccgacgtgacctccagcgacaaggtcgtgccggaaggcgtggaaggcgaagtgccgtaccgcggaccgctgaacgccgtgctctaccagatgctcggtggcctgcaccagtccatgttctacatcggcgcccacaacatcgccgagatgccggagcgtggcaagttcatccgcatcaccgacgccggtctgcgcgaatcgcacccgcacgatatcgtgatgaccaccgaagccccgaactactccggcttccacaacaactgatcggttgatgcccgctagcttgcgctagttaggggttgattccttgtgaaaagggtctgcttatgcaggcccttttcgcgtatgtggctcgagatagcttgtatgcgctggggtatagtctgaactgttcttgtaataacgggtgacatgacgaaaagaggcttaccatggtcgacagccatgatgcagaaacttacagcgcaaaggattcgcgcctgatttggattgactgcgaaatgacgggcttggatatcttcggcggcgacgaactcgtcgaggtgtccgtagtgcccactgactttgacctgaatgtgctggacgagggcgtggattacgtcatcaagccgtccgagaaggccgtgaaccatatgaacgatttcgtgcgccagatgcacacccgttccggcctgatcaacgagtgggagaatggcctgagcctggccgaggccgagcagaaggtcaccgaatacgtgctgcgcttcacgccggaaggcgtgcgcccgctgctggccggcaacaccatcggctccgataagaagttcctcgaccattacatgccgaacctcatgagccacctgcattaccgcagcgtggatgtgagcacattcaaggagctcgcccgccgctggtacccggccgtgtacgagaaccgcccgccaaagaacggtggccatcgtgctctcgcagacatcatcgagtccttggacgagctgcgctactaccgtaaggcgtttatggctcccgcccccggcccggacgatgccgcatccaaggccatcgccgccgacatcgtagccaccagcatcctcaataagtagtccgccgtacttggctcccctccctgaggggagtctagagaggttgatatgcgccaaaccgaagccctggccattctgaacgccggcgcgaacgtgttcctgaccggtgcgcccggtgccggtaagacctatgtcttgaacgagttcatccgccaggctcgggccgacggcgccagtgtagcagtcaccgcgtccacaggcatcgcctccacgcatatcaacggccaaaccattcattcgtggagcggcgtcggcgtggccaccgccctgagcgccagcctgctcaaactcatcaaatcccggcgcaaacgcaagattcaggccacggacatcctcgtcattgacgaggtttccatgctgcacgcttggctgttcgacatggtcgaccaagtctgccgcgaagtacgccgtgatccacgcccattcggtggcatccaggttgtcttgtccggcgacttcttccagctgccgccggtttcggtgtccgggcgcaaccgcgacctcatcgcccccacgcccgaattcatcgccagtcgcgaacggtatgcccgtgccggcttgaaccccgaaggcttcatcaccgaatcgctggtatggcccgaactcaacccggtgatctgctatctgaccgaacagcaccgtcaggataccggcgaactgctgaccgtgctcaccgacattcgcgaaggcgacgtgacccagtccgaccgtgacgtgctcgtcactcgtctgggcaaactgcccgagcccggccaggtcgccgtccacctgttcccggtgaaccggcaggccgacaatctcaacgacatgcgcctgaaccagatcatgcttgatccacacgagttccacgccgagacagcaggccctgccaacctggtcgaccgactcaaaaagaacatgttggcccccgagcgattgatactcaaggaaggcgcggctgtcatggccctgcgcaacgacaccgatcgccagtacgtcaacggctcgctcggcaccgtgcgtggcttcgcacaggagaacaagggcggctggccgatcgtggaattcgagaacggcaacatcgtcaccatgaaacaggccacatgggagatgatggacggcgacaccgtgctcgcctccgtcttccaggtgccgttgcgctgcgcgtggggcatcaccatccacaagtcgcaaggcatgacgcttgaccgtgcggtcatggacctgaagcgcaccttcgcgccaggcatgggatatgtggcgctgtcccgagtcgaatcgctgggcggcctctatttggccggcgtcaacgaacgcatgttcctcgtctcgcccgatgccgtggtgctcgacggcgacctgcgcgaagcctcggccgcggcctccgaccagttggccgatgaaggtgcaaacgcgttcaaacccgccgagccggacgaattcggtgccaatcccgacgatgacttcgcccaagacgcgttattctgacatgattcatgttgtgtcgctaagaggatttgcgctatactgatacagctaattctcagtaagagtggacctgatagccactttgaatgctcagcaggcaactgctaggggcgagccatttggctcgccctgtttcgtacagttacaatgttcaagacaatgatgtgcattgtagctacggtgaaaggtgttttatgcgggggaagcgttaccggataggaattgacgtcggtttgaattctgtgggccttgccgcagtagaagtgtccgatgagaacagtccagtgcgtctgttgaatgcgcaaagcgtaatccacgatggtggtgtggatcctcagaagaataaggaagcgattacgcgaaagaatatgtcgggggtcgctcgtcgcacgcggcgtatgaggcgtcggaagcgtgagcgcttgcacaagctcgatatgctcctcggcaaatttggataccccgttattgagccggagtccttggataagccctttgaagaatggcatgtaagggctgagctggctacacgatacatcgaagatgatgaacttcgccgtgagagtatttctatcgcattgagacatatggcaaggcatcgcggatggcgcaatccttatcgtcaggtggactcgctgatcagcgacaatccatattcgaagcaatatggcgaactgaaggaaaaagcgaaggcgtacaacgatgacgcaactgctgcggaagaagagagcactcccgcgcagttagtggtggcgatgttggatgctggatatgcggaagctcctcgactgcgttggcgtaccggttctaaaaaaccggatgcggaaggctatttgccggtacgtttgatgcaggaagataatgctaacgagctgaagcaaatattcagggtccagagagtgcccgcggatgagtggaagccgctgttccgtagtgtgttttatgcggtgtctcctaaaggttcggcagagcagcgtgtcggtcaggatcctctggctcctgaacaggctagggcattaaaggcttctttggcttttcaggagtatcgtatcgcgaatgtgattacgaacctaagaatcaaggatgcttccgcagaacttcgcaaacttactgttgatgagaagcaaagcatttatgaccaactcgtgtcaccttcttcggaagatatcacatggtctgatttatgcgatttcctcggcttcaagcggagccagttgaaaggcgtgggtagcttgaccgaggatggagaagaacgtatatccagccgtccgcctcgattgacttcagtccagcgtatttacgagtcggacaacaagattcgtaaaccgttggtggcctggtggaaatccgcgtctgacaatgagcatgaggcaatgattcgcctgctgtctaatacggtggatatcgataaggtgcgtgaagacgtggcgtatgcttctgcgattgaatttatcgatggattagatgatgatgcgttaaccaaacttgactccgttgatctcccctccggtcgtgctgcatacagtgttgaaactttgcaaaaactcactcgtcagatgctgactactgatgatgatttgcacgaagcacgtaaaacgctgttcaacgttacggatagttggcgtccgccggcagatccaattggggagcctctgggtaatccatcggtcgaccgtgtgctgaaaaacgtcaaccgatatctcatgaattgtcagcagcgctggggtaatcccgtctcagtgaacattgaacatgtgcgctcttcgttctcgtcggttgcctttgcccgcaaagacaagcgtgaatatgaaaagaacaatgagaagcgttcgatattccgcagctcgttgagtgaacagcttcgcgcggatgagcagatggaaaaagtgcgtgaatccgatttacggagattggaagccattcagcgtcaaaatggacagtgcctgtattgcggccgtacgattacattccgtacgtgcgaaatggatcatatcgttccccggaaaggcgtcggctctacgaacacgaggaccaatttcgctgcggtatgtgccgaatgcaatcgtatgaaatcgaacactccatttgcgatttgggcaaggagcgaggatgcccaaactcgaggggtaagccttgctgaagctaaaaagcgtgtgacaatgtttactttcaatcccaagtcatatgctcctcgggaagtgaaagcgttcaagcaagcggtaatcgcaaggcttcagcaaacggaagatgatgctgccatcgataatcgttccatcgaatcagtggcttggatggctgatgaactccaccgccgtatcgattggtatttcaatgcgaagcagtatgtgaattctgcttcaatcgatgatgctgaagccgagacaatgaaaaccacggtgtcggtgttccaaggccgtgtcacggcatctgcaagacgtgcagctggcattgaagggaagatacactttattggccagcaatcaaagactcgtctggatcgtcgtcatcatgcggtggacgcttccgttatcgcgatgatgaacacggctgctgcgcagacgttgatggaacgtgaatcattgagagaatcgcagcgtttgattggtctcatgccaggcgaacgttcatggaaggaatacccctatgagggcacttcacgctatgaatcgttccatctttggttggataatatggacgttttgcttgagctgcttaatgatgcgttggacaatgatcgaattgctgtcatgcaatcgcagcgttatgtccttggtaattccatagcacatgatgccacaattcatccgctcgaaaaagtgccgttgggctcggcgatgagcgcggatcttattcgacgtgcttctacaccggccttgtggtgtgctttgacgcgtttgccggattatgatgaaaaagagggtttgccggaagattcacatcgtgaaatacgagtgcatgatactcggtattccgctgacgatgagatgggattcttcgcgtcgcaagctgcgcagattgctgtgcaggaagggtctgcagatatcggttcggcgattcatcatgcccgcgtgtaccggtgctggaagacgaatgccaagggagttcgtaaatatttctatggcatgattcgcgtattccaaactgatctgctacgcgcttgccatgatgatttatttaccgtgccgttgcccccgcagtctatttcgatgcggtatggcgagcctagggtggtgcaggcgctgcaaagcggtaatgctcagtacttggggtcgttggttgtcggtgatgaaatcgagatggttttttccagtctcgatgttgatggtcagattggcgagtatttacaattcttctcgcagtttagtggagggaaccttgcatggaaacattgggttgttgatggattctttaaccagacgcagttgaggataagacctcgataccttgctgcggaaggattggcaaaagcgttttctgacgatgttgttccagatggggtccagaaaattgtgacaaaacaaggatggctacctccggttaatacagcaagtaagactgcggttcgtatcgtaagacgcaatgcttttggcgaaccgagattatcgtcggcacaccatatgccgtgctcatggcagtggaggcatgagtgaatcatgcaaaaccagtggcgtgtaatcgactgtaccgatcttgacggctccatctcctatgaacggggaaggatgcgagtcgtcaagaacgatacaggggagtgcgtggatgtgccacttgctcagattgcggtagtgctactgggattgcatgtgcgatgttcggctgcggtattacatgagatggcacggtatggcgtgtcagtcatgctctgcgattggcgtggtgttcctgacgctgcgctgcatgcatggactgacatgcctaccacagttaccacgcggcaattggcgcagtcgaacatgtctcttcctcgcaagaaaagtgcgtgggcgcgtattgtacagatgaagattcgtggacaagctgcttgcctcgattcatcaaaactcgaaggtggaggcttgctacgaggtattgcagcctctgttcgttcgggtgatccttccaattgcgaaggtcatgctgcacgtgaatattggaggcgaatgtttcctcaagatgagaaattcagaaggattccggggcagggttatggtcggaatgcgcagttggattatgcctatatggtgctgcgaggattcgcggttaaagcggtgatagcagcaggattaattccatctttaggcgtgaatcatcacgggcgcggcaattatttctgtcttgcagatgatctgttggaggtatataggccggcagtggattacagagtctcactgctgaatgatgaagactcgttgcaggagaaggcagtaaagaagcatttggtagatgctgtgaatcaacaattcaacggttccggtttgactataccgagctcattgaatgattttgcgcagcaatttggtttatattgcgaaggcaaaatcgacaggttgcaggttcccgaatatgtaggcgagtcatgaaacgcgatgaggacagtggcggcatgtggtgcttggtgatgtttgatttgccggtcaagacaaaacggcaacggcatgctgcaactgtctttagaaatatgttgctcgacatgggatatggaatggtgcagtattccgtatatgtgcggtatacgcctacgcaatcgggtaatagggcgacggtcaaaatgattaaagacaatctgccagctaatggcttagttagaattttgcatattagcgatcatcagtggtccacggcggcccgattttcttctggaaaacgtgagattgaggaagaaacgcctgactttctcacgcttttttgaacgtaggagagtctgaaaagattgaaaaatagcccttcttgataggctatcaagcttatcaagaagggtgaatgctaattcccagcttccaatagtcgctgttgtcacccatcacaagcttatcaagaagggtgaatgctaattcccagcgctgccgtcgatggctcgaacctcacctcaagcttatcaagaagggtgaatgctaattcccagcacgtcatcgagacaccggcagatgtgaccaagcttatcaagaagggtgaatgctaattcccagcaagtcagcagaaagatacgtggatatgacaagcttatcaagaagggtgaatgctaattcccagctttcgtggtgacggaactgttcggctatcaagcttatcaagaagggtgaatgctaattcccagctcaataataatgctaaatcactcataatcaagcttatcaagaagggtgaatgctaattcccagcatcatgtcggaatacgatttcgccttgtcaagcttatcaagaagggtgaatgctaattcccagcgcaaaatgcgcggagacaccgaactcaccaagcttatcaagaagggtgaatgctaattcccagcagcgctcggagcaaacgccgccgacataacaagcttatcaagaagggtgaatgctaattcccagctcaaaacgggccacctcctcgacctcgacaagcttatcaagaagggtgaatgctaattcccagcgacatcacccagccgacgcacaccgcgaacaagcttatcaagaagggtgaatgctaattcccagcgtaaccccgtgtgagtccagcatggaaccaagcttatcaagaagggtgaatgctaattcccagcatggcgtgcctgacaagtggagcgaaggcaagcttatcaagaagggtgaatgctaattcccagctctccttcgcgtcagtgcatgtgggctgcaagcttatcaagaagggtgaatgctaattcccagctgttcttgcgcggccttccccgccgacacaagcttatcaagaagggtgaatgctaattcccagctcgttggcgttgaagcccacgtccgttccaagcttatcaagaagggtgaatgctaattcccagcggcagtggcgtgaggagatcaatcgttttcaagcttatcaagaagggtgaatgctaattcccagccttacgcgcatcggtgatatctgtttcacaagcttatcaagaagggtgaatgctaattcccagcgtaaagggtggcgttttgtcgaagtcaccaagcttatcaagaagggtgaatgctaattcccagcgtcgtgtcggtatcaccgtcaccgtcaccaagcttatcaagaagggtgaatgctaattcccagcggtcaagtagggtcatgcggggtcaagtcaagcttatcaagaagggtgaatgctaattcccagcggttggttcgatgatgcaacacctataccaagcttatcaagaagggtgaatgctaattcccagccttcctttccattattgaaaatctccagcaagcttatcaagaagggtgaatgctaattcccagcttatcaatgaagttgcggacgatgttcgcaagcttatcaagaagggtgaatgctaattcccagccgcgaacttaacggggagccggcgttcccaagcttatcaagaagggtgaatgctaattcccagctcgtcgtccatctctgtacctcggtttctcaagcttatcaagaagggtgaatgctaattcccagccgttccccagtggggtgagtgtgatgcccaagcttatcaagaagggtgaatgctaattcccagccatcgagacgacgcgcgaacttgaggcccaagcttatcaagaagggtgaatgctaattcccagcaccgattgcaacgcgaatatcccgggtatcaagcttatcaagaagggtgaatgctaattcccagctcctgcaactcctccttgcgggccttcacaagcttatcaagaagggtgaatgctaattcccagcgttgttccgggaacaactgggaacaactcaagcttatcaagaagggtgaatgctaattcccagccttgcctccgttctgcatccagctgtcgcaagcttatcaagaagggtgaatgctaattcccagcacgcggcgaagaatcttgttatcgcggctcaagcttatcaagaagggtgaatgctaattcccagcgtcgcacgtggcatggcatgttggcgaaccaagcttatcaagaagggtgaatgctaattcccagcgccaacggcgcgtacaccggcaacttcacaagcttatcaagaagggtgaatgctaattcccagcaagaagaccgcgactatcggctaccaggcaagcttatcaagaagggtgaatgctaattcccagcaggaggttcaacgcaagtatttcacggccaagcttatcaagaagggtgaatgctaattcccagcagtcatttggtgtgcctttcacgatgatcaagcttatcaagaagggtgaatgctaattcccagcttgcatacgatgtcgaatatcccctctccaagcttatcaagaagggtgaatgctaattcccagctgtcctgcatttcgtgcaagaccgcttccaagcttatcaagaagggtgaatgctaattcccagctggtttccgtgccgcattggtcgcagtacaagcttatcaagaagggtgaatgctaattcccagctagaagtgcagattccgttcctgcaaaccaagcttatcaagaagggtgaatgctaattcccagcaggacgtgcaacgcaagtatttcaagatcaagcttatcaagaagggtgaatgctaattcccagctcgtcgatgtgttccaagaggtttggtgcaagcttatcaagaagggtgaatgctaattcccagctattgttcgggtgcgatggtgatgatcacaagcttatcaagaagggtgaatgctaattttgaatgctggaatgcttgggttgatttggctgatttagctgtgatggccgctgcgggaatggcccttgcgcggttggcggcagaggttgcggcgcggattgcggcactgattgttgtgccaattgcgtctgcggtgaaaaatatggcgacggctgtgtctgactgtttatcggcggatgttccggctcaggttgtggctggaatggagaatattgcggttgcgccattgtatgcccctgccccttcattgccatttcattggcgcatggcgagggctgaaaaccaagatgatgaatcctgcatgagttatccgtgattcctgtacgttggtacagcgcggaaggttgagcagccgacatatgcaggcttgtcggttcaactgaatatctttaaactatgacttccaatacccttcgtatgtcaaccatgttcctgcgcaccctgcgcgaggaccccgctgatgccgatgtcgattcagccaagctgctgcagcgcgccggctatatccgcaaggccgcacccggtatctggacctggctgccgctcggtctgcgcgtgctgaacaagatcgaggccatcatccgcgaggagatcaacggcatcggcgcccaggaagtgcacttcccggccctgctgccgcgcgaaccctacgaggccacccatcgctgggaggagtacggcgataacatcttccgtttgaaggatcgccacgaggccgattacctgctggcccccacccacgaggagatgttcacccttctggtcaaggacatgtactcctcttacaaggacctgcccgtcaccctgtaccagatccagaccaagtaccgcgacgagttccgtccgcgcgccggcctgatccgtggtcgtgaattcgtcatgaaggacgcctactccttcaccctcgatgaagaaggcatgcgcaaggcctactatgacgagcgcggcgcttacgagcgtatcttccagcgtcttgacctgaagtacgtacctgtgttcgccatgtccggcccgatgggcggctccgcatccgaggagttcctggctccgatgccgatcggcgaagataccttcgcgctggcaccttccggcaaggcatggaatgtggaggccctgagcactccggaactaccggaaatcgatgcttccaccactcccgccgcttccaaggaagccaccccggatgccaagaccatcgataacatgatcgagcgtgccaacgccgaccacccgcgtactgatggccgtgaatggcaggcttccgacatcctcaagaacgtggtgatcaccgtcaagcaccctgaggatgaagagcatgacgagccgtggcgtgaagtgattgtcgtcggcgtgcccggcgaccgtacggtggatatgaagcgactggaagcccagttcgcgcccgccgaacttgaggaagccactgaggaagacctgaagcagcaccccgaactggtgcccggttacatcggaccgatggtgcttggcccgcaggccgaggctgctggcgtgaagaacccggttcgctacctgatcgacgcgcacgtggtcaagggttccgcttggttcactggtgccgatgagaacgaggtcgactactacaacctggtgtacggccgtgacttcaaggtcgacggcgtggtggaagccgttgaggttcgccacggcgacatgagcccggatggttccggtccgttgagcttcgagcgtggtgtggaaatcggtcaggtgttccagctgggtctcaagtactccaaggcactggacctgaaggtgctcgaccagaacggcaaggccgtgccggtgtggatgggctgctatggcatcggtgtttcccgcgtgctggcctgcatcgccgaaacacaccacgacgaagccggcttggcttggccgtccgtgattgccccggctgccgtgcacgtggtggccaccggcaaggacgccgtggcgtttgaaggtgccgagaagctggtcgccgagcttgaagccaagggccttgaggttatttacgatgaccgcaagaaggtgtctccgggcgtcaagttcaaggatgccgagctgatcggcgtgccgctggtcgccgtggtcggccgtgattacgtcaacgacggcaccatcgaactgcgcgaccgcaacggcgaaaacaaggtcgccgtgcccgccgccgaagccgccgacgcgctcgccgagcgcttcgccgccctcagttgagtcccacttactcagcctcggcgttaatcgcatcaagcgccattctgcccagtcgcagaatggcgctttgctgtggataaccgaagcttatccacattcttaaaaaatcaactgcgtcacagtatccacatttgccagttgcccttgtgcacttcaaacgtcatgcctcacagtggaggtaccgctggggcgtgcaagccggcaatgaagccggagacaggctccggcggtccacatccaaacaacaggccagcaggccgaggaaaggaccgatcatggcaaatcaacaagcagcagtgaccgtcaccggctttgtggccggtgatccgacactaggcggaaccgagagcttccgcgtgctgacattccgtatgggcagcacgcgcagtcgactcaacccgactaccagacaatgggaggattacggaaccgcatgggtgggcgtcaaagcgttccgtgctttggccgtgaacgccgccagttcggttcgccgcggtgaccgcatcattgtggtcggctcactcatcaccgagcagtggaccaatgagcaaggcgaaccgcgcagtagaaccgttctcgaagccaccaacattgggcatgacctgaccttcggcaccacgtcgctgatcaagccacagcgtgccggtaatgggaacggaggcaatggtggcaacggtaacggcaatgccaacggtgccgtcgaaggtatggatggcggaaacgggcaacgagcatcgtcgccgtacgttaggccaacgcaatatggcgcgggcggtgccgcatccggtgtgggtattgacccgtatgcgacctcgtcggaatctggccccgtcgaatttggggtcacctccgattccggccaatcgccgtcgccatcaaccgagtccgcggccgtggccgatgccgtcatgtcgcaaccggacgccgacaccaatcaaccacagcccgtggcccaacaaacctacgtcgacggtttcgccgaatcttccaatcccagtgattccgaattctgagtgccaaccatacatcatgaaaaaccgctgtgttcgcctgtaatcgaggcaaacacagcggttttcctttacataacggggattaccaaatacgcacacggtccttgggcgcgagccacatggcgtcgccttcggtcacgccaaaggcatcgtagaagaggtccacgttgctggcgatgccgttggtgcggaattcggccggagaatgcgggtcgatctgcaggtactgttcggccagctcgtcgcggttcttggtgcgccagatggaggcgtagctcaggaagaagcgctgcaggccggtgaatccgtccatttcgggggcggtatcgagcagtgccttgatggcggcgggggagccgtcttctttggcgtcggacttacctgccgccttgccgagcgcgaatgcatacgccttgagcgcgatgttcacgccgcccaaatcgccgatattctcgccgatggtcagcgcgccgttcacgtgcggtgccttatcaggctcgtcagcgtacttctcggccagctgcagcggcacaaagctgttgtactgggcgatcaatgcgccggtacgggcctcgaagttcttgcgatcctcgtcggtccaccagttgttgagcttgccgtcgccgtcgtactgcgaaccctgatcgtcgaagccatggccgatctcgtggccgatcactgcgccgatgccgccataattcgccgcatcctcggccttcgggtcgaagaacgggggctgcagaatcgcggccgggaacacgatgacgttcatgctcggctcgtagtaggcgttcaccgtctgcggattcatcagccattcgtccttgtcgaccgacttgccgaccttggccagctgatagccggtctcgtacaggttcgcggccttggcgttctcggcgggcagcgcatccgcggaaacactcagcgccgaataatcgcgccagtggttggtgtagccgatcttcggcgtgaacttggagatcttctccagagccttggccttggtgtcctcgcccagccaatcggaattggtgatggacacgcggtaggcgtcaatcagattggcgaccagctcttccatgcggcgcttcgagctttcggggaagtgcaggcgcacgtattcgcggcccacatcttcaccacaaatgccgttgaccaggctcaccgcgcgcttccaacgatcgcgctgcttcttggcaccggagagcaccttgccgtagaagtcaaagttggtggtgtcgaagtcgcgagacagggaggaggcgaagcccagaatcatgtgaacacgggcccacagcttaaggtcggccagatcggcctcggcccagaacgcatcaagaccagtgaggaagctcggctcgtgcacaatgacgcgcgcgaacacagacttgaaatcaatcggctgagccttggcggcttcggtggcgtcataagcggtctgccaagcgtcgatccaagaaccgagatcgaagtttttcagcgtggcggccagatcggcgtaatcggtggggttgtaggtcttcaccgagtcgcgcgtggccacattgtcccaatggttggcggcgatcttggtttccacggcaaggaagtggcgggccatgccgagcgcggcttcgctgggaaccgtggcgggagcgttgctctcgtcatcgccggtgttggacggcagctcatcgccaccgttggactcggcggcgggcgcgtatccggcgttcaccagctgggtggtgaccatcgccacgtatgcttcgcgcacgggagcgtagtgatcctcgcgatagtaggcttcatccggcagacaaaggccggcctgctcaaggtgggcgatgttgcggtccgggtcgcccgggtcgccgtaaacggccaagccgaacagatcggggccgccggctgggttgatcgtgccgagcacgcgcgtgagtgcggccttgtcgatggcggaatcgatgaggtcaagctcgtcgcggattgggtcaagcccggcggcctctatggcgtcggtgttgaggaatgagcggtacagggcctcagacttgacagccgggcagtcgtcggcgtcgaggatgtcgcgtacttggttttcggcgtcttcggcaagcttgtcgaaggagccgtagcgcgaacgatcgtcgggcaatcggtaggtgtcgatccatgggccattcacgtagcggaacaggtcgttggtcggcttgatgacggaggagaacgatgccgggtcgatgcccgacgtcagcgtttcggtttcgttggtcatggccctaagcctaatcgcggcgggggagaagcgttgatggtgcagatattgcgttatgggcattgcgctgtcagtgaactagacagattgcctaattgtggtgatggttcaaattagacaacttgtctatcatagtatgtggaatctgaacatggaccttgagctaaggagttacgatgagcaatccgaacgaggaccagtggaatggccagacgggccagcccaaccagagccagccgaaccagccgaatccggcgggtcaaccgggccaaccgcagtatggtgcgtatgacagcaatcatggcggccaata

SEQ ID NO: 555 - DNA, 23513 bp, synthetic construct
  source 1..23513: mol_type = other DNA
  misc_feature 1..23513: note = Synthetic
tctttaagatgcccaacatgagcaaagtctggaatgtgactcttaatggttccaccattaagtttggtgccttcatcggggccattatcaacttcctgattatcgccctggttgtctacttctgcattgtagttcccatgaataaattcacagctttgcttaaccgcaacaaggccgatgacgaggaagaagagctcgacaatgaggcccaacagacccagctcctgtctgagattaaggaactcctggctgcagaagctcataatcctactgcgccttcttctcccagtcagtctgaacaggcttagtcctggtctgtcctggcttttcttgccgaagtgttatagtttccaattggcgtgagtatcgcccgcggatagagagcgctttggcatcgggccagggcaccgcgcaacaagacaggaggccggtatggcactgagtaatgaagaaaagcagtcgatcatttccgaatacgcgactcatgagggtgacactggttctcccgaagtccaggttgcactgctcaccgcacgtattaacaatctgactggtcatatgaagcagcacaagcacgacaatcattctaaccgtggtttgctccttatggttggtgaacgcagccggatgctgaattatttgaaggataaggatattaatcgttatcgttctctgattgagcgccttggcttgcgtcactaaaaatctttcgcccaggttgtcgcctgggctcttttgcataagctttctgctttccctcactgtttgatatcaacggataataacgcgaagcgaaaattaagcaggaaaaaatcaaacagaggaagtcggacggggcagcaaagatggcaaagatacatgcacacagataaagatacgcaaagatacgcagaaaataaatataaataaatataaagaaataagaaagtcgtgtcagtttccagctaattcctaaacgtaggggggcgcaggagcggatacgcaacagataaaaatgatgattcgcaagagggtcttgcgactaggtatgaagaaaaaataaaggaggaacccatggagggtcccgatattaaagcagtagaagccgttattgataacggcgattttggcaagcgcgttctgcgctttgagacaggtcgtctcgcccagcaggcggatggggcagttgccgcttatcttgatgatgattccatgattctgtcaacgactacggctggaagcagtcctaaggagaatttcgatttctttcctctgactgttgatgttgaagaaaaaatgtatgcagccgggaagattcccgggtctttcttccgccgggaaggccgcccatccaacgaggctattctggcctgccgcattattgatcgtcctctgcggcctctgttccctcacactctgcgtaatgaggtccaggttgtggaaacagttttgtccatcagccctgatgattcttatgacatgattgctatgaatgccgcttcggcatccaccatgatttccgggctaccttttgaaggtccggtttccggcgtccgcttggctctgattgatgatcagtgggtagccttccctcggtggtctgagcgcgaacgggctgtttttgaactggttgttgctggtcgggtgctcgacaatggagacgtagctatagctatgattgaggccggagccggtaagaacgcatggaagctcatttatgatgaaggcatgaccaagccggatgaggttgttgttgccggcggtcttgaggctgcaaagcctttcatcaagaccatctgcgaggctcagaatgagctgaagaaggcagctgccaaggaaactaaggacttccccctcttccctgaatacactgaggatctttacaatcgaattgatcagattgcccacagcgacctgaatgatgccctctctattgccgagaagcttccccgccaagaccggattgcccagattaagcagggtgttgttgacactctggctgcggagttcaccgatatggacgatgctgagaaagaaaaagaaattggcaatgccttcaaggaattgcagcgccagattgtccgtacccgcatcctgaccgaagattaccgaatcgatggccgtggtctgcgtgacatcaggaccctctctgctgaagtggatgtagttccccgtgttcacgggtctgccctcttccagcgtggagaaactcagatcctgggcgtgactaccctgaatatgctgaagatggagcagacaactgatgctctgtccggtcctagcaccaagcggtatatgcataattatgagatgcctccctacagcaccggagaaaccggccgcgtgggctctcccaagcgccgtgaggtggggcatggagccctggctgagcgggctctgatcccggttctcccttctcgggagaagttcccctatgctatccggcaggtgtctgaagccattggctccaatggttccacttctatgggatcggtctgcgcttctactatgtcccttctggatgctggtgttcccctgaaagctccggttgccggcattgctatggggctggtttccggtgaagtcaatggccagatggtctacaaaactttgactgatattctaggtgccgaagatgcctttggtgatatggacttcaaggtagctggaacatcggaatttattactgcccttcagctcgacactaagcttgatggtattcctgctgatattttggctgctgctctgcgtcaggcttatgaggccagaaccactattcttgaagtcatcaacgagtgcattgatggtgttaacgagatgagcccctatgctcctcggattatcagcatgactgttcctgtggataagattggcgaaatcattgggcctaagggcaagatgattaacgaaatccaggaaaagaccggtgctgaagtcaccattgaggatgatggtactgtgtacattgcatccgaaggcggtaatgccgctgaagaagcccgcaagttgattgatcaaattgctaatcctcatattcctgaagaaggggagaagtatcagggcaaggttgtgaaaaccactagctttggtgccttcgtcaacctgactcccggaaccgacggacttctgcatatttcacagattcgcaacctggctaacggtgatcgtattgatgctgtggaagatgttttgcgcgaaggcgacaccgttgaggtagttgttcagggcgtggatgacaagggtaagatttctctggcaattcctggattcgaagatcaggaaaacaactcccgttctggggctggccgtggttttggccattctgacaggggcaaccgtggagataggtatgaccgcggagaccgtgatgatcgtagtgatcgcggcgaccggtccgatcgtggagatcgttccgaccgcgccgaccggtcttctcataaccgccgtcatgaccgttctgatcgttccgaccgcgccgaccgttctgaccggaatgatcgttccgaccgcgccgaccgttctgaccggaatgatcgttccgaccgcgccgaccgaggcagccgttacgaccgtagagatgaagcaggagatgacgatcgctttgatcgttcttcccgtttccgtcgttatgacgatgacgaccgttctgaccgccataattcccggtatgaggatgacgaccgtgattatcgttctcgccgtccccgccgtgatgatcgggacgataggtctgatcgttccgaccgttctgatcgttccgaccgttctgaccgtggcgataggtatgacaggtccgactggggttctcacagccgtcgttctgaccgctatgccgatgaagatgcttataacgagtatcgtcaaggtcgtgaggaaagaacggcccgtccccgccgccgtattcgccgcgacttcgatcctttcgacgaggattaattttgggatttcacagttcagtaatttggagttgaataacgttgaataactcggagttcctaattcaataacttcgaattctttattcaataactcggaattttgagttcgcaaactctgaattcttactatctctggctggatgaggcatccagccagagattttcctttctatttccttcttgtttcccttcctctttactttgtgtttagttacttttgggttacaatttacctatttcctagtttctcttcatctttttatcaattgcttctccttatgcataatttctgttattggaatataagttagtggtgctgaagtctgttccaaccggtttcatataaactatccttcacccaactgcacagggaaaaaaagaaagtgacgtaattccaacctttttatttagagacaatgcagttgggtgaagggtagttttctataatctaaaatcagtggttgctcgacccttataaaggttttgttttatgtatttccatacataaaacaatcctattttcaacaaattctaaatgaataatgaaatgggttctcgtgaactagaattctggaagaatgaacccaacgaaaattggctctcttcaaaagaaagagccctgttattggtgcactatacgttgattcattgtaccaaataacagggctcttaaatattaatatattaatattgtctggaggctgctttcccgcagtgctttagcactagtggcgcaatactccagagtctaatctggcttgttgctagtcagcttagttgacttagtcggctaaggccttgttgacaacagctgttgcctcatcgagaaccttgtccagagtttcttctgaaatgaaggattctgcgtataccttgtagatgttctccgtgccagagggacgggcagcgaaccaattattcttggttgttaccttaattcctccaatgggagcaccattgccgggagcctcagtcatcttctgctcaatggcctcaccaccgagggtggtgtcggtcacggaatcaggggtcaggctggcaaacttttgcttctgctccagggtggtaggggtgtcaacccgcttgtaccagctctgtccgaaacgtgcaacctgctcatcatgaagctgagcaggggtcttaccggtcttggccgttatctctgccgcgagaagatcgggaataatgccgtctttgtcagttgtccatacacggccgtcgaaacgcaggaagctcattccagagctttcttcgccgccaaaaccgacttcgccgttaaagagcggatccacgaaccatttgaagccaacgggaacttccaccagctttgcgttaatagaagcggcaacgcggtcaattagggaagaggagaccagagtcttgccaatgcctgagccttccggccagccgggcctattaccgccaaagaggtattccacgcagacagcaatataatggttcgggttcatcacaccgctgccagggcaaacaattccgtgccgatcagcatctgggtcggtaccgcctaccaggtcgtactgatcccatgcgccggcattgagcctgtctaccagtcccttcatggcatagggagaactgggatccatgcgaatctttccatcgtgatcgatggtcatgaaggaccactgcgggtcaactttcgggtttactaggccaatattgaggccgtatttctcgttgatcagttcccaatagttcaccgaagccccacccaaggggtcaattcccaaacggactccggaactcttgatcagatcaagatcaataacgtttttcagatcgtccacataatgctcgcgataatcaaagcgctcaaccagatcggacgtgacggcctggctgtatggcacacgggccacattcttccagttggggaggagctcgttggcgcgctgagcaatggcattggttgtctcagccggggcaggcccgccggtgggtgggtcatacttgaagccgccgtctgttggaggattatgggatggagtgaccacaatgccgtctgccaggtcatccccactgaaccgctgactgccgtctgcggcgcgattgtgggttaggatagcctgggaaacagtaggtgtgggggtgtaatcatcgcgagaatcaatgcgaacgcgaactccgttggcaacgaggacttcgatggcggtcttccatgccggcaggcttagggcgtgggtgtcacggcccagataaagcggaccggtgaccttggcattcttgcgatattcagcgatggcttgagaaattactacaatgtgagcttcattgaaggaagtcttcagacttgatccccggtgcccggaggtaccaaaagcaactcgctgctcaggtacagaaacatcaggaacgaggttgtagtaagaatccaaaacctcagtgacattaatgagatctttttcggtggcgggcattcccgcatttgttgcaaccatactcctattgtgccatgctgagaagatattatacttagtctgattcttgcacagttgagtttaattatttattttataaaggatcgtttacatgaggaggatgggagtctctccggtcaagtgtgacgctgaggtaggagatgaggtaggagatggtgtggtagatgatggtgttgtagacgatgccgtagctgatgcccccgccgatcctgaagtgggtgcagatttttctgcttcagatgaatctgaatcgatgtcagtctttccgtcgacaccagttttcccagttttcccagttttccaagtcttcccaggcttcccagcttttccagaggcttcccttgaagttccgtttttggcgtcagccccggcccttgcactggtatcagctcccattcctgaattggctctagtcccggcagcagtttcactagccgtctgaggagccctgacgatcagggattggtgatcaatggtaaaccgaatgtgctgggttttctctaatatatccccatccacttcggccaggattggcttgtccaacaggacctctgcactggttccctgatattgcttaactgttgaccgctgtgtaatcggactttgctcggccttacgggtgatggtttgatggatgacgtcaatgagcagattaagccaaccccaaagtccatgggtagtatcaattgtctcaaaatcaagcagaccgtcatcgtagtgggctgcgggcatcaggctgaagccaggaatttttccgcaattgccagccatgagagtacggaaagtttctcccctggtttgatgaatgctgccgtcggcctcagtcaaaatgactgttccatgaatacggctttcaaaaagatgctttaaggcaccccaaaagtaagcaaaccagctgatggatttcttcagattcggatcggtgtcatcaatcagctgagcgtcaaagccaactcctgcaataataaggaaaccgtgtttatgctcgggctcatcagaatccaggagggccattcgtcccatatctacccggcgagaaccatgagaagtggcgatagccatggctgcttccagattatctacaggaattcctatgtttctggcaaaaaggtttccagttccaatcgggataatgccaaaagcatgtgtagtgccggacattgcgctggcaacagtacggacggtcccgtcgcctccacaggcaataaccacatctgccccgagggaaagagcttccttggcacaggcgtttccatctttatcaagctgagtatcaataaaaatagtgtcagaaatattatgatcagaacagtatttttttatgtatgagcgggtttcttcagcctgaggtttggaaggattgataataaaagcataggagaccttatctccgtaccgctgttcggcttgaattacttggtgtttgcggcgggcaaggatgaataggcatactataagagcaatcgctatgatggccccgataatgctgagggctataatccacccttgatccatagttatatattatgcgcatggtagttcaaattttctggaagatgtcgaaatctttcctttaatttttctcgatagggcttggatgggaattattagtaaaattttgggtataagtccaacagctcagcttttccagcgtctcctgtggtcgctattctgttaaacatgcttgatattcaatttattcgtgaaaattctgatattgtcaaggaatcccagcgtaagcgaggcgaatcggtggagctggttgatgaggttctgcaggctgataaacagcgccgtgattccttgtctcagtatgagactaccagagctgagcagaagcggattggtaagactgttgccgctgcttccgcagaggagcgtccggctattattgcccggaccaaggagttgtctgcccgggtgtcggctttcaaagatgccgccgataaggcgaccgaagaatacacggccgccatgtggaagctgtctaacattgttgagccggaagccccggaaggcggggaagatgattacgtggtggtgaagaaggttggccagctgcgtgattttgctgccgagggttttgatcctaagaatcatctggagctgggcgaaggcgttgcaggaattgatatgaagaggggagtgaaggtttccggatctcgcttctattttctgcgcggggctgtggcccgtctggagcttgccatgctgaccatgggagtggaccaggcagaggctcatggttttattatgacgactactcccaccctggtccgtcccgaaatcatggctggtacaggttttcttaattctcacgctgatgaaatttatcgtcttcgtgagcccgatgaccagtatttagtagggacatctgaggttgctttagctggaatgcatgaagatgaaattctggatttgagcaagggacctttgcggtatgctggctggtccagctgctacaggcgggaggccggaagcgccggcaaagatacgatgggcattattcgtgttcatcagtttaataaggtagagatgtttgtttactgccggcaggaggattcttacgctcagcatcagaatcttctggctatggagcaggagatgctgggaaaagtggaggttccttaccggattattgataccgctgccggagatttgggttcttcagctgcccgcaagttcgattgcgaggcctgggtacctactcaaggaaggtatcgcgagctgacatccacttccaactgcaccgagtaccaggcccgtcgtttgaatattcgtgagcggactgaggatggttctacccgtccggtatcaactctgaatggtactttagcgacgacccgttggctggtggctattctggagaatcatcagcaggcggacggatccattgagattcctgctgctttgcgtccttatatgggcggccgacaggttattgatcctgttgcctgggaagcttaggctttagagggtgagttgagatgtagcctgaacttaactttgctcaaccctctgtctgccttctgcgtgttgcactcctaaatctgactatcaggtgaggtattatataaacttgtgcaacgggaacggacgtatgagcctcctggtgcacgttagggacaggtgtccgagcggtcgaaggaaacggtcttgaaaaccgtcgaacgcaagttccgtgggttcgaatcccaccctgtccgctctccgcgcgggggttctaatcacctcctttcttttctaacccgattattttcctcgcgcgggcttctatgcttgtctgttttgtagctgctcttcggctgatattccaaaatttgtaatgtcacattatcagtttttgcttgataccttaaagtatcggtttagcagagaattacatttgcaattttgaataaagtggtgtacactactgacttggataattccaagtaagaacgatgctcatttattgaggttgtcgttttgaattctccgcagaagctttgtttctgcaggggtggagatttctctccaccccgttctgatttggcttattaattcctgtatcgatgttgagatattgtgtaatttttttatgtttttactgtatagtttctgggaaagcgccataattctaatatggctaagaagaaaatttcttatagaattggtattgatgttggtttgaattctaccggattggcagctatcgaagttgatgacgatggtgcaccaattcgtattctgaatactatgagtgtaatccacgatggcggtgtggatccggatgctgcgaaggtgaggggaacacgcttagctatttctggcatagctcgaagaacacggcgcatgaggaggagaagggcaaagcgcttggaccgtcttgaacagattctggagaagtatggatacacagatacggaaccggttttagaagaaccttacggcccctggatatgcagagcggaactggctgacggcttcatcaatgatgacgaacagcgcagaatgatgataggcattgctatcaggcatattgcacgtcatagaggttggagaaatccttaccagaatgttcgagcattgttaaatattgatgattcagatctttccgaagaatataagaatctcaaagaaaaggtacaagatcaaattaatgacggaaaggatctgcctaattttactccttctcaattagtcagagattatcttgataatttttccggacagcctgcagcaagaattcgaacaggaaaagctggtcctcgggggaatagaagagatgcggtaggtattcttcctcaacgaatgaggcaatccgactatgcatatgagttacagcgtatttttgatatgcagaaaattggcagagatgaggctcaagaattgcttatggctgtttttgaggctaaatcgccaaaaggatcagctgagaagaggattgggaaggatcctttaacaggaaagaagcgggcattaaaggcatcgctagcatttcaaaaatatcgaattgtagcaacaattacgaatctacgaattaaaactggtactggttctgagcgtatgctttccccaacagaacttaacgacatttatacatatttattacgtgtgcaagatgacaatcaccttccaacgtgggaagatatctgcgaagaggtcttgcatattggcaggtatcaactagctggaatcgggaaaaccttcgagggtggagaacgtatttccaacatgccacctgtgattcagacaagtttagcgatacatggattgtcggaaggaactcttgctgaaaaactcactaagtggtgggataaagcggatgatgattctcgagaaagcatgattaaactactttcaaacactgttgatattgatagagtcaatgaggttgatgagaattttgcttctgctcttgattttattgactcacttgatgatgaggaactaactaaattagataagatcgctctgcctcgtggccgtgcagcttattctgaagaggctctgaataagctgactgcagacatgttaaatacaggtgatgaccttttctctgcacggcaaagaatataccatgttaacaatagctggaggccccctcagccaccaatcggtgagccattggggaacccggcagttgacagagtattgaaaattaccaaccggtatcttatgaattgtttgaataggtggggccagccaagacgcgttacaattgagcatactcgtagcggttttacatcagtaaaacaagcaactgaacaccagaaaataagtgataagagagccgaatataggcgagatattgtaaaacaattggaagaagctggtgtagagtctgtccatgaatatgatattaggcgctgggaagcagttcaaaggcaaaatgggcaatgtttatattgtggaagagacatcacctttaaaacgtgcgaaatggatcatattgttcctcgaaaggggcctggatcgacgaacacgagaactaactttgcagccgtttgccctgagtgcaacagaatgaagagcaatattcctttcgcctcctgggcagaaacaaaagaagcaaaggaccgtggcgtatctctagacaaagctataaaacaagttagattcttcaattttacaaaaaacgaatattcaccgcaggctcaacgcaatttcaagaaatcaatgattgagcggttaaaacagaaaacatctgatgagccgcttgataatcgttcaattgaatctgtctcttggatggcagatgaattgtataaacgaattgattggtactttaaccatgaacaatatgagacttctaagaaagcgattaacgatgataaggataatttatccgggacccaggttgtagtctatccgggtagtattacggcagaagcacgtaacgctgcggggcttggtggaaatattcatttcatcggtggtagatacaaaacacgtcttgatcgcaggcatcatgcggttgatgcatgcgtaattgcaatgatggagcctgggatagccaggattctcactgagcggaaccaacttaggcaggcgcaaagacttactgctcgaattgaagatgatgaagttaactggaaagattatcctacagagaatactgcgggatataacaagtaccaagcatggagtgatcgaatgcatgccttattagagtacatgaataatgcactagattacgacaaaattcccgtggttcggtgggaaaggcttcaactagggaataggtccgcacatgaagatactattcatccattaaaaaagttgccattatcgcatgaaatatcagccatagatattaaccacgcttcgactccagctttatatgaggcgctggtttcgctccctgatttcagcgaacaagatgggttgccagctgatccatctcgccaaatcaatgttaatggggagaggtattccggagatgaccttgtgtcatttttcaattcgaatgctgcacaaatagcgattcaaggagggtcagccgaactcggtacagccttccatcatgcccgcatctatcgttgctggactgtcgggaaaaatggtaagaagaaaattttctttggtatgattcgtgtttatcaacatgatttgcttcacgcgaagaatgaagatttatttacatatccgctcaagagatcttcagtatctatgcggtatgctaagaaagaagtggtacatgctattctttctgggaatgctgaatatgttggatatctctgtgtcggtgatgagctagttcttgatctaaaaggtgacaaaagtaatgatgaaggcggctcaaggctaagtggacaggtaggagaatttgtccagaaatttgaagaagattctaaagtcaattctcaaatcgttaatcggtggactgttgatggttttcccgatgaggctaaactccgtctacgtccttcaatgtttgctggtgaaggtttgaaaaatatgaaaagtgagctagtggagaatgcagcaataaagaatattctttctaaaactggatggagagtgtctgtggacgtaatatcaaagaagagtcctgtagtactccgacgtaatgcttttggagaaccaagatggaaaactaatgcggggcttcctgtttcatacagatggcaggacactgaaaccaaagaatgaggtgatattatgcaaagcgcctggcggattatagattgtaccaacttagatgggcagttgaaatatgttcgtgggcgcttggttgtccatcgattcgatgtagatgatgaatatcagctgagtaaattacctcttgctgatattgcagttatccttttaggattgcattgtaattgctcggctggcttacttcaccaatgcgcacagaatggtgtttgcgttatggtctgtgattggcgaggagttcctattgcagctatgcattcttgggcaacgactcacaccaggataacttctcgtcaaagagctcaggtgtctatgacagtgcctagacagaaaaatgcttggggaaggatagttcggaataagatactaggtcaagcggcatgtttggatgccctttctatagaaggcggcaatactctacgtggattagggaattctgtcagatcaggagatccaggaaatattgaaggacgagcagcaagagagtattggaaacgtatcttcccacgcgagaaagactttcgcaggcttcctggacaaggcataggaaggaatgcgcagctggattatgggtatatggttcttcgcggttttgcaactaaagcggtaatttcagcaggtttaaatccttcacttggtgttaatcatcattcgggtgcaaattatttttgccttgtagatgaccttatagaggtttttcgcccaacagtagatgtaaaagttgctagtctcagccctgcggaagaaatcatggataaagaagtgaaacatttcttagtggagtcagtgaatcgacagtttaatggttcaggattcactattccaagtgtcctgaatgatttcgctcaacaatatggtctttatgcggaagggaaattagacaaattaccagttccgctgtttaaggaagaataatgaaaaaagacgaggatagtggcggaatgtggtgtcttgtaatgtttgatctcccagttcaaacaaaaaaacagcgtcgtgctgcaactgagtttcgtaatattcttctggatttagggtatgcaatggtgcaatattccgtttacgcaagatatacaccaactcaatctgggaacagaaccacagtgaaagttataaaaaggaatttaccgccacaaggaaaggtgcgaattcttcacatcagtgatcatcagtggtctagtgcagaccgatatattaatttaaagaaggaaaaaactgatgaaaccccagatctgtatgtacttttttaaacgtaaaaagtacaaaaaagcttgaaatcttcctcttctgagggattgctccattttatcagaagaggaagaggataattccaagcggatacttccacggattcccccaacgggccattttatcagaagaggaagaggataattccaagcgttctattgcaacgattttcgcaaacccccattttatcagaagaggaagaggataattccaagccagacactgttgtctcgggctcggatggccattttatcagaagaggaagaggataattccaagccgatcccgcgtaaaccggcgggcagcacccattttatcagaagaggaagaggataattccaagcagtcttggaatgtgggcgatggtgctacccattttatcagaagaggaagaggataattccaagcggttgtccgaggaattttcgtgggtatgccattttatcagaagaggaagaggataattccaagcgcagtatcgcgtctcagtcattttgcctccattttatcagaagaggaagaggataattccaagcagaaacgccgcagaattatccttcaaaaccattttatcagaagaggaagaggataattccaagcaaagcctggttaagcacaccagtagtgtgccattttatcagaagaggaagaggataattccaagcaagtcgcataatgaccatcacctataatccattttatcagaagaggaagaggataattccaagctccggggataccagtgttaagcgggtcaccattttatcagaagaggaagaggataattccaagccagacactgttgtctcgggctcggatggccattttatcagaagaggaagaggataattccaagcaggcagaagaatgactcaactgtctgtgccattttatcagaagaggaagaggataattccaagcctaacaccaacaaccacagcaccaatcaccattttatcagaagaggaagaggataattccaagcccacaagtatagtctggtgggggcgcgaccattttatcagaagaggaagaggataattccaagctgaaaaccggcgtatactggctcgcctgccattttatcagaagaggaagaggataattccaagcctcgcgtaataagatcgttgatttttaaccattttatcagaagaggaagaggataattccaagccaagggaagaatggcaggggcaggtaatccattttatcagaagaggaagaggataattccaagccatgatgacgatcatgctcggaaatggtccattttatcagaagaggaagaggataattccaagcctcgctttccagtttcctgatttcgctcccattttatcagaagaggaagaggataattccaagccagtatctcgggctactaccaggtagcgccattttatcagaagaggaagaggataattccaagccttctccttcgcctgagtctgcctgcgcccattttatcagaagaggaagaggataattccaagcccaaaacgaaaggaacttgttatgggaaccattttatcagaagaggaagaggataattccaagccgtaatgagcgtggatgaggagatttacccattttatcagaagaggaagaggataattccaagcaggatatccacccatatgcttctgttcgccattttatcagaagaggaagaggataattccaagcgggcgctaaatagagcctcattagtaacccattttatcagaagaggaagaggataattccaagcgccaagagcagcaaaagaagcagtaagaccattttatcagaagaggaagaggataattccaagcgccaagagcagcaaaagaagcagtaagaccattttatcagaagaggaagaggataattccaagccctcgaacaggatactcgtcagcatgtgccattttatcagaagaggaagaggataattccaagcaaaaagcttcgtaaggcatcggcttttcccactttatcggaagtggaaggcctatatgcattagcatgttgctaagttagtcataattatccgcgctctattggtgtggaattctgcgtagacagcagcgtctccctgactgtgattaatttagcagaaactaaagcgtagtaatggcctatgagaatcgtatttctgtgcatgtgcttaaagacattgagaaaataaaacagattctcgctctttcttgctcttaatgaaacatgtggatgtgtttctcagggtttgaagaaaggcctattagccttataaccctcttatgagaagcttcgtggtgatttaagtggcctttttaagtggtctttgcccgcaaagaattggtattcagccgacttgtctataaagtagatcagcaacagaactatatagttagaatagtaaccagaaattatcgtaattcgtgctatgcggacgcattataaagggtgagagatagaaaaatacttgtattgcatcatgcttcatggctgtgagcataatgggggtaaaaacgccacactgcatcctgtttgagtcctgtgctcgattagaataaagtcagattaaccaaaggattcattatgattaaaactggaaaactcaatgatcgagtcgtatcggcaactgtgaagaattctgataaaagtatgacttcatttagaagcgaagaagagtttgaagatgcgttaatcgagtaccttcaaaatataggtggtacaaagcagtggaaatatgagccacatattaagactgaagaacagttatgggctaatttcaaagctatcttggagagaaataatcaaggtaagctcggtaaaaatccgcacctaagtccatcagaattcgagcaggtaaagagagaaatcctccgtgaatgcagaactccatattctgcaggacgctggatatatggaattaacggaatcacacaagttgaaattaccagagattctgaggacaacagtcgcactgctcaagatgatagtgaaactgctcacaaggtacaggaccatgtttatcttgatgtttttgatcaggcaaatgttggtgcagggaacaccgtttaccagattgttaatcaaattcaacgtgaacctgtacacgctcggaataaaaagcgccgttttgatactactcttctgattaatggtttgcccatgattcatattgaagaaaagtgggataaacatgatgcgctggaaggactgtatcaaattcagcaatatattgatgagggagtttttacaggtatttattcgacaacccaaattctggttggattgactcctcatgaatcacggtatatggctaatacggattctgaacatttcaatacggattttgcttttcgttggcaaagaaaagaagatagcaagccggtatgggactggagagagttttgcgacaaaatgctttccatcccaatggctcatagaatggccacacagtatatgattcttgacggtgaaaaagagcgtcaaaaattaattgtcatgagaccttatcaagtttatgcaactgagaaggttatagaacaattgcgaaagcatgtgtttgggactgatcctcaagaagttggatatatttggcatactacaggatcaggcaagacaatcagcagttttaagaccgcttggttggcatctagactaccgaacgttaacaaggtgatttttgttgtagatcgtaaagcattgacaaaacagacctacgataactatcatgcttacgatccagatgctactgatgagggtctgggaattgtagcagatactacgaatacgcgggacttatacaaaaaactaagaagtacaagcagcaaccataatattattgtcacatccatacagaagcttggcgagttagccagtagaaagagattccaacctttccaaaaaaacgtagttttcattgttgatgaagcgcatcgttcgactaatggggaaacagttgaactggtcaagaagaagttccctctctctgcttgggttggttatacaggaacgccggttttcaaaggtgatttaacctatcaagtttttggtaatttgttacacgcttacacgattcgggaagcaatacaagataagaatgttcttggtttccaagtggattttgagcacactttaagtgacgaagaggtacacgagcaacttctcccacaattgttagctgaaaaatatccagataaagcagaagacgaagagtggatagataacaaaatagcatctttgagtgcagaagaatctgaagaattggttgattcaagagtttatgactctaatcctcagcatgttcatgctgtggtagaaaacattgtgaagaactggaagaaccgttctgttgaaggcaaatacggtgcaattttgactactcatgttggaggcaatggagtttctgctccgatggctctacagtattacgatgaattccaaaaagccaacgaaaacctgagacaggtgaatcagaagcctttaaatgttgctgtcactttttcatggaccactgataatagtgaaacacagcttgcgaagaatcaggggttgcgtcgtgctattgaagattataatcatacttttggtcaatctttcggaccggaaacagtaaatgaatactttgatgatgtcatggataggcttaaaggagagcaagagaagggcgaaaagcttgacattgttattgttattgatcaattgctgactggatatgatgctccgaaagttaacaccctttacgttgatagattgttgagcggggcgaacctcatccaggcttactcgcgaacaaatcgaatcgatgacaatctgaagaaacaatacgggcatattgtcaatttccgatacccgcgtacttcaaaagttctcatggatgaagccataagagtttatgcgaatcgtgattcagccgctgtacaaagtgggttgttgccagaggacgatgggattattgctaagaatttctctgatgttctggaagaaacgcataagattgctgagcagctgcgtgaattatctgaagattttacccttgctgcacctccaagcgaagccaagcaacaggaggcagttaacttagtttctgactataattctaaaattgctgctttgaagcagtatactgaatatgattacgataatcctgaggagttattttctaaggttggagttaccaaagatgagcatgagcatattgttaccgtaatgcgcaacgagctcatgaggttggcaaagaataatacacagagtcacaaacttgatgttgcaagtctgaacttcgaggtggaacacgtctccgatgtaagcgttaactatgactatattgatgaactgttggcgcaggttatcaatgaggcacatgaaaacttccctggcattgatgaaacctattcaaatcttattcgggcaacagaccggatggataatagacaggatgctgagcgtattaatgcaactgcaaaggctgcgatggatggtactttgaaactttcagaagaacaatacccagtcacagcacaagacacccatggaattatagaagcacatcgtaatcggacaaaacgagaagcagcactgcagttcaggcagaaatggggacttgtagatgtggaaatggcttcccagcttcttagtaaaattttagaaaagcatgttgctggtagagatgatattggcatgttcgaagagggcagtgatctactgaataaagcaacaaacgctcaatattataagacagatgcaactgatccaaaaattcgtacactcagtggtgtgaaatacaaggatttacttaggatagctattaaagattttgctgaagatatagcacaaaattattcgtgaaattttggattgggaaacactagatattctttaatggcaggcaaaaaaggaaacgagttatatggataaccggaaaacaaaagaacaaaaacaagagaaaaataatcaggcggggaatttgtcatcccaactttgggctatggctaatgatcttcgtgggaaaatggatgcgagcgaattccgtgattatatattaggatttattttttatcggtatctttctgataggcaggaacattatcttgagagttctgggacagttgatattgaagaaggagaaagtcttaatgatgcctatactcggtgttctaagcgtgaaggaatagaactctacagagaagatctatctaatgaacttggctatgcaatagaccctgctgacacttggcaatcccttctggacaaaatacaaaatcagagaattcgtcctgaagacttccagaatatttttgatcactttaagaggaatgcacttcttaatccaaattctgagaaagattttcgcgatgtttttgatgacattaacttgtctaactcatcattagggacttcaactgctgcaagagctaaggcgctcgcagcgattgtagagaaaattaatgaagttgactttctcgatgaaggcggtagagatattctcggtgatgtctatgagtatctgattgagaaatttgctggttctagcggtaaaaaagctggagaattctatactccacatgaagtatcaaaagtccttgcaaaacttgtaacttacgcagcacctgacgcaagtgatgaatctaaagatgtcattaacaatgaagattcgacatttaccatttatgatccgacaatgggctcagggtccctgctgcttactgttcaaaaagaattaacaggcttggatcataggagtagagttcatttttatgggcaagagcttaatcgaactacatttaatctagcccgaatgaatctcctcatgcatggtgttggctatcagtccatgttcttgaggaatgctgatactcttgaatcagactggccagatggtgttgatgcccaggggatcaatcatccactctttttcgatgcagttgtagcgaatcctccctattctcagaaatgggataacaatgcaactaagatgaaggatccacgttttaaagaatatgggaaactcgctcctaaatcagctgcagattttgcatttgtggaacattgcttgtaccacatgaaacttacaggaaggatggcaatagttcttcctcacggtgttcttttcaggggaggggccgaagggataatccgtaaggcattgttagagaagaattatctagatgctgtcattggcctacctagtaatcttttctattcgactggtatagcaacagttgtactagtattcaggaaagataaaacaactgataatgtcctgtttattgatgcttcccaacattttgaaaagagaaagaatcagaatactctgagagacgaagacattaatctgatctttcaaacgtataaagatagaaaagacgttgataagcttgcgcatgtagctagccgtgatgaaattattcacaatgagtataatcttaacattcctcggtatgtcgatactttcgaggaagaagagccaattgaccttaacgaggtaaatcagcagatcgctgatgtcgataaagagatagaacggcttcaaactcagtttgagtctatggttgcagatcttgtagagacctcaatagatgacgatgagaatgaggctaaaaatgactaaagaattacagccagcactgcgcttttgtggttttactgacgcttgggagcagcgtaagttgggtgatgtatttgaagaatattcggaaaaaaaccatggggatctccctccattgacagtccttcaaggaagtgggactattcagagagatgagtctagtagagttttattgtacaaaaaggcgagtctcagcaattataagctagtgaacaaaggggattttattcttcacttgcgttcttttgaaggtggtttagagatttctaagcagcgagggattattagtcctgcatatcatactttccatggagaaggggctaattcaaaattttattatcttttctttagatcgtataattttattaatattctattgaaaccatatatctatggaattcgagatgggaaaaatattgatatagatggcatgaaggaaattatgattccttatccggtaatcgaagaacagcgaaaaatcggtgagtttttcaagaccctggatgatcttatcgctgccaccgagcgtaaaaaagagcttctacaaaagaaaaaacaagcatacctacaactcattttttctcaacaccttagattcaaaggtttcacaaaaccatgggagcagcgcaaactcaacgatattgcttataaagtgactgagaaaaacaataattttagtattcgagaaacctttacaaactctgcagagttaggaatcgttagccaacttgatttctttgatcgtaatctttcaaatgctgaaaacattgtaaattattatattgtacgagcaaaagattttgtttacaatcctcggatttctgctgctgcaccagttggtcctataaactgtaataatttggaaagagaaggtattatatcaccgctttatacagtattcagaacgcattgtattgatacaaattatcttgaatggttcttcaaaagttcagactggcacaaattcatgcgttactatggcgattctggtgctcgttctgatcgtttttcaatcaaagattcgttattttttgagatgccgatcccttatccggtaatcgaagagcagcgaaaaattggtgagtttttcaagactctggatgatcttatcgctgccaccgataagaagatcaatctccttaagcgaaggaagaaagcttatttaca

SEQ ID NO: 556 - DNA, 23474 bp, synthetic construct
  source 1..23474: mol_type = other DNA
  misc_feature 1..23474: note = Synthetic
ccttcttgtccatcacaagctccacgcgataggtcgctgaatacttgctgttcgcggtcgtcgcttcccgttgttcaatgttgtcacgctcggagagaagacgggagaccacgtcttccgggtatctggcgcggagtgtccgctcgtcgaacccggttcggttcactgacagtatgaggtagttgtccggcagggagtcgcatatctcgatgccgagatatgcccgtagcttgtcgtcgtagttgcggacgcttgcctggaatatcggcccgtatgcgatttcgtattccgggacgacgtagtgtgtgccgatgttcctcagtcgcatgatggtctcaatgttcgtcctcaccgggtctttgtcattcgtcatcgtgcgtttcagacagtcctcgagtgatatggtcctgtcaggcttgttcttgtacgagattgccgcgagaccgtctcgtttgatgatatatgccttgagcatgagttcccacgcgttgcataggaagaacgcgcatccttccaccctgtacttgatggtcggcctgttgaacagttcgatcgcgaggatgaacgcctcctgcgatttctcagctagtcggtcgacctcggacttgatcgtgtcatgattgttcatctcttcctcctgcctgccctaatccctcggcgtctcctcttccagatcatggttcccgtccctgtccactccgatgattttcttccaatcgccggggaatcccatcggcgagaggctgacgcctgggtgtgagtcaatcaccttggcgagcctgcgcgccatgccgggccaatcatccggccatgcacgctggaaaatcctcatgatgatgacgatgcttgtgaacactcttttcgatgatccgccatgcttggtgttcagcaccgccttgtcgctgtccagtagtttggggagcgtggtcatcatgcggttatacacgcgcctgtgatgcgcgcagaggtttctcacgtatgtcaggtggcgaagccagctttgcaggtggactggcgagatgtcgaagtcgcctgcgatggcatcgcgaacggttctcccgtccgggtagcgtgccgcgtccgacaggttgccgtacatccgagagatcatgcccatggacgtgatctcgacgaccgcccacaacgggagcatgtgatatgtgtccatgttgtgtctgacgcatgggacgccttcgtcgtatgcgcggtcgcgttccttctcgatcgccttcatcgctccttcatgactggaacggttcttgaaatacactggattttcatacgccattgcggatccggtcgccatggacaggtgataggcgaacgaagtgcgggccttgatctcgatgcgtgagatggccgtccacagccataaccgcaattcggagtcaagaccgtagaccgactggatgtcgtcgagcgacgtgcctggcatgaacgtgtcgccgtgcttgaaggtgagccagtagccgctggccctgtaatagttgacgtcggacagccatgaggcagcgtcctcggtgtcgcggatatccatgccacgcgaagccatgatgccggcttgctcgatgaacgtcttcggcggcttcgggtagatatgaaacgaccccgcctggttcgctgcgccagaggcgctcgcgtgcggggtactgtcatgtgtcatattatcggctccttctcttgtctgcaagcggttcggcgtgtcccatggctgttacgcggaatcactgcctgcccgtcccagtctgttggggtttcggctttcattcagccggccggtgtcatttggtcgtgttggtctcggtgtagtaccggtaggccgagtcgaaggattcggtgaacaggaggcggagcacttccatggcgttctcatatgcggccttggtggacactcgtgatgtgctccagaacagggcgcggtagacgggcgccttgcgtttctcgaatccggtcggatcggccgcgtactcgtcgccgaagtatttggcgaacgcgaccttgtccgagtcgctggtgttgaatgccgcgagtttcgccgcgagggtactgagctgttggaggcgggtgagcgcgtccggcgtggagaagtaccccggcgtgtgcaaggacaggccgaacacgagtttgagcagccgcttcggcgagcggatcctgccgaccgattcgggcaggttcgcgatggccgtgatgccggtgttcaggtcgttgatgtggcgtgtctggtcggcggtgagcggcggcatgttctccacgaaggagatgacggccttgtcgctggagttgagctggatgcggtcgaaccatgtgccgagcacggagtagtaggtcttttcgagttcggcgcgtttgaatccggtgcaccccgtcttggcgaggaatctgtcggcgggtatcctggcgaagtactcgtacatcgggttgtcgggcagtgcgttgatgatttcgccggcgcggagtttctcttggttctgcaggaccttgaagtagttgcgtatctgggctgggtcggcggcctgcatggtgtagacggggatgttgtatgcgttgaagttcatgcggatgctttcgggcagttcgtggaaggacagtcgtttcgacgtgttcatgcgtgcgagtccgtcggggtcggagtcgccgacgattcgggtgatgatctccttggcttcggtggtggctttcctgccgagcctgcaccagtcgtcgtcactgccgatggattcgtcgatgttgccttcctccatgtaccggtagatggtggtgaggcgttgtttcccgtcgacgagttcctgccgggcgttgcgttcgttggggtggtcgaggttgttgatgacgatgttgccgatggggtagttgaggatgatactgaggatgagctggtctttgtattcgttggaccagatgtatccgcgctggtagtcgggggcgaggtcgagcccgttggcgcggacgttcttgatggatgtcatgagtgacatgatgggtagtgatgacggtgtgatgttgagtcgttggaataccatgcgcgctccttgctgattgtgttacctgcatccatgataacactgtagattctataggttaaaacgtttcagaatctacagcatccacactgggaacgccgacaagtcaacagtttcgcgattgtgtgcgagaacaagcaacactaagaatctaaagcatcacgacatgtcctagtccctcggcgtttctgcttcgatgtcgcggtcgacgtcggtgttggcggcgagcgtcatgatctcggctgcggtcaaaggcgcatcatcgcccgcctggcaatcagtcgtcggcccttcgctgacaccggcaacaggccggcgctcgccatcgatggagatcgactcgtcctgtatctctgggtcatgtgataggcgttccgcgtcggcgattattcgagagagtggcatcctgagggctgtagcgatctacgtcttgacgctcatcgccagtgtcatcggcctcggattcatgtgcttcggccaccccgacatcggtgggttcatctcgaccgccgcaggcatcatcgccgccggattcggcgtcgcctacaacctagtccgcatgcaatcatgagctgaacatcacgcgaaaaacggtttaaaacgctgaaaaccgcgaaaaccactgttttcgcgcgacattcatcaatcgaagacgccccgcactctcaaacatgagggtgcggggtgtcttcgtgttttctgcgtgtttacttgtcgagcccataccgtgacaacattttggcaacattttttagaaaaagacgtgatttccgtaatctcgataaacgtcgaaaacagtcgaaaaccgttgaaatacaagaagagccgcaatttcttgcggctctggaaaagtggagctgcggggaattgaaccccggtccggtgaccgtaccctcagtcttctacgtgcgtagtctgctggccgtgcggcagtttttctgcccccatcgatgtcgcagacaactgatggcgagcatatccgcagaaaaagtcccccagccaccctgcggtgcgatggccggagcaagtctcctaaacgacgctcaacatctccccgaagacgagggggagtgaacggagcggctgctcactggttaatcctggcgcgaagctcaggcagcgagagcaaactcagtgcggttagatttagcacttattgtttcgcggagggcatcacgagtggactccgcgttctcggcacgcttccctgcgacgaacaggttaccgtcgaaaccgatcagcccctttttgaattatcaaaccccggaatagaccggacttttcagtatacgacattttgtcgttcggctcaaatcggctgcgagccgaaggcgtcggtgatacgcgaggatgatggcggcgggcggtgtgtgaactcggaatcgaagacggaacgtcatgtgggacggcgcccgtgcgatttccgtcatgattatcctgccgtgattgtgcaatttgaaaccgtgcggcagcgcgcgacggaatccgtgaaaccgagcggcggatgccaaggaagtgcctgtgtaatctcccgccataatcctgcgatagagtgacggtatgagaatcgtgttacaacgcgtaagcgaagccagcgtcgacgtgatcgaccccgctacgaacagcgtcgatccgacgttcgagaagcgaaccatcggcacaggctatgtgctgcttgtcggggtcgcggatacggacgggcagcgggaaatcgactggctggcgggcaaaatcgccagactgcgagtgttcgaggatgccgacgggcgcatgaacgagtcgattacgcagcatgacggcgaaatcctctccatttcgcagttcacgttgtacggcaacattcgcaaaggcaaccggccgagcttcatcgcagccggtgaacctgaacacgccaaacgagtgtggctcgccttcaatgaagcgttgcgggcgcaaggactcaccgtcaaagaaggacgattcggcgcgcacatgcgggtgtcgttggtcaacgacgggccggtgacgctggtggtggacacggcggaggtgttgggggagtaggggggggcaaggcgtttgagttggcggcatgtggattgttactaatgtgttcatagcgtctcgtttcttgaacggcgttccggaatgaggcaatgatgggctgactggagcaaacgcaaagtaaagagaaaacgttgaacgatgctatagtgattggcgggaatccgcgctttccgtagtgtgttccccgcgtatgcggggatgattgcttttcatcaagatgagtgaaatctgcggaaacgacaagaaaacgaggaaacgggaataacggcaagggctccgaatagaccaattatccggagcctcagtcttgaccatatagcatgaggcgaatatgaacaagcaatcaaagacatggtgcacgctgtcggctgtcgccggcattatctccctgctcgccggcatcggcggcaacccaatcgccgcggggctcgccggactgtcagccggactgctggccaccacttccatcatcaccgggcgtaacgcatgaaacggtatctcagcctgaccgaggtggcgcagcggctcggcgtcatcaaaggtgccttggcacgatacaaactgccggagccggacgcggtcgtcggcagcatccgcgggtggagcgagcagacaatcgatgattggaacgcagcatgccccggacacggtggcagaccatgcaagaccgcgtgacaatgtatgaaacgcctcgcatttggtgaacgtcacgagagaagtatttccgcgcatgatgggatgacacaacgtatgcggcgtatgttctttccatgggtgttccatagatagaaggacgtgctcgttagcacgttcaaggacagaaggtgtggttgattcgctcgttgctggtgtcgttttgtgtgatgctcacggcatgtgccgattcatgaacccgcagaatggagatgacaatgtggcacggtactttttcgcgcggtggaaggggaaacgactatcatgagaatcgacgattgcgagatgaacatcccggttattcgcaagctatgtgaggaggcgacgtagatggtcacatacgagcaggcgtgcgatatcgccgcatcagtattccccgagtcaccattatccgatgcctttgagtattcagatggctgggtgttcaacacgcaggctcctggctggatggagggtcagctgaaagacgagttcggcgtgtcaatcatcgtgcacaaggccgacggcgagtggaagtactgcgacgtcggtaacccggagttcttggatatccttggcataatgaagcgtatcgccttgcctgacaagtacgccgcgatgatccgccccaagcacaatgcaggatagacaacctgcagaaccaatgtctctatctgcctacgggtggcttttgcattactcggcccagtgcaatgcgcttgcatactcattccggggagagaaacaatagcccgtctcggtaccacctacaggtggtaccgaggcaggctctagctgaaggatatcaaatattcgcatgctggccaaacttcccgtttcaacgtgaaagtgtgatatccccggtcagaggttgtgggttgagggaatgatttctggccccgggaagatgttgtgctgatgccgtatcactgccgcctgatggcgagcaacctgattgtagtcggcaggctccgtttccgtggaggattggataatctgccggttcgtgggggtgttgtcgttatttcatcagtgaccgggtgctcctgtggaatcgtcgtggaacctgacgatgcgctcgccgctagggccgtgtgtacaacaacgacagctagtccgtgccctgccggccggttgacgagccggtgggtaggttgactttatgacgattcgcgtagctcgtgctggtgggtggcaacgggaaccgcagtggtctattgtccgctgttgtttgctcaaagtgtatgcccgagtgacatggacgcaggaggggttcgacgaaatcacccggctggtcgattgcacgctattgagagtcctcggatgtcttcatgccggctcaatcgtggggcgagcagatgaaacgactcactgtcaaggggatgcctgcccaatgtggattctgcatgatcagccgcaactgacaatcccgagcggtgtcgcacctcaaactagaaaacgggcggcggccgcatctgagtgaacggctgttatcttggtgaggcggccgcgcccgccaccagatgcaggaacatactccgaatgccggcacggcgaacagtcccgccgtgtatcgaatgctttttgggagcagccccgtgcattacagaaccccttcgactctccgattgtgatgcaacccggccatcgcccgggctccataacaatccccgcgcaacccaccacacagggcacaaacccacgccagcaagactcgacatgacgcagcactcgccccgcgcgaggttcctggctgggatacgcggcagaccaaccgctaatcactccattggcgaagggcatcttcgaggaaggcaaggaagtccccatagcgcacggcatcgtcgaaagtgccaccctcacggttatagaccaccgtcgcctcacccttcagactcacaagcacgaggtcggtatccggcatcattccgacgacaagccagccgccctcgggtgtataaggatcatcgagctccagcagcggcggatggacgacgccatacagctcgatgccctccggaaagaacagacgcccgccgtcgctgatttccagccagcttctgaacgacacgggaagcacaacgccattgctgcgctcgaattcgcaaatctccgcatcggtcgcaccgggattcaactgcgtcccatccagctgcgtcagatccgcggcgatttgccgcagctgcgtcctctccctgtcggtgaagccttcctctgtgaccatgtctgctctcctcaagacgcaacgaatcagattaggattacgtaacgcttccaatggtacatgagcgatgtcgttccagacgtcatcccgttttcaaagtgaaagtgcgatatcccggtcatggctggtttgaaaggaagattacgggtttcagagaggtgtcgcgttgatgttatcctgcagtcatttgtcggcaggcaagcgggatattatctacagactgcatatccgcaaagccggatagtacgcccgatagtggtggtattcggtcgcagctcgtccaccgtcagcagcgagttgaggtgcaacctgtgaaatccattcaacgagaacaagtcatgccacttgtgatgtccaacgctcctgaagaccgtgcggaatggataatgaaactgttcacatctacatgtgcacaaaaccaagggcacgagcttggatgatatgacttaggacgagtttgacgaaatcgcctggccgattagcaacacgaccttgaagatactcggctgagaagcgtcggaaagcagatgaatgacttgccaccaaagcggcactcgtctctggatgtcacgtacgatcaacccagattctgacacccgtgcgatgttgcaccgcaaacagaaaacggaggcagacgcgacagaggtgttggggaagtgaagcggaggcaagtcgagcttcacgattttggatattgacgattgctgctgatgcattctcgcttgggagcagcgacagttgggtgaggtggcggaaaaggtcactgaaaagaattccgggctggcataccagcaggtccttacgaattcagcaactcatggaattgttagacagagtgaatacttcgaccgaattgtcgccagcaagaatcacctcgatgcatactatgtggtcaatcccaacgattacgtctacaatccgcgcatttccaaggaggctccatgcggcccaatcaataggaataccctagagctaacaggcattgcgtcaccgctgtaccttgtcttcagggtctcatcacaatcttttgcatacgaatttcttgaccagtacttcaagacagccaagtggtttaattacatgaagctccaggggaattcaggcgcccgctcggatagattcaccatcgcggataccgatttcttttcaatacccgtccgaatctcctcactccccgagcaacgctgcatcggcgagttcttctccgccctcgacaaccttatcgccgccgccgagcgacagtattcgcatgcttgccaaaaatctcgagattgatggagcattgatgagtataaaagaacccgcgccagtatcaccagcgaagtttgttcgccttaaaggtgttaccggaacgggtcactgtattcatgctatcacgtttgcgacgcgcaagccaaacccccgttttcaaagtgagagtgtgatatcccggtccaggttgttggttgaaggagagattacaagtcccggagagatatcgcgctgatgtcgcccacaccagttgccggcagacgggcgggcgtgatcaccaggttacatccacgaggagcggacagtacgccagatagcggaagctgtcggtcgcagcgcgtccattattggccgcgagttgagatgttgcccgtggggcccgtcgatgagggcaagtcgcatcactcgcactgttccgcacaactgaagaccgttctggataatgggcaacgataccttctgcacctacgtgggtacaaacacacaagcaactccagaccccagccacgtacaagcaacctccaaccgcgtcccaaggcaatgttgcgcttcaaactagaaaatgccgtggcgtgtcgtacttgtgtagcgcgatatactaaaaaagctaattctcagtaagtacagcaatttatagctgtatctgaatgctaagcggttagccgcaggggagagcttcggctctccccgttcttttctagtcgcacgtgacacgccataggtagattgcctgtgagcaactcgagaatagtagtattcttctctgtaaaacgagacatcgttgctgatgactccattgacaaagaagggaattagcatgtctgataagacatatcgtatcggtatcgacgttggtttgtactctgttggcttgtctgccattcaggtaaatgatgatgacgatccagtaagaatactgaacgcacagagtgtcatccatgatggcggtgtcgatccgaatgctcagaaaagcgctgatagccgacgtgctcagtctgggattgcccgtcgcacgcgtcgtatgcgccgtaataggaagaaacgtctgaagcgtcttgatcaaattcttgtggaatctggtttccctgtgagcagtgagaatgatcttgaaggatttgaaccgtggcttcttagggcgcaagcggctgatgccttcattgaagatgaggatattcgcaagcgtgcaatttcggtttcatgtcgccatatcgcgcgccatcgtggatggagaaatccttatttggatgttcgaacgctgctggcggttgactcgccttcctcggcattctatgacaagctcgtggagaatgctgctcttgaaatggacggccagatgcctgacagcgatgccacgccggcacagattgtgcgcgatgtgcttgagtacaagcgtggtgaagctgctatccgtcttcgaaagtcaacggctgagaataagaaaaatcgcctcgctttgttccctgagaagatgatgcaggatgactatgcttatgaattgcgtttgattctggcgaagcaagcggttcccaaagatatcgctcgcaagctcattttggcggtgttccaatcgcagtcgccaaaaggttctgcggagaagcgtgttgggaaagatccccttgatccgtctcagcctcgggctttgaaggcttctctggcattccaagaatatcgaatattgaatattcttaccaatctgcgtttgcaggatggtggcgcggagcgtcgtctgtctattgaggaaaagcagaagctctacaagatgctcgtggaagatacgggtcgcgaaaagaagtacgagacatggacagatatcgcatcggccatggagtggaagcgaaattggctcaagggagttgggagtttgacggccgatggcgatgaccgagtcactagtcgccctcctcatatcgatattgtagaaaagctcaacggcattaaggatacgaaattcagaaagagtattttgtcgtggtggaaatctgcgactgatgtcaaccgtgaagcgatgattgccctgctttccaatacagtcgatatcgccaagaaacaggatgacccggatttctcatccgccgtggatttcattgattcgatggatgatagcgatttgcagattctcgataccatcagcattcagcctggtcgtgctgcgtattcgtcgaagacgttgcgcgcattatcaaaacgcatgtattccacggatgacgatttacacgatgcaagaaagcatgtttttggtgtagatgattcatggcgtcctccacagcctgcaattggggcgccattgggtaatccgtcagttgatcgagtcgcgaaaattgtcaatcgttggcttcttgcatgccagtcccggtggggaaacccgttgtctatccaaatcgaacatgtacgagatgcgttgtcttcggcagcgactgcaaccgctgacaagcgtgcatatgaacgggcgttaggcaagcggaacgccgagaaaatgaaagtcaagaatgagcttcggttgcaaggactcaatgaaccgcatgaatctgatgtccggcgtcaagaagctatcactcgtcaacagggcaaatgcttgtactgtggcgatgatatcacattcagtacctgtgagatggatcacatcgttcctcgaaaggggcatggctctacaaatacgcgcgataatctcgctgctgtatgtattcagtgtaatcggcagaagagtaatacgccgtttgctctatggtgccagactccagaggcaaaaagccgcggcgtgagtcttgaagctgcaattcatcgcgtgaaaggtttcttcaccgaatcgaaggagctaacagggcggcaggcgaaggttttcaccagctcgatgataatgcgtttgaagcagacgacagctgacgatcctattgatagtcgctcgatagaatcggtggcatggatggctgatgagttgcatcgtcgcatcgattggcatttcaatggagatgcctctgaaagcgaccatggtcgtagagtgctggttgctgtataccaagggcgtattacttctgaagcgcgcaatgtcatgcgtttccaagcgggtggtgatttccactttgttggcggacatggcaaaacacgcctcgatagaagacaccacgcagtcgatgcgtcggtgattgccatgatgactcctgcggcagcacttacgctggcggaacgtatcaatctccgagatagccaacggtgcattggacgtataagagagggggagattgactggaaacagtggcccaacgagcctacagaaaaatatcagcattggcttgataatgggaaacgcctcttcgcattgatcaatgatgcgctggataatgaccgtattccaataacccattggcagcgctatgcgttgggcaattctattgcacacgaagcaacgattcaccctctgcggaagattccactgggcagtgccattgattatgagacaattagtcgagctgcaactcctgccctgtattgcgccttgacgcgttgcccggactattcggtgaatgatggtttgccggagaacaaacagaggcatattacagtgaatggcaaagtttatgggccggaagatgaggtagcgttctttgcttctgaccatgtggagcttgctgtgcaaggtggttcggcagatattgggaaaactatccatcatgctcgggtttaccgttgttactttgttgatcgtaggggacagaaaaagtggttttacgggatgattcgtgtcttccgagttgatttgatacatgcaaggcatgagaacctattcacttatcctttgccctctcaatcaatatcaatgagatatgcggaaacaagaacggctgaggcggtgttatgcggacatgccgaacatgtcggtaacctggtagctggagatgaaatcgaagttccaatgattggaaagctgacaggcaaaatcgatacgtttgcaaaattctttaatgaatctttgaataatgaatatgttgcagaacggtggagcattgatggtttcgatagtgaatcgaagttgttgcttcgcccgctaatgctggctgaagagggcatagcgaattgggaagataactctcacttatctattcccgatgatgtcaagggactcattgctagaggctggcggccatcggtggacacggtatttgcgaagaaaccgcggattgtccgtcgaaatgtcctaggagaacccagatggaagtcgcgttcaggcatgcccgtttcttggcgagtcacaggctctgaggcataggagacatcaatatggagagcgcttggcgtgttatcgactgtatggatgttgaagggcaacttcggtacgaacgcgggcgcatggtggtctgtgccgacggtaaggaaccagtcgaggttccgttggcacaggccgccgtacttctacttggtttgcgagcaaacatctcaacagcgctgttatttagattggctcaagaaggagtcagtgttctgttctgcgattggagaggcgtgccgactggtgctcttgatagttggggatccactccttcgcgtgtcaccatccgccattgggcgcaggtggacatgagtgtaccgcgccagaagaatgcatggaaacgtattgtaaaggcaaaaatacgagggcaggctcgttgcctggagatgtgtggccggcagcggagtggagcgcttctggaaatgtccaaccatgtcaagaccggtgacgtcacgaatgttgaggggatggcagcccgagaatattggaagaacttatttgattctgacgaaggattttgcaggacgccaggcagtggtatcggtagaaatagcttgttggattacggatacgctgtactgcgaggtttcgtaattcgttctattctcgcggcaggacttgatcccacgtttggaattaaccatcacaatcgagcaaactacttctgtctggcagatgatcttatcgagccatatcggccagtagtcgactgctgtgtggcacgaatggacgcgtctgttgaattggacagggatacaaagcggcagatcgtcgaagcagtgaacggccggttctctggcgatggtttgactgtgcctagttctctgaacgattttgctcaacagtatggtctgtattgcgaaggccagtgcgaagtgttgagagtgccggtatttggggctgaccatgaagaaggatgaggagagtgacgggatgtggtgtgtggtgatgtttgattttcccgttgaaacaaaagctcagcgacgagcagcgacccagtttcgggatttgttgctcgaccaagggttcatgatggttcagttttccgtgtatgcacgatacacgccaactctcggtggcaatcggacgagcatggagttcatcaagcaaaatattccagctaaagggaaagtccggattctgaatctcagtgatcatcagtgggcgaaatcttttcattgctatgattcgcaagctgacgatcccaaagatgggccgacggctccggacgctctgacacttttttgagcggaaaaatgtctgaaaacgttgagattccttccttcttggtgggctatcaagtctatcaagaaggaaggatgctaattctcagctcgtaagagaaatggcgttgcctatcagcaagtctatcaagaaggaaggatgctaattctcagccctggacttgtttgagctggtcggctaccaagtctatcaagaaggaaggatgctaattctcagcttagggtgtgtctgttgacggtcggtcgcaagtctatcaagaaggaaggatgctaattctcagccgtaccgggcgacggtgatgctgtcgtccaagtctatcaagaaggaaggatgctaattctcagcgttacggaaagaatcttaagacgattaccaagtctatcaagaaggaaggatgctaattctcagcgtagttacggtaggctacccgccaatttcaagtctatcaagaaggaaggatgctaattctcagccatatatgcgcattactggcttgcgggacaagtctatcaagaaggaaggatgctaattctcagcgcttggtgctgtagcttgcgttggttggcaagtctatcaagaaggaaggatgctaattctcagcgaaaatcggtagtggtatcagtgttgctcaagtctatcaagaaggaaggatgctaattctcagcctgacatactcccgcgtcagcaggctttcaagtctatcaagaaggaaggatgctaattctcagcgacttacacgattcagtatttgaataatcaagtctatcaagaaggaaggatgctaattctcagcctggcaggcaagtacgcttgttgcgtaccaagtctatcaagaaggaaggatgctaattctcagcgagaaaacactgactcaggcggttgggacaagtctatcaagaaggaaggatgctaattctcagcgctgacggcatccccgtcacgacaccatcaagtctatcaagaaggaaggatgctaattctcagcctacgacacccccctatagtgacttgtgcaagtctatcaagaaggaaggatgctaattctcagcgacgtggacgtttgaccatgaagacattcaagtctatcaagaaggaaggatgctaattctcagctcaggtctatggtgtcgtctctcgtgggcaagtctatcaagaaggaaggatgctaattctcagcccttggtctgctcccccagcatgcgccgcaagtctatcaagaaggaaggatgctaattctcagctccaacgcgtcgggtgatgcgaccatcacaagtctatcaagaaggaaggatgctaattctcagcagacgcacgtccttacgtgcggcctcaacaagtctatcaagaaggaaggatgctaattctcagcatcagtgtcagtgtttctttcttagacccaagtctatcaagaaggaaggatgctaattctcagcgttcgtgctacggaggtttgctgatttgtccgaagctcgcatcaagcatggagtactgcacttgagtggttccctgactcttgtacaatattcgaaacgatgttgaaggaggccctgtgatggttgagaacagtgtcgctgctagatatcttaggctgtgccgagagtacgagcagaagtttggcgagcgtatatacaactgcatcgggatcgatggttacacaaaggccgcctgtgacatgattgaacgttgcatccagcgtggcactccatgcaatttcacgaccgatctcggattgtctgactgtgacggcgtcgcagcaagatacatcagtctgtgccgcgagtatgagaaaaagttcggtaggaggattgatactgctattgaaatacccagatacacagaggccgcatgtaatatcatcgagcgttgcattcgacgtggcactccatgcaatttcacaactgatctcggattgacttcagaacaagcgaaagaagtgatgttctaaacatcaaagccgccttgggtggcttttctattaccagccccgcagattctgtggggcctcgcattgtcggccggaggctagtgccctacacgcggcttctcttcaaaccactgcatcgcttccgccgcacgccatggtgcgatccctttgccggccgcgaaacccggagccgcacagccgtcggatggatgcccgcactgtcgacagacaaggagagaacgcgggtgcttgacaacaccgacagaacacaaccggatgccgcgcacgcgcaggatgctgcgaaaccagggactggaatcgcaacaagccattggcgagcgtgctcccgcgaatgcagggataattccatcatcgtcaagatggtcgaaacatgctggaaaggcaagaggaagagtgaataaacagcaaggggcttcgaatggccaaagcatccggagatatcggacccgaccataccgcacaaggcgaacataaacaagcagtaaaagacatgttcgtactggcaatggttgatacgctttccatggagttgccgggattctattcccggcacttcattgaggatgcgataataagatgtgggagttgtgccctccccacacggggagcgtggattgaattctacggatacgatgatgcaggcggccatatgcacggctatgggtggattcatgacaagcccgagttccgaggactgggacgagaagaagatcctcgacacgtgcatcgacacgatgagggccaaggcatcggccatcgcggcgagctccggcggcaggaaagatgccaacctggtcgtggatgacaaaccgatacgagtcgcgataacattggatacagataaataacaagggaagcgcatcacgtcgttcttccccagccgccgacgggaggtgacgcggcgtgtacaccataaaggagacggacgagctggcgcgccagctgacgctggcattatgcgatatcatcgagcaaagcaaattcgacgatgcccaatacaccgtcgatttttcccgtcgcctcgcggacgaagatgagtgggcagcactggaagctgcctcgtcttatatggagatgcatgatatcggtccgtcgccggccatggaattggcacgccgatatgacagagcgcttggatacgatcatgatgtcatcgaacgtctggaaggcattctcgagagaatcggcaaggcctgaaccccagttcttccttattccccatagccgcctttctggcggcttttctgttacttggccccggccttgtgcggggcctacacatatcgctctctgcacggggacatggattgaaatgccatggattcacgggttagaccggagacgttcgatcgttcctcgcacgggagggcagcatcagcgacgagcgtattggcgagccgtgcaagccttcgttgtctaaggcgcggcagatcgtctcggccagactatcagtcttagcgcatgacaccacggttgctgcatctgatatcatgaacggagcagcattcggcaaagtgcgcgaagggcggactcattctgataaaggttattgggatttggttggaaaacatttggcgacggaggcgtccgccgagatgttcgcggcacatatctcgagttcgcaggcgtggaggacggccatcgcacatttttctgaatcatgctcccatgttcgagacgatgctgaaggaggcgttatgacggcagcgaaactctaaatgagagatatgagcggctgtgccgcgagtacgaggtcaagttcggcgaacagatttatggcgcttttcaggtggacccgtacactgaatgggcgtgtgatctgatcgaacaatgcattatgcgtggaacaccttgcaatttcacgaccgacatcggattgacgccagaacaggcgaaagaagtggtgttctaaaatatacaagccgtcttcggtcggcttttctattaccggccccgcagattccgcggggtttcatgtttttggccggagtcggtgcactaacgcgtttttccaaaccactgcatcgcatccgcacgcgccatggtatgatcccattgccagctgcgaaacccgaagccgcgtggccagcctgggacggatgagcgggcaatagataaggaaagaacgcggacgcttgacagcgccgacagcgcgcaagcgcagaatactgtacaaaacagggacgggaatcgcaacaagatattggcgaacgtgtccccgtgcatgcggggattaactcatcatcaagacaatcgaaacccactggaaggacatgaggaaaattcccggcaattcattgcgaagattgtcgccgttcagtaacggcaagtccacgatgttgccggaatccagctcggcagatttccaaacacctacccccactcgttccgtcatcactcccgccccacctcactcccaccgcaccacataccccgcttcaaccttccaaccgcagtagtccaagataatccgctcccgctgtgatagccccgcaaccgcatcatcgggcaccaacacatgccgtccatcgccgatcggccgtgcgttctcccacggcagctgagcattgccgccggcccgatcgggccaagcaacaggccgcataccatcagaagcagaaccggcggtatgggccggaagaatccccatgccgctgaccgccatgccgctgggaaaatctgtgacatcaacgaaacctgtgaccactcgcagtcgcggattgaaaacgcgccacccggcacgcgtgcaacggtacagtccgttctcttccacaaggtccccggaccacaacaatacgttcacggcattcgcaacacaggtgccaggtatcacagttgatattccacgtgcataccgctcgacgcccgccaaccaatgttcggtgcgttctcgcacatgttgtggcgtcacgccatacgttccgccatacccatcgtcaatgcacgccgcttgaatctggaaccgaaggcaggagtacagcgttctcttccaacgtgatcgctcatcctcatgggggagcggaacaatccccaaatcatcggcaatcgcccttagcaaatcaatggacatgatgatgcccatccaacgctgtcagcaacgcctgaaccgtatcaacgggcccgattcttccgatcagcgcctgcgcatgcttcgcatcctgcgccgcattggcccgtaccgccagctgatactgtagccaggcgttcgcaccgccgagccccttggtggcggcgcgaaatgtggcgagatgtgccagcgatttcaagggaacggcatccgcaagcgtgccgacaagatcgtccagttcactgatgacttgcgcggaattcggcggcttgacaggggagacttctgtacaatgttgcaatggatgaggctccgcagacagcacaaccagatgttctgaaggaacaagcaacatgctctcccacacttccggggcgattaacgagagatttgcatatgcgcctactgggaagataagggtcttcttgatatcttgtcttgtcagagaaaacagtagcgcctcgcccacggtatccaagaccccatcaagcacaataatcgaggaagggcactgctcgattgcagcgagtactgaagttgagtcggtatgctcgcggcttgcatcaatcctgtatgcaggcatgccgccgattgcgaacgaccaagcatttgcgacttgcatagcgatatttgaatccacggcgaacaacgaggtcacagcgcggctgcgtgcgagcaaggttgcgaacggttgcaacgaaaccctcttctgcatggatctcacgccgagcatctccagattgtaagcgagcgcatcggggagaggacgttgggtgtcagtagtctcagcggcttgcatcgtgggaaccgtctgaagattcattggctgcgactggggttgtgcgacggcattgaccaccgttttcaatccaagtcgcaacgcagcatcctgcgacagacgttccagcgtctgctcggattgttccttcagctgctgcgtctcctgttcgatggacttgagctgttccttcgcataatccacttgctgacggtattgtgcttgccgctgttcgagggatgcgagcgccgcttccttgtttgcgattgctgatttcacatcatgcagccgctgttcttgccctgcgagcgtcaaagcgatgtggtctttcttgtcttgctcgtatttggcgtacctctcgtcgagctccgtgtatacgtatttccggcaagcgctagcgaacgagggatcgttcttaagaatttccccgatgagaagctgtggaacatcgtctgcatcgatgattcgcgcgagttgttgcttgaatgtatcaagctctgcggcatctggttcggtgccgaggaactctctcaacggttctggtgcggagaaagcggcggatagcaatgattctgcgtcgtcgagaagttcggttccgcgtgattgctcatgcttgaaataccacgagacatacgccgacgcataatcctcaagcgggcggaccgccactttttcgtgcgatttcggcagtgatgccagtccgaccagatagcgtctgcctcgtattgaatactcgtcatcatttggtatctgttggatatcgtgataatagacggtgcatatcggtgccgtgagcggagtgttgtcgcatatgcgaagcgtcgagccgacctgttgtagctgcgatttgaggaacaacgccgcgtccaccgaatcggcatcacgatgatggaatgcgatgagcgttctcggggcgagatttcccacgtgtggtattcctcggtgcgacaagtcgttgcggagctgttccagaccattgtcgtgaacatagtcgatgatttcgatgatctgtggggcatcgccacctggggtggcgaaggtgtcgtcgatacgcggtcggtcgggttcgtcgagattctcacgccacgtcagatatatgaaatcgatgtcatgatgttcgtccagatatttgaacagctttggactgtacaacgtgtcaggatcatcggctgcccggtgtgatgagtgacggtcggaagggcgatatacccattgcagagagcggttgccgtggtcattgtggtagtcgaaaagccgtgtaacctgctctggcgcttcagcatatttccgggaaaccatacagacggagccatgaatgtctcctccggtttcgtagtatctgctcatcgatgctgtgctcctctcaggtatgccgtggcgcttgtgcactgttgcgctatcagttcgtgtcgattgttggtgactcggcagatggcgatgatcttgcctcgggaattcttcggtaccggcgggatttcgtcgtctgtgcctgttgaaggtttctgagtctggtcatgctcgatatcctcagacgtgtagggggattgtgcgagccggagacctaatgtgggggcgaaatcgtcaatgacggagcaccagtggtgcaaagggccgggacggaagaacacacaatgaccgaccgtctcatgctcgaacgatacggtattgtcagcttgggagtcgaatccgatcagcgtgatatcgcggaaatcctgaccgatacgtaacacgttggcatggctggcatcaggggttgccgagacctgatagggagacgaatacatggggattgaataccggaagagcggctcatccgccccggacgattgtagaatcggcggccaaaggcattgcgctttgcgttcgtatgctgcaagctcgtagccgaaggagtccagccaatccgagacggtcgcccattcgcgtccatgggcggtgaaagcgatgcgatacacggtaagtgcgccatgtgatgagggaatagtcccggcgtaaccggtgtccactcctgtcggaggattcagcgagtaggtcgccggtgtgactacgaaatacgcgcgttcgggatgcagactactgcctggagcgagccgatggccgccatccgttccgaacgaatcgtcgaatattaggagcttcgcatcgtcgatattgccgacactggcaacatcctcgtttggaagactgatcagggtcgtgaatgagagcgaaggattctccaggcgtaccttgaacgatctgtatcgggaaaaatcactgagcgggtaaggcttgccctcgatttcgatatgctcgtccgaggttctcgccaaacgggacgggtcatatctgatgccaatctcaatgacgaaactgctcgcggatttccgtaggaacagcggaagcgggggaatccgatcggcatgaaagtctgtgattgcatcaacgccatcgtagaacgggcagtgacgggcgcgctcgtcattcttatgatgacggaagtgaggcttcatgctgcggatgacacgttggtatgagcggcgggcgacgatgttgcgcatcgcaaaagcatccactggtcttgagcagtatggacagacgaagtggatggtgtccggaaccgagccatggaattgattcgcaatatcttccgcggacacgaagcagggttccgctgattgcagaagccgtatcgcgccatccatgccgcaagcccttctttcttatcccttgattcctagcagatactaacacgatgccgggcggtgttttcacgctcgagtgtggtatgccatgcattctgtacccgctgcgttccgttgattccgaacgtcagggtagggcgcgatatacacccgagcgttcgccatcgtccgcacgtccatgtgctcacttcgctcgccgccagcccgcagcccttcgtccttcgtccacatgtgccgctcgtcgacttccgcccaccgacttctgcccgcccgcccctctg

SEQ ID NO: 557 - DNA, 23468 bp, synthetic construct
  misc_feature 1..23468: note = Synthetic
  source 1..23468: mol_type = other DNA
accgcgataagttcggcgaggtcgaaggcgtgaccgaccacgacttctacacgaactcgttccactacccggtgtggctgcagcccacgccgatggagaagctcgactacgagaaggacttcccgtactacgcttcgggcggcttcatcaactactgcgagttcccatgcctgcaggccaacccgaaggcgctcgaagccgtgtgggattacgcgtacaacatcggcatcggctacctcggcacgaacacgccgatcgaccactgcttcgaatgcggcttcgaaggcgacttcgagccgaccgaagagggcttcaagtgccctgagtgcggcaattccgacccggacaagtgcaacgtgacgaagcgcacatgcggctatctgggcaacccggtgcagcgcccgatggtgcacggccgccatgaggagatcgcccaccgcgtcaagcacatggccggcgagacgggccgcgtcacgctcgacaacggcgaaacgcgcgaatggttcgaggagaccaagtaatacacgcagcgcatagcgcgaccggcagggcggcgcatccgcggtaaacgcgggatgcgccgccctgcgtcatgatggatgcagatcgggtagaaagagcaggaacgcatggtacaggcaggcacacgccacgatttcgtcaagaccaaggaataccgggggccgtcggtcccaagcccgttgacgaacaacccgcgcgcggggcagtggacgaatgcgatgagccacaacatgatcgccgactacaagcggttcctcatgaccgacggcgagggcattcgctgttcgttgtatgtctcgggctgcccgttccactgcgaaggctgctacaactcatcgatctgggatttccaggcggggcatgaatacaacgaaaggctcgaggcgcagatcatggacgacctggcgcagagcttcgtgcagggcatcacgttcctcggcggcgaaccactgctcaacaccggcgtgctgctgccgctcgcgcgcaagatccgcgagcgtttcggccatacgaaagacatctggtgctggaccggctacacatgggaggagctcatgcgcgacggcgagacgcaagacaagctcgacctgcttcatgaaatcgacattctcgttgacggccgctatatcaagacgttgcacgattcactgctgcagttccgcggttcgcgcaaccagcgcattctcgacgtgcaggagtcgttcaggcagggcaagccggtggtgtgggcgaaactgcacgaccaggagcgtttcattcccgaaatctacggcaaggagcgtgccgccggcgaaggcgacgccagctagtccgctttctgcgcctgccggtcaatccacgcgttcaccgcgttcgtcgcctcgtcgagcgtggcctgcgccgccttgtaatagcgagaatccttgatgcccgactcgtcgaatttctcctgggcgaggtcgagcgccgcttcgaatcctgcggtgagctgcctaccgaccgcggaatccgcataccgctgcttgagcgtgtcgagcagcgcgcgcccctggtctatggcctcctgcagattcctcttggcctgcgcgacgtcctcggtatcggaagacgccgcagattccgactcgtcgccagtgttatctgtgtctgcagaggcaccgcgcacgatctgcgcggtcgatttgcgcaatgattcggttgcactgttcagcgtgttcgccacgagattgagctgtatgatcgtcgcgttcgccgcacacccctgctgtgccacggtgccctccgccgcgctcgccgcatcggctgccgcgtcgagaatcttgtcgacgccgagcgcattacgcaccagcttctgcaacgccggcgaatcgctcgtcgtgtcaagcagcgccttgcgtgcctcgctgaactcgctgaccgccgtctggcagcgcgcatacgcctcgtcatgcttgttcttgtagatgatgccgccgaccacgccgcccacgatcgccaccacggtgatgattgccacgactacaggccacctcctcctacgcttgcctccatccccgctctctggttgataattcgcctgctgataggagggcgcctgataactcggcggcgcatacccctgctgcattggaatctgcgtggtgggcatgtcaatccgctgcgtcggtcgctcgacgttggaatcgctcatcgtgcacctcgtttcagtcgaagaatctgcaatcatcttacctataatcagatgtgcagattcctacgccgcaacgagtgtgggagactcacgcgaacaggatgagggccacgagcaaggcgatgagcgtgagggcggggaagaagatttgcttgatggcagccgaatgcttgtctggcgcggtgcacagcagcacgagcgcggcgcagaacatcgaggcggagccggcggtcatgagtgtcacgcctaccacggtcacgccgcaccataggacgatggcgccgccaatggacatgatggccagaaacaggttgtagaagccttggttgaaagccatttccttggtctgttcagcttcgtcggcacccatcgagaaggtctctcgggtgctgcgtgacgtccacaggaacgattccatcacgaagatgtagacatgcagcaggcccgccagcatagcgaagatggaggccgtgatcaatgcggtgttcattgcttgtctccttcgtcggcttcctttgcggcttgcttcgcagcttctatggcggccaaatactcttccgctgaaccccctacggcggcgacgtcgtctggcgtggccatgccgttgttcgccagcgcgtccttcttgattttcacctgcatgcggcgctcggccgaggcgcttttgaggaataggaacatggcggcggccagtgtgaacaccagcatggccggcggccaaatggtcagtgtgatcattatgcccacgatcttgattgcgaggtcccaggacaacacattgaggcgtactttcatcaacgccgcgtaatccttgctgattaccttgagattcgcccgctccagacgccagctcaacgcgatgttcgtgatcgtgagcacgatgacgtcgatgccgtagaacgcttgcgcggtgctgctatagaaattgccagccaccaagctcgtcgaatacgggatgagcgagcagaagaacaatagtgtgatgctcgtccacaacaccggctggtcgacgagcttaacgccgctccattcgatgtgcaggtgcacccacatcgatcccagccagaagaacgagaacgcgtaggccagaaactgcggccacaacttcccgaatcccgaccacgtcagcggatccggtttatccaaatccaacacgagaatcgtcatgatgatggccagcaccgcatcggtgaacgccactactcgttccttgctcatcgcacactctcagaccctgcgactacctatcatctctccatcttagcctatcctcccgcggcccgctcctgactattctcactgcttatttccacgcagatttccacacctgcgcacacggtgtggaaaaccgacaaaccatgccgaatgtcgtgactatcggtagggacgattcggtagaatagtgagattatggctgccagcacgcgagaaaacagggctcccgcttccggcatgccaaccaaacttgaataccgcacgaaacacgaggtaatgatggcttctctggtgcaagaaccttcgtcgatctctcggaccctcaacaccgaaccacgcccgctgcgcataggtctggacatcggctcgaccacggtcaaggcggtcgtgctagacgattccgactccctcgatgccaccctgttcgcagattaccgtcgtcatcatgcgaacgtgcgcgcgacgatggagggattgttgcgtgacatccgtgcccatctcgccgaactgggtcgcgcagatgagcccgtgcgcctagccatcaccggttcgggcggtttggcgctcgccgatgccgtgcatgtgccgttcgtgcaggaggtgatcgcggagacgcgcgcaatcgacgaggcgatcccgcaggcggatgtgatcatcgaactcggtggcgaggacgcgaagatcacgtacctgaagccgacccccgaacagcgcatgaacggctcgtgtgcgggtggcaccggcgcgttcatcgaccagatgtcgacgctgctcgacaccgatgccgccggtctcaacgagatggcgaagtattaccagacgctgtacccaatcgcatcgcgctgtggtgtgttcgcaaagacggacctgcagccgctcatcaacgacggtgctgccaagcccgatcttgccgcgtcgatcttcaccgccgtggccacgcagacgattgccggcctggcttcgggccgtcccattcacggcaccgttgtgttcctgggaggcccgctgttcttcatgagtgagctgcgggaggcgttccgccgtgcactcgatggcaaggtggacgagttcatcaccccaaccgacgcgcacctgtatgtcgcctacggtgcggcgctcgccgttggcgagcccggccagatcgaacatgccgacgagtacccggcacggtcgctcgacgacattatcaatgcattggaggatctgaagaacctgccgtcgaacacggccacgatgccgccgctgttcgacaccgcggccgaccgtgacgcgttcaatgcgcgtcatcaccgtgagcatgtgcatgtgggcacgctcgagggagcccgtggcccgcacttcctgggcatcgacgccggttccacgacgatcaaggcgaccttggtcaacgatgaccgcgagatcgtgtggtcgtcgtatgcgacgaacgatggcagcccgttgactgcggcgatcgagatcgtcaaacgcatccagtccgaattgccgagcgatgcctggatcgcacgttcctgcgctaccggctatggcgagggtctgatcacgaccggtctccatctcgacgagggtgtggttgagacgatggctcactaccgtggtgccgaaatggtgagcccgggcgtcaccgccgtcatcgacattggcggccaggacatgaagtatctggcggtcaccgacggcgtgattgactcgatcgccgtcaacgaggcctgctcgtcggggtgcggctccttcctgcagaccttcgcacgctcaatggggctcacgatcgaggagttcacgcaggccgccctgaattccgagcatcctgtggatttgggctcgcgatgcaccgtgttcatgaactcgagcgtcaagcaggcgcagaaagaaggcgcgagcatcgaagacatcgccgccggcctgtgctattccgtcgtgcgcaacgcactgtacaaggtcatcaaactgcgcgattcgggcgagctcggcagcacggtcgtggtgcagggcggcacgttcctcaacgacgctgtgctgcgcgcgttcgaactgctcaccgaacgcgaggtgacgcgccccaacatcgccggactgatgggcgcctatggtgcggcgctcaccgcgcgcatgcactacgacgacatcgccgacgacaccgacgccgccggcgtgcacgtggcgcgcatcgacggcgtggaccacaccgtctcgagcatcctgcacggcacggccctcgacgagctgtcgatgacgaccgaacgcgacgtgtgcaaactgtgccagaaccattgcaagctcaccatcaccacattccacgacgggtcgcgttacgtgaccggcaaccggtgcgaacgcggcggcgacgccaaacgcaaacgcagcgataggcccaacctgtacgacttcaaatacaagcgcgccttcgcctaccgccgcctgaccgataaaaaggccacgcgcggcgagatcggcataccccgcgtgctcaacatgtacgagaactacccgttctggttcacgctgctcaccagcctcggattcaaagtcgtcatctccgggcgatccaaccacgaactgttcgaaaccggcatcgaatccatcgcgtccgaaaacatctgctatccggcgaaactcgtgcacgggcacatcaagtggctcctcaacaaaggcgtccgcacgatcttctacccatgcgtctcgttcgaagacgacctggtgcccgaagccgacaaccactacaactgcccggtcgtagccaactaccccgtggtcatcggcgccaacatgcccgaactgcgcgaagacggcatacagttcatgcgcccctacttcaacctctccaagcacagcctcatggtcgaccgcatcgtcgaggaattcgcatgggccggcgtgacgcgcgaggaggccgaagcagcagtcgccgccgcctacgctgaagacaccgtgttcaaacacgacgtgcagcaggaaggcgtgcgcgcgctcgcctacatgaaggagcacaactgccgcggcattgtgctcgccgggcgcccctaccacgtggaccccgaagtcaaccacggcatccccgagacaatctgctcactcggcatggtcgtgctctccgaagactccgtgagctggctcgaccccaacgacgtgcccgcgctcaccgcatacctcgccgaagacgaacccgacccggccgcccacacgagcgaagggttccggcacgtcaacgaccgcaagctcaccaccatgccactgcgcgtgatgaaccaatgggcctatcacgcgcgcctctaccgcgccgcgcagttcgtggcgtcgtggcccggactcgaactcgtgcaactcaactcgttcggctgcggccttgacgccgtgacgaccgaccaggtgtccgagatcctcgccgacaaagcggacgtctacacgatgctcaaaatcgacgaagtctccaacctcggcgccgccaaaatccgcctgcgttcgctcaaagccgccgtcgaggaacgcgaacgcaacgcccagcgcgccgtggcgcccgcagctggcgccggcactttccggcacaccggcaccgcagcgcccacacccggccggcagattctgctcgacgccgtcatggggcggcaagccggcgccggcgcccagcagaaccggcaaagcgccaccatgagcgcctacgccaaccgcgtgcccttcggcaaggacatgcgctgcgactacaccatcgtggcccctcagatgagccccatccacttccggctcgtcgaagcggccatacgcgcctccggatacaaattcgacgtgctcgaacatgccagcaaaaccgacgtggagaccggcctcaaatacgtgaacaacgacgcctgctacccggcgatcatgaccgtgggccaactcgtggaggccatcaaatccgggcggtacaaccccgacaccacggcgctcgcgatctcgcagaccggcggcatgtgccgcgccacgaactacttcgcgctcatccgcaaagcgctcgtggatgcaggctacccgcagatccccgtgatcgcgatttccacgcaaggttttgtggacaatcccggcttcacgcccacggtgccgttgctgcaccgtgcggcgaagtcgctcgtcatcggcgacctgcttatgaagtgcctgtaccgtgtgcgcccgtacgaggcgaatccgggttccgcgaaccgcctatacgagcggtggaacgtgattgtgcgcgagacactgctcaaccacggcatgtcgaagaccgcgaagatgttgtacggcaacgcatactggccgtatgcgaagctcgtggcgaagatcgtggagaccttcgacgcgctgccgctcaaggacgtcgaacgcaaggtgcgcgtcggcgtggtgggcgagatcctagtgaaataccagcccgacgccaacaaccacgtggtcgacgtgatcgagtcgcaggactgcgaggccgtggtgcccggcatcatcgatttcatgacgatgcgcccgtacatcaacgactggaatgagcgcaatctgggcacggggcgcaacaaggcgctgtacacggcgttcaaaggcgtgatccacgcctacatgaagcctgtgaacgatgcgcttgacgcgagcagtggcaaattcgagaaagacctgccgatggaccagctcgtggccaaggcgcagaccgtcacgtcaatcggcgtgcaggccggcgaaggctggctgctcacgggcgagatcgtggagctcatcgaatcgggctgccccaacatcatctgtgcacagccgttcgcgtgcctgccgaaccatgtcacgggtcgtggcatgttcggcaagatccgccgtctctacccgcaggcgaacatcgtctcgatcgactacgaccccggtgcgagcgaggcgaatcagctcaaccgcatcaaactgatgatcgccgcggcgaagaagaacgccgcagcagtccgcaacagtgcgtgatttgtgcacattatagggattttttagaacaaccgcgccgtgtccccatgcgcgcgcgttagtatgggcacttatgacagcaccacgagtttcctacgcgcacctgctggttcagccgaacccacgccacgtgcgcagccttgtccgcttcttcgaggaggggtgctccgcgccggggaccgggggattcggcgtggagatcgagcatctgcccgtgcataacagcgacgacacggcggtcacctacggcgaaccgaacggcgtggaggaactgctgcgccgtctgcgcccgtactacgactccgcgcaggaatactggcaggacgatcacctcgtcgggctcgcgcgtgagggaatcgccatctcgctcgaaccgggcgggcagatcgagacgtcgatcggcattttgcgcgcacccgaggatctgctcgaactgcacgggcagttcatgcgcgaagccgcgccgatcctcgacgaactcgatttccgcctggtgaactacggctaccagccgaagagctcatacgcagacatcccactcaaccccaaactgcgctacgccgcgatgaacgagtacttggggcgcatcgggcagttcggaccgtgcatgatgcgcgcatccgcctccacgcaggtgagcatcgactatacgagcgagcgcgacgcgatcgacaagatgcgcctcggcaccgcgatcggcccgatcctcgcatggttcttccgcaacacgccgtatttcgaaggcgcgccgaacccgtggccgttgtgccgccagcgcatgtgggactacctcgacgtgcagcgcaccaacgtgacgccgggcctgtacgacgagcggttcagctgggaggattacgcggccgacgtgctgagcaccccgctcatgttcgccgacctgacccacacgccggaagcgcagggcgcgtccgtgcacggcatcgaattcgcggcgttctacacgaccgcggccgacctgtacccggaccgcgaactcaacgcgtacgagatcaaccacgtgctctccacgcacttcaacgacgtgcgtttgaagaacttcatcgagatgcggcactgggactcactgccgatcgaacgcgcagaactgctcacacagatcgtgagcaacctgttctacgatgtagagcaccgaaccagcctcgaatcgtacttcagcggactgaccggcgaagacgtgcacgccgcaaaggctgtgctgcaggcgcgcgggggagaggcgaagccctacgaccagccgatggactactgggccgaagtgctgggcgtgggggatgcgcttgccgatgtaccgggcgacgcgaagtggccggaggtgcgacagaggtagggctattgagtggcgcaaacgaaagttaatttgggaatgtgtcactatggtataagcccgccatcattcattcttgtagatatctagcacaatgattttgcatattattgagagcatgttatgatggcaactgctaattctcagtaagagtggacatgatagccacttcgattgctaacggcttagccgcagaggagagcttcggctctcctcgtttttatttttgtgtgtttatatattttcgtatatgctaattcacgttaccgtttttcgatgaggaagagagataggggagagtcagcatggcaaagcgtgcatattgtgtgggagttgacgtcggtctgaactctgtaggcttggcggctattcaggtggataatgacgggaacccagtgcgcattttgaaggcgcaaagcgtgatccatgatggcggagtggatcctaattcgcagaaatcgggggataccagaaagaaacaggcgggtatagcccgacgcactcgtcgcatgcgcaagcgtcggcgtgcgcgtttgcagaaactcgataacatattgcttgagttgggatatccgaagacggataatgcgttacttgaaggtcctgagatttggaagatacgcgctatggccgctgatggcgtcattgaaaatgacgcagagcgtaaaactgccatagccctagtttgtcgtcatattgcccggcatcgaggttggcgcaacccgtatcatcgcgctgaatcattgctcggcattgatagcattggttccgaacagtatgcacagatgcgtgaaacagccatggagcgcattgggggtgaatatattccagaggatgccacacctgcgcaagtggtatgtgccgtcttgcatgctgaagcaggcaaaccagccgtacgaatacgcacttcaacgcgcagcaaggtcaaaggggaccgagaaggtatcattagacagcgattaatgcagacggataatgcatatgagctcaatcgtatttttgctatgcagcaggttcctgtagaagatgctcggaagctgatactcgccgtctttgcagctgtttcgcctaaaggatctgctgaaaagaatgttggcagggatccattgcagcccaaacttcgtcgtgctttgaaagcgtctcttgcattccagcgatatcgtattatcaatatcatcaccaatcttcgtattcgtgtgaacaatagcgaacgtactttgaccatggatgagctgagcgccatctacaatttgctgacggatgcgaagaacaacgatgacatcacttggattgatgttgctaatgaactcggaatcgcacgtaatcaattgaaaggtgttggggcactgacagtagatggggatgaacgtgtctcgaacgtgcccccaaggcttacgagtttgcagcgtatcgctcagttaaaagataagaaactaagcaagaagctcctctcttggtggagcgcccaagacgatgaggcaagctgtgaagccatgctctcgttgctttccaacacagtcgatatcgatgctgtccgcgatgatttggaattcgctagcgcaattgaattcattgagagtttggatgatgcgcaacttactgcgctcgataaagttgacctgccggcaggtagggcagcctattcgtccgatacgctgcggcgactgacaagcaggatgcttgtttcgggtgagggactgcacgatgcccgtaaagcagtgtttggggtcggtgacagttggcgtccacctcagccctctatcggtgcccctataggtaatccggcggtcgatcgcgtgctgaagattactagtcgttttcttctggacgtgagaaaacgctggggaaaccccataagtgtgcagattgagcatgtccgtggtggttttgcgtctgtatcgtcggcacaacaggacaaacgagattatgaacttgcaaacgagcgccgctaccagtaccgtcaggaaatcattcagcaattacagaacgatgatggtattgatattgattctgttcgagatgcagatatccgcaggcagcaagcgattacgcgtcaaaatggagaatgcttgtactgtggtagaactatcactttccgtacgtgcgaaatggaccatatcgtaccgcgaaagggggccggttcaactaatacaagagacaactttgctgcggtttgtgaagagtgcaatcgcatgaagtcgaacttaccttttgctgtatgggcgaatacagagagcgcaaaagcccgtggtgtgtcattgaaagacgctattgatcgcgtggaaatgttcaatatcgattcacgtgagttagcaggaagtcgtgccaccaaacagttcaaacagggcatcattcagcgtcttcgtcaaactgaagctgatgattccatcgataacagatcaatcgaatccgttgcatggatggctgacgaacttcatcgtcgtattgattggttctttaatgcaggccaatatagcaatgattccgatagtgaatcggaacacacgaaagtggctgtgtatcggggcagtgtaaccgctgaggctcgcaaggcttcggggattgatgggcagatccatttcattggcgctcgttataagacgcgtattgatcgacggcaccatgctattgatgctgcggtcattgccatgatgaatgcaagtgtgtcgagaactctggagattcggtcgacgttgcgaatgtcacagcgtgtacttgggtatatcgaacaggatgaagtggcatggaaagattacccgactgccatgtcgccaggatatgaagcttatgcagcttggctgaatcgaatgaagagcttgctgatattgctgaatgatgcattggataacgataggattccggtgctgtatccggtcaggtattcgttgggaaattcggtagcgcatgatgccactgtccataaactgttgaagaagcgtgttggggatgctatggatgcagaaaccattcgtcgtgcctccagcccggccttgtattgcgcgttgacacatcttccggattactcaaagaaagatggtctcccagccgatatggaacgcaggattcgactgcatgatcgttatctaacggctgatgaggaaatcggtttctttgaaggtcaggctgcgcaaatcgcggttcagggtggttcagcagatattggttccgcaattcatcatgcccgggtctataagtgctacaaggaaaacgcgaaaggtgtgagaaagtatttctacggcatggttcgtgtattccagactgatctcgtgcgtgcacgtcatgaagatcttttcacttgcccgctgccgccgcagtctatttcaatgcggtatgcggaagataaggtcgtccaagcaattcagagtggcagagcggaatacaagggcttcttggtggtcggagatgtcattgaactcgatcttcctgctgatatcggcggccaggttggaagcttccgcgcgtttttcgcaaaagatgctttgaccaatccttctgtggtgaaccggtgggtcgtaaatggcttcttcaacaatacgaaattacgactcaagcccgctatgacggctcctgagggacttgaacacttttcagaagatagtgaggaaggtatgtcttctctgattgccgatacaaaaaaagtgatggaccgcccaggatggataccggcaattaacgtattggctgaattattgccaacagtcattcgtacgaatgaactcggtgaaccaagatttgtttcacataaccagatgcctattagctggacattctaagtaggtgattaatcatgcaaagcgcctggcgaattatcgactgtacgaatcttgaaggtcgactgcgatatgtgcgcgggcgcttgcttgtatgccctaaccagaaagaagaggtcgaaataccaattgcccaaacagcggtcatcctgttagggctgaaagcatcgtgctccactgcacttctttttgaattggcaaaggcaggggtgagcgtcctactgtgcgattggcgcggagtgcccatcggtgcattgcatagctggaacgagacaccaactgttgtggttcgaaggcagcatgcacagattaatatgagtgttcctcgcaggaaaaatgcttggatgcaaatagtgaagtccaaggtgcgtggacaagctcattgtcttgatttgcacgattgtgaaggtggagatgttttacgcgagatggcaaaacatgttcgatcgggagacgcagccaatgttgagggtcaagcagcgagattatattggggtgccttatttccaatagaggattttcaccggattcccggtggaggcagtggtcgtaatgcgttattggattacgcatatgcaatactgcgcggttttgtaataaaagcaattgtgagtgcggggcttataccatcttttggggtgaatcatcataatcgatcaaactactattgtctcgcggatgatttgattgaaccatatcgcccggctattgacgatgcggtggcaagtctgccatctaatggcacattagaacagccatcggttaagaagtatctggttaacgcagtcaatgattccatgatacggggattgacaataccctcgtcgattatggattttgcgcaatgcttcgctatctactgtgaatcaaaagaacgccaattagatgttccggtatttggagaagaatatgaaaaaggatgaggagagtgggggaatgtggtgccttgtgatgttcgatttgccagtagggactaaatccgagagaagggaggcgacacaattcagaaatctgctgttggatatgggatatatgatggtgcaattctcaatatacgtacggtatactccaacgcaatctggtaatcgttcaacggtgagaatgattaaagagcatttgcctgctggcgggaaagtgcgtgtattgcatatcagtgatcgacagtgggctaattcgctgagattttataatcagcatgtcgaaacgaagaatgaaacaccagaagtgtgcacgcttttctgaagatcttttcctgtagggaatgttggaaaatctaccttcttgataggctatcaagtctatcaagaaggtaggaagctaattctcagccgatgatgtcggacatgaggatgccttttcaagtctatcaagaaggtaggaagctaattctcagcacctattgagttccgcaatacgcgcgtcacaagtctatcaagaaggtaggaagctaattctcagcctgatcgcactggtggacacaccgagctcaagtctatcaagaaggtaggaagctaattctcagcagttcgccgcgcgtgtcgcattagataccaagtctatcaagaaggtaggaagctaattctcagcatgagggtgatgagtagttgtttgttggcaagtctatcaagaaggtaggaagctaattctcagctagtgaccactggaattgcagccacggtcaagtctatcaagaaggtaggaagctaattctcagctggcctttgtgagagcttcatttacggccaagtctatcaagaaggtaggaagctaattctcagccgcgcgtacatcttagtaatttccaccgcaagtctatcaagaaggtaggaagctaattctcagctcgttacgcatggcaggtcacgtgattccaagtctatcaagaaggtaggaagctaattctcagctggtcagcaacacaatcaatgacgctgcgcaagtctatcaagaaggtaggaagctaattctcagctgatggttgatggcacgcccgtacgccccaagtctatcaagaaggtaggaagctaattctcagcgatagttcaccgaccatgataccgttttcaagtctatcaagaaggtaggaagctaattctcagccggatcgtcaccgtgcgtttcacgccggcaagtctatcaagaaggtaggaagctaattctcagctttattgaggtatgttccggcgataatccgtatacacttgttttccgttcgcatgtcgcacagtcacgcacatgcgaaacggaattgccggtatgattaccgggaaacacataagagagaaaaagagggaaagaccatgttctttgtttggttgggaatactcgcgttcagcatctgtgtgctcgttggtgagtacctgctgatacgtatcgcagtccgtgacggcatcgactcgtcctcgaccgccgattggcgggaaatgtatgtgctggaacaagaatgatccaaagattccttgccttccttgaagagcctgtacaaggacgccggtgaatcgtccgttgtgcagtcactacctgcggaacgtcgtcgcgccgagatcgaacgcattgtctcgcgtcgtgctcgtaagatagtgcgtgaaaaaaagagcaagcggtttacgctcaccatcgtcggcatcattgccggcgcggtaatatccgcgctcatgattttcgggggcttggcggcatcgcatggcacgcataaacaatcagactatgagtataccaccccttccagttcaagcaatccgttcagtgagtacttatcccaatacgactaagcgaatggaatagaaagaggtgaggtgtcatgaagaaccggatgttcagaatcagtactgcaatggccctggctgccgcattggtgtttgccggaagtggttgcggccaggtaaatgtgatcgagcaagctgaagagaagtgtgacgtgctgtcgtaagccgatggtcgagccgtttccgtgaagttcaaccaagatgacccgtcaagtgaggcgcgttgcatgattaggctcatgccgcgtgaggcaagaagcacatatgaggctgacttggatgaggacccctactataagcagggcgagtatacgcatgacgggtatagctatcagtggactatcagcggccaacgcgataggcttaactcagtcactctctcatttgttgaacaatagctgctctgctaccatcttgtgtgagaaagctgggtgttatccggttcggcggaagccacttacctttgtattggggtaggtggtcttcactgggtatgtagtgtgtttgtcccgcatgtgcggggatgattgcaaggctgaaaatgtgaggaggcggagatgcatacaacgctggacttgagccaatacgatgatgtgacggtgtatgatgatgcgcctcgtaggccaaagatacatgtggattatctgccgactccgtcagcggttgcacgccgtgtgcgtgaagtgattgatgatcgccacttgagcatggaacagttggcatcggatgcgcatgtcgatgtgcatgctgtgcgttcgttgtatgacaggggattggcaagtttgtgcgataccaggcgtgtgttcgcgatgttgggaatccatgtgcatgcgtaccctgtcgagatggtgacgatgtcgctatgagcgatgtgttgcatgtgtgggtgggcgatcgatgccatgtgggtatgttcatccgtgacgatgacaatctggtggagtttcggtacgattccgatgccgatacgccaattagcgtgagtttgccactggatggagattgggccgtgcgcgcgccagaagcgttccttgacaatctcctccccgacgaggagactgcccgccatgccatgatgctccgcttgggtgcggcatcgactgatgtgttcgatctgcttgatggcgtggactccaccggtggtcttgtgtttacccgttctgatgatgcggaaagcattacgagaatgatcgagccggttgatgagaatatgctggccgatcagattgctctgattgagcggcgtccgcattcatggtggaatgaggacggcgtgcacgagcgtttttctctggccggcgcgcagggcaagttctcgctgactcgtattcaggatgagtggtattggccgaatgccgctgtaccgtcgacgcatatcgtcaaaccgcagccaagggatttgcatggtctgcgtgacatcgagcttgctgtcatggatttagcgctgttgtgcggtcttccagtacctcagcacggtgtgttgtccgtacgagggcatgatgcatatattgtggaacgtttcgaccgtgctatcagggatggccgtattgtgcgtttgcgtcaagaggatctgctgcaggccatgggactgcctggacggatgaaatacgatgtgcgcgtcgatgatgtgcttgatttggtgcaccgtgtggatgcaagcgatgagttggcatatgcatggcttgagcggtatgcgtttaatgtttcgacagcgaacagcgatgcgcatgcgaagaactattcattgatgctgggcgccgatggtgtgcggttgtctccggtgtacgatgctgtcgccaccagattctggcctgagtttgtgcaggagtatgcgatgccgatagatgaggacgtcccgtttgccgaatgggtgacgccctcccaatgggctgagctggcacgtagacatatgcttgatgaggaacgggtggttgttctcgctcgtacaatggcgggacgtgtgctgacacaggctgaaacattacgtgaaacactggcctcgcaagaattcgaccgactcatggcatgtctgcgtaaagtcaacgaatcgattgaacccttgttctagtgttcgcggacgaaggacctttctttgcagctgcgggcgcaggatggtccgattgcagccttgcgattatcgatctggtcaaggtttgccccgcatgtgtaggaatgattgttgacccgatgctaaactgagagtcgggtattaccgcagtgaagaagttcggaatcatgatgacgttagcgaagtgtggccgactgtgcaaatcgaatttttcgggtattgctggagagtgttttgctaatggaatcagacgtttgccccgcatgcgcggggatgatccggaaacacggtagaatcaaaccaacaccgaagagaaggggaactcccatgcgtggacgcacaggaagaaccatcaccgccactacactggctggaatcatgcttgttgccggcactggttgcggttcggcaaaagcgaacgtgatcgagcaggctgaagagaagtgcggcatacaatccaatcgtggacagaaaatcgaatacgcctacagtcaggatgaggggtacggggacgtaaacacgttgaactgtttgacgaacctcatgcccgatagcatttacaagcattacgaggccgatcagaagaaagcggccgactacgacgtcaaccacgaaccgttatctgacgggtgggacgaggacgggtaccgttggcggtggcgcatgctattcaacacccagtacggcccggccgatgaaacaatccttcgtatcgagaaactgtagtccttctgttatgctcgttggtgtggtggggttatccttgccagtgaaaacgcgaatgagcgccgctaacccaatccgggctggcggcgctcgtttgtatgtaagtcccatcgtagtgcgcccatgggcgttgggttccaaccggttcgatcatagcagaggccgccgcagcggcctgggaagtttgccccgcatgcgcggggatgatggtcatcgacggcaacgcggtcgccgtcctcaccgagagcggcgaaatcatccacgaccagccattcgacaccaacaaccactaccaacgcaaaagcacgaacacgccggcagcacgtaaaccgccacgctgacaacacgtaaagcatgtgtcgagacatacgtcaactatgtctcgacacattacaccggtcagaattaccattgtaggaagttctacggccgcgttcactcatgacagttctttcatcgcgttatcctgtgggatatttagatcagggcatcatccggaacttcgccccatggtttcggcttgtcgatatcgagccagtgctggatgtctttgatgcattcggtcagactctggggatacgactccccaaaatggaagtaaggctcatggaaccgttcgacgtactcatgtatcagtttttggaacagttcctgcagccgctgttctgaatcatccattgcatgcctttcagagactgattattgagccagtataagggcatagaggaatgtcccttagctgaagctttatgcatgttccgcaaacgcggtgcaaccagcaggtacgttgatgaacggaggtgattgacatgtgtgtcgcggagaaaatgaggtttgagaaccttgtcgattggtatgtcagacaactcgttcttcatggtgatgcggaaaacgcggagatcatcaggaatgtttttgcatgcggtgagccgacagtcgccttggatatggccgtaatccggtcaaaacagttgaacatcattcccgaacgttatatcatcaagcgatcatgcgaattattggatcccgatgatgatggcatggaaatttgcaagcgctttcttacctcgaacggtttgccccgcatgcgagaggacaactgttgacgggagtgatatcattatcgcattcggtaaaaagaaacgcgccgtcagcatctatccacgggaggagggttatctatgcacagagggacaacgcccgatgacctgttgctgaataagttcgtgaaaatccttgaagatcacaaacggtacaaggaagcggaactgttggatgccacggctattgctggcgagttcgccgtgggattcgaccttgcgatgctggcatgcaaaaaatatgacatagtgcctcccactcatttggtgcatgagattatgagctcaccttggtttgaaaaggattcgtacgccgatgatatttgccgagagttcttgaagaagggcggatcctccgttacgccgtgacatgggcctgattcagcatatcctcgtcatgggggatagaggcggccgcatcaagcatgtgacgtgcgattacatcggcgtcacagccctcctcacaccacggagatgcgagggtgattcgcagcatctgccggcccggtttcaaaccttggtcttcacaggctgccagagcaatgattagtccggctgtgtattctccggcatcgcatgcatcaagcagttcgttcgaccacttgccccgcccgccacggtgaggagtttgaggtagtattccagcaaattgtcgatggtgatgttctggatattcatctctctttctttacttatatatttagttgaaaacaactttcttcagtgtatctcgaaagcgatggaattctggccattctggatcattggccaggtcgagtacctgcggtgggaaatgggacagacgtgtcatgtcgttgcctacgatatccaatgcatcgataatagctaaatccggttctccgcaatcaatcgcatcttgcatgatatcaatacgaacttcctcgacgcaaccagatgcagccatacacgattcagctatagagaataaatcctcatattccacattcataatatccacctttatttatattttgttttatcgctcttcattctaaatgtttgtttcagcaggtccatgtgagtatatgtgagtaatgatcgtgctcttttgtttgtcttggctctcttgattgaggtaaaggtgtgttgagcggtgtctgtttcctcgctacgggtagtgttcttttcgttacgggtagtgcttttctggtgcacttgtcactatgatccgccattttccaacgattgcatacggaaattgcctagggaatcactacccgtagcgggagaagcactacctgtaacaaaggagggggtgcctgtagcggcgacaatgccatggtcaacacgaattcgctgtttatgtcggggtgcgattgctcgaagtcaccatcagaggaagcgcctaactccgttccctgttccgtcacggtagctccatcatggtgttaaatgtttcgtacctcatgatgccttccatctgcttcccgtatgtatctcagatcttgccctaggtcttgagtcgtctgtattcgtcgctcagtttgaatgtggacagttcggggtctgtgtcgaatctcagtttccactgctcggcgatccatgcctgctcgtcatctggcagtgggcgcacaccagtcttctcgtggatacgcttgagttcttctggattcgtgaccggtgtgagctggtcaggctcaaacgtgtatcgccttgatcgttcctcgctggtcgacataagggcattctaccagtctgaatcaatcagccgccgtacaatcgagcaatgagtaggcaaccaaattcgactgatctgcttctgcaggacctcatccaggtcctcttggatgggaaggcccatgcagatgcggatatgctgcaaagtgcagctgatgctggtgaatatgctggtggtttcgactacgcgatgctagcgttcaaggatcgtggtctgattccagacacacgattgattcacgcggcgctggattcgccgtggtgtgaggaagactcctatgccgatgtgattggtcatgaactactcgcaaaagcggagacgtccattgcgtcgtgatgcgtccagctatcaactccaggaatccggcctataggtcaaaatgtgttgattatgttgcgggtttggcgttgcggcagtaagtgtgttggggtgttatttaggttcccagtccataaccgcgtttcgcgctgctgcatgacgaatccctgagtgcccctgacgaaagtcatgtccggagccgctgagcatgacgactgtctgtaattgtccaaaatcacgtggccacagtgatatttaagacagatatgactggtaactgtccgaaataacgtggcagcatcgatatttgcgacatttgggcatggcaactgtccgaaatctcttgtgaacgccacctgcgcacttattactgtccacgcaacacctgctagcgctaaatcagcgcaaaccgattaatagacctatagccggcttttcagggcgcagtacgagtgtcgatgttcagattttcccctgtgccttgcgcttgtgatattcggctctcaactcgtcggtcgacacaaagtcgccgtcagcccatcgacggcagccctcctcgctgatccaaacctgttcttggggtggcaatggatatactccggtcttgttgtatatcgaatcgagttcgtctgggtccgtaattgcccgcccctcttcaagcatgaacgtgaatcgattctcgcgcattgtgtccatgtgtttattctattctcagtacgaccacgcatgattgattgttggtccatcaatagatttccgtgacatgtttctgaatgcgtatctagtgaggaggctggatgacaaacaattatcatgattccacctcatcgttagcggagctcgtgagggaatatgcgcgtcgtatagaccgcgtcaatcatgaacatgcagttgatgtattgcaggatttggattcaggtgagccgacgattgcattgggtaccggcatcttttatgcgagggaagatggcattgatgtgccgcctgatatgctcgctcagaccggtagagaacttgatccagaagacggctatgcgcttgaggcataccgcgatctcgtgaagaaaagccgtgccatagcatgacatgggactaacggattggattggttgattccacatgggtaggaagcagtcaagacatctaagctggttttagatagtgggtcaaacgtggattgcgtcggatgtcttcctgcccccttcattcaatgggaataatcactaatagcacatgagtttatttatagcttcccatcagcttttagagcgtcgtattgttttgcaagttgctcagtatcgaaatcctcatccgattcctgaagccg

SEQ ID NO: 558 - DNA, 23468 bp, synthetic construct
  source 1..23468: mol_type = other DNA
  misc_feature 1..23468: note = Synthetic
cgtgcaggacgtgaccgccctgaccgacgacatcgacgaaatcgaagtcaaggcgctcaccacccccgacaacgacctcgcccgccgcgccgccaaggacccgctgggactgtcgcaagaagactgggaaacctggtattgcaccgcctacgcctcatccatcgcctaccagatcgaagaagtgatccccggcgccgtcgccaaacaagtgcggcaggtgcaggcgctcgaaggcacggtgctgagcaagacacaagccgtcatgatcgtcatgactgtgctcacgctcatcgccgcagtcatcgccgtcgccaacctcatggccgcctccatcgcggaacgctccgcccaactggcattgctcaaagcggtgggcgctcgcaacggcgaggtatgccgcctcgtgctgggcgagaccgccgccgtgtcgctcatcggcgccgtggtgggcgcgggcgtggggtcggcgatggcccagctgatcgggcacgtggtgttcggcacgtcgatttccatgcggccgatggtgttcgtgctggtggcggtgctgctcaccgtcgccgtgctcgtcgcctcgcttgcctcgctggcgtccattctcaagcttcatcccgcggaggtgcttcatgacaggtgatagcaacaacaacagcaatgccgcgaaccgccgcatgtttttcaccatgctgtggggcgcgatgttccgcaggcggtcgcgcgcggtgatggcggtgctggcgtcgctcgtgggcgccgcgacgctgttttgcctcacggtggtgtgcctggaggtgccgcggcagatgtcggaggaattccgctcgtatggcgcgaacctcgtggtgtcgagcaccgcagtgtcgagtaccgcgtcggcaggcaccgcgtcgtccagcgcggcgtcggcagacgctgcgtcgtcggatgcgcagggcatggattccgccacgctcgacgaggtgatcgctgcggtggacgccgccgggcaggagaatcacgccgaataccgctatgagaatgtgcgcgtgcatgcggcgtcatacatcatcgccggcatgaaccccgccgacacccgtgtgcttgaccagcattggacagtggaggggtcgtggccggacgccggggacaccaagaacatcatggtgggccgtgacatcgcggatgcgatgaacctgcaggtcggctcgtcgctgacgatgtcataccgaggcgattctgacgacgattcggattccgcctcgcaggcatcggattctgcctctgcctcggattcagcctctgcctcatcgtccgcgacgtcgcatgcgtccagcgacatcatggataccggtggcgaatcattccgcgtgtgcggcatcatcgacaccggcggcgaagaggactcgatgatctacgccgacatggcgctcgtcgagcagctgagcggcacccagcgcggcgccgacgcagtcgagttcgcatccagcctcgacgccgacggcctcgacgcgttggtctcgtccatcaacacgcattcggcgcaatggcatgtgaccgcgcagaaggtgagccgtatctccgccgcgaaccaacgcatcattacgatgctcaacacactgttttggatcgtgtcgctcgtcgtgctcgtgctcacccccatcggcgtggcgacgaccgtcacatcgatcgtctcgcagcggcgcaacgaaatcggcctgcgcaaggcattgggtgcctccgcgcagtcgatcgcccgcgagttctacgcccagtccgcgctgtatgggctcgccggatcggtgcttggcatcgccgtcggctatgcggtcgccaccgtgctcgccacccaggtcttcggcaagtccgtgggattccactgggggctggcgctggcgtcggctgcggtgaccgtggcggtcaccgtggtggcgtccgtcgggcccgtgcaccgggcgtcgcgcatcgatccggcggtggtgctgcgcgaagagtgacaccgggcgcggcgtgaaaaacggcaacccaacactgcaatccaacaagatatccaacaaggaacaaccaacaggtgcgatcgatcccatcgattccatggggcgatgggcgatcggcaaggagcgacaggagcaatcatgatgtggagaaagaaagcggcatcccgcgcggatgcgctcgcggtttcaagcaagacggacacgatgatgcaatccgtccgacagcaatccgcccagcagaaaaccgcccgacaggaggatgcccaggcgtccgacggcatggtgctgcgcctcgaccacgtgtcgaaagtctacggcagcctgcgcgccgtcgatgacctgagcctcaccgtgccacgcggccagtggctcgccatcgtcggttcgtccggctcaggcaagacgacgctgatgaacatcatcggctgcatggacgcccccacgtccggcaccgtcaccatcgagggacggcagctcgccgacatgggcgagtcgcagatggcgcaggtgcgcaagaacgtcgtcgggctcgtgttccagaagttctacctcgtgccgtatctcacggcgcttgaaaacgtgatggtcgcgcagtactaccattcggtggtcgacgagaagcaggcgatggacgcgctgcgcaaggtggggcttgccgaccgtgccaagcatcttcccagccagctgtccggcggcgagcagcagcgcgtgtgcatcgcccgcgccctcatcaactgcccgcagatcatcctggcggacgaacccaccggcaacctggatgaggcgaacgagaagattgtgctcaggctcttccgcgagctgcatgagcagggcactacgatcatcgtggtcacgcatgatgcgcttgtcgcatcgtgcgcgcagcgtgagatcatgctcaaccatggtgtgctcgccggcgagaagtggaacgacgacgaggcgaagcggcggtatgaagacatgggcgggcgcccggcatacagcggtgcgcatgaacccgatgccgcgtcgatacccgaaggattcgatgatccgacgaaggccgcgaagaccggcggcagcaatgcgctgggtgatgatgcagcggatgacggtgcggttggcgatgatgcactgggcgatgatgcactggatgaccgcgcggttgacgccacgattccgccaaaggctgcggcaaaggctgcggcagaggctgtgtcaagcactgtgtcaggcactgcgtcaagcactgtgttaaaggtgccgtcgaaaacgcctatgcacaaggcggtcgcagcccttggcgccgtgattgccttgggcgctccttcgcttgccgggtgcggcgaacccaaggcggtgcctgctgacgacgagtatgcgggcagtgaggaatcctcatccggcaatggttccgatgattccgccggctggaagtccgctcccagcgccgccagcgcctcaggttcggcagccaccgccaccgacactggcgattatgccgacggtacttacaagtccagcgccacgtacggacccgtgggggaggacagcatcgacgtgtcgattaccgtcgccgccagccaggtgacggacgtgcaggtggtggggcatgccttcacatccgtgtcggaaggccatcaggatgatttcatcgccgcgatcggaggcgtggtgaaaggcaagcctctcaaggatctgtccgtggacaaggtcgccggtgcgtcctggacctccgatgctttcaacgccgccctcgacgtgatacggcaggaagccagcgccgcccgaaccgatacctccggcaccggggaatgaaccggcgccaatgaattaacaggcagaccggttaaataaaggcaaacgaaggcaaacaaaaaggctgcctccgctcaaatccaagcggaggcagcctattgcatattggccgcggtaactagcgctcgatggaacccagctccatgaagttcgccaaatcgtccagctcaaggccggtgtaatccttgatattggtcacctgcggaccatcgaacaccacgccctccggggtgaaccccgtgatggcgaccaccgttgcgccgctggcgccgccagactccaagcccaccttggaatcctcgaacaccaggcagtcctgcgggtcggcgcccacgatctcagcggcacgaagatacggtgccggatccggcttggcagccaggccatcctcaccacacacatatccgacaaacgcaccctcgggagcctgctccaccatgttgcgcaccatggcgcgcggggaagcggagacaatgacattcggaatgccggcggcggcgagcttgcgcagcagctccagcgagccggtcgtccagcacggggtttccttctcgcggccgattacatagccgatgatctcgcagcgcagcacctcggtatccaccggctcgctgatgtattccttcaagatctccagcaggcgaggcgtggactggccgcgcgcgcgaagcggcacatcgtcgctccactggccgccatgcttctcgatcacgtagcgctcgccgtccgcccaatagggctcggagtcgatgagcgtgccgtccatgtcccagaaaaccgcggcgggaaggcgcatgccttcctcggcgtcaaggtcggtttgggcaaaagtcaaggtttcattcgaattcacgcgcttcattatgccaacacgcacgaacaatatgggtctgtcggcattcatccgcttgccatgtggacgccattgcacacttgccagattccgctcctgttgttttcccttctctttactggaatgtcgcttttgtttcttggctctgccctgaaccgacctatattgaagctgatggggttgctataaagggagatcaatgatgaaaaattccaatgattccaatcaatgccgcggctgattttccggcgttgtgtctgggtgatcggggtggtttcttcaatactctgcggtttccgtcgttgaaagtggctttccgggtcgcggagtacgccgcctcgtattgtgaggtggcggaagctgcttcgacggcgacaggccgttctacctgatagattgcaaggattcgtccgccaaggactcccaggtgttggaagaggaggagtacaccgggtatcgtccgatcggcaccactgccgagtggattgaacgcactttggaggacctgaagcaacgggtcgaggacaggaagcttgaggtggatgcctacggcgtgctgcgccgcgtaccgcaggactgagagtaacggttggggcgggatgctccttggtgcaagcgggtgccttggtgcaagcgggtgcctcagaatgaagatgcacccgcttcgctacgtgtggtcatatcacaagtagcgccgctcacagctgcttcatccagcggcgggagcggaacaggggaagcgagataagcgttttcgcggtctcttcttgcgagatcatcgcatagacgcccacgacagaccaatgccatgcgaaaccggaaagcagcgcgagcggcacacccacgcaccatgtgcccagcaggctgacggccatgatgtagccggtcttgccgccgctgcgcagcacgccgctgctcatgatcatgttcgccacgcgcagcgggaacatgatggcaaacaccacgagaatctgctgtgtgatggcgcgcacggagtcgtccacttggaagatacgcacgtatgcgcctcgcagcgccaccactgcaacggcgatgacgatcgccgccacgaagccgtctcgcagtagtcggcgcgccgtggcataggcgccgttctcatcgcctgcgcccagcttgcgccccaccatgagcagcgctgcctgtgccagtcctgccaacgcgccgaacaccagcgtggtcatggggttgatgagggtcatggctgccatggcgtctgtgctcagatggccgtagacggaggcatacacgttgttgcccagctgccacaggaaatcgcccgcgaccatgggggcgagcacggagccgaacatccccagttcgctgcgcgtgcggtacagcgccggggtgagaccccattgcgtgctctcgtgtacccgtgggcgaccggcattgcgtcggcgcgcgaaataccacagcacgcccgcgcacgccacgcattgtgatgccgtcgacgcccatgcggcgccgcgcacgccgagcgctggtgtgaccggcgtgccgaaaatcaacacgaagttgagcgccgtgttcgccaccgctgcggcgatgccagcgtacagcggcaccttggcggcgtccgtgcaccgcagatacacggcgatgatgttttcaaccacttggggaatgaatcccagcgcgtagatgcggatgtatggcgcggctgcggcgatggtcgccggatcggtcgaatacagccccatgatgcgcgtggggctggcgatgcacgccgcagcgcacatcagggcaagcgcgctcattgcggcgaggctcgtgtagaaggcctgcccggattgccgtgcatcgcccttggcggtcgactgagccatgatgatgctcgccgcacccgccaccgaaaacacgagcgtgttgtacagtcccacgaaactcgccgcgatgccgatggccgccacgctcacagtgcccagctggccgatcatgacttggtcgatgacgctgaaggaggattgcagcaggtattgcagggtgaccggcagcgcgatgcggcgcagttcgcgccggaagcttgcgttcacctcggctgcggagggcgtggatggtgcggagggtgcggatggtgcggatggtgcagaaggcgtggagtcgggcagtgcgttgttgctcatagtggagcctcggaaaatcagcgggaacagtgcattgaaaggttgtgggaacagtgtggttgtgacgcagccgtcagacagcgccgcatagcggtgccgtcaggcgacgaaaacggtttgcacaagcaccatgtagagaatcgttcccgcagccatcgacaccatcatgttgcgcttccacaggtagcttgcccacacgatgagcagcgcaatcgcctcagggatgccgtaaggccacgcaagcaggttcacggtgcgcaggcagtagacgacgagcaggccgaacaccgccggccccagcacgcggccaaggtattgcacataggcgggaatcggcttgccggaggggaacaggatataagggatgaagcggtcgagcacggtggcgagaatcactacgccgatcgtgatggcgatgtgaagcggatccatgtcaatcctgcctttcgtcagccggctgcttttcggcgaccggcaggttgcgttcgatggggccgcgcagcgctgtgagcagcacgaggatcgtgatcatgcttggcacgatgaaattatccggtccgaacaccagcaggcaggccaaggagccgagcagaccgatgcattctgccgcatgggagcgcaggaaaccgtagattccatgttccttcgcttcggtggtgctggtgagccattggttgaggaatatgacggcgaacatcgtcgtcatcacgaaatccagccccttcgtgttgaaggtgagcatggacccgcataccgcgccgatggcgctgccggcaacccaatagcactggtcgagcgctgaaacccacaggtagaaccagccgtggtccacatccgcggggatgggggcggaataattcacggcgaatgtctcgtcggtggtgctgaaaatcaggtagggcttcttgcggccggtgtcgcggtacctgccgagcatggcgatgccgtagaacagatgccgcgcgcccaccatgagcgccgtgacgaaagcggacagcggattgaacgccgacgctaggatttgcaccagcaggaactccatcgaacctgtgtagatgagggcgccggtgaggggcggcagccatacgggcatgccggagctcgtcatgaggatgccgtaggtgatgcccaggaacacatagccggccatcaccgggatggtgagggggaagcatgcttgcaatgcgcgcgaagctcgactatgcgttcgctgggtcatgtgcaccttcttgcgtttgggtttgctgtggttttagtccacgagcggttcggggcctttgcctgattcgatgtcggcgacggccggctcagggcgtccgttcagcttggaatggcgacggctgtagccgaagtatacgcacagaccgatggcgaaccatatgacgaagcgcacccacgtctgccaggtgaggccggcgatgagtacggcgcagaagatgatcgcgaggatcggcgtcaccggcacgcccggggcgcggaagccgcggtgcgcgtcaggctgcgtgtggcgcatccacagcacgccggcggagacgatgatgaacgcggagagcgtgccgatgttgaccagctcgaacaggatgttgatgttgatgaggccacctgcaatggcggtgagcagaccgaagaaccatgtgcccttccacggcgtgtggtgcttgtcgtcgacctcgccgaagaacttggggaacagcccgtcgcggctcatcgcatagcagatgcgcgtctggccatacagctgcacgagcatgacggtggtcatgccgatgagcgcgcccaggttcacgatgaacgccagccagttgaggccggtcgccaggatcacgcccgccaccggggcgtccacgaagttagcgaaatcagggtacttgacgatgccggtcatgatgagcgtcatcgcgatgtagagcaccgtggagatgaccagcgaatagatgatgccgcgtggcagcgtcttgttggggttcaccgtctcttcggcggacgaggagaccgcgtcgaagccgatgaagctgaagaacacgatcgaagcggcggggatgatgcccatcggcttggacgagccgggctggaacgtgtagatgccgtaaggggagaacggcttccagttcgccgggttcacataccacaccgtgcacacgatgaacaggatgatgatggccagcttgatcatgaccatgatgtcgttcgtgcgcttcgtctggttgatgcccacggcgagcacccacgtgatgatgagcaccacgatgaagccaggcaggttgaaatacgtcgtgacgccgggggtggtgccgtaggcggcagtgagttcgacgggcaggtggattccgaagccttcgagcagcttgttgaaatacccggaccatccggcggaaaccgtggcggcctgcaacgcgtattccaagatcaggtcccagccgatgacaaaggcgatcagctcgccgaacgccacatacgaataggagtatgccgagccggagacaggcaccatcgacgcgaactccgcgtagcacaggccggcgaaaccgcagcacaccgcggcaagcaggaacgagatcgacagcgccggtcccgcggtgagcgcgcccttgccggtgagcacgaagatgcccgtgccgatgattgccccgatgccgagcatcgtcaagtcgaaggtcttcattgtgcgtttcagcggggtggcggaggctgtgagctcctccacggttttcttacgcagcagtttcgatgccatgtgtgtctgctttctggacggtttgctgtttgtcgggtgcggcgtgcggcgcgcgggcgtgcgtggcgcggggcgctatataaggattgccacaccttatataagagatgagtccgtaccttttttagcagtgtcacgggacgctagcggcacaccgtccgcgctgcggtgggtggtggcaaggggtggggtgtgatttgattggatgcagaagcgctacagcgaaaccagacagagattggcgtgtctctgcattcaaacacgctatactgaaactgctaattctcagtaagtacagcaatttgtagctgtatctgaatgctaaacggttttgccgtaggggagaacttcggttctccccgttttcttttgattcactgtttccgagggcatgttcagcgacaacacgcgctgctgtagttttcagagaatctcaattcgttgtaatcttcgtgtcaatgagtaatcagggcatcacagttgacgcccctgtttcatggagggaattagcatgtcttccaagacgtatcgcattggtatcgatgttggtttgtattccgtgggactcgctgccattcaaattaatgaagacggcaatcctgtccggattctcaatgctcagagcgttattcacgatggtggggtcgatccgagtgctgagaagagcaggggtagtcgccgattgcaatccggtattgcacggcgtactcgccgtatgcgccgcaacaggaagaagcgtcttgaacgtctcgatcagttgctcgtgaagtcaggattccccgtgagcacggaaaacgatttggaaggtttcgaaccgtggattctgcgtgcccaagcggctgacggtttcatagaggatgatgcgacacgaaagcgagcgattgctgtttcctgccgtcacatggctcgtcatcgcggctggcgtaatccatatttgtccgctcgcacacttctggctgttgactcgccgtcgtcggctttttatgacaagcttgtagaaaacgctgcgcagatgatggatggacaacttcccgaagaagaagcgacacctgctcaaatcgtgcgtgatgtacttgtatataggcagggaagtgcagcgattcgccttcgcaaatctacagccgagaaaaagaaagaccgttttgcgttgttccctgagaaaatgatgcaagaagacaatgcttatgagctgcggcttatcctctctaagcagtctgttcctcaggatgtggcccgagaattattgcttgcggtgtttcaatctcagtcgcctaaggggtccgcggaaaaacgcgtcggaaaggatcccctggattcctctcagcctcgtgctttgaaggcgtctttagctttccagcactatcgtatgctcaacatgattaccaacctgaggctggtcgataacggggtggagcgccgcctctcggtcgaagagaagcagaagctgtatcagctgctgttgagcgataccgggcgggacaagaaatacgatacttggacggatgttgcgtctgccatggggtggaagcggagccagcttaaaggtgtgggtagccttacttcggatggcgaggatcgcgtgacgagcaagccaccgcatgttgacatcatcgaaaagctcaacgatatcaaagattcgggcctgaggaagcgcatcctcgaatggtgggcggaggcgacagagtctgagcgtgagtcgatggttgctttgctttcgaatactgtcgatatcgccaagaaacaggacgatccagaattttcctcagctgtgaagtttatcgatgcgctgaatgacgatgacttgcaaaagctggacggcattgatatgcagcaaggccgtgctgcatattcgtccaagacactgtgtgcgttgacgcagcagatgttgacaacggaggatgatttgcatgatgcaaggaagcatgttttccatgtagatgattcatggcgcccgccgcagccggctatcggcgccccattgggcaatccgtcggtggaccgggtcgcgaagattgtcaatcgatggcttcttgcttgccagtctcgttggggcaatcctgtgtctatccagattgaacatgtgcgcgacgctctatcgtcagctgcaacactggctgcaagcaagtctgcttatgacagggcaatcagcgcgagaaatctggagaaacaggagaccaaagacacactgcgccgagaaatgaatcttagcgaaccccatgagtctgatattcgtcgtattgaagccattacgcgccagggagggaaatgtctatattgcggtacgccaatagagtttaccaattgtgaaatggaccatatagttcctcgtaaaggacctggatccacgaacacccgtgataattttgcggcggtttgcattacgtgcaatcggcagaagggcaatgtgccgtttgcggtttggtgccagaccccggcagctgtgcagcgaggcgtgagtcttgagaaagcagttgctcgcgtcaatgacttctttaaggagtcaaagagcgtgaggggacggcaggcaacggccttcaagaagtcgatgattatgcgtttgaaacaaacagtcgccgacgatcccattgataaccggtctatcgaatcggttgcttggatggctgatgagctgcatcgtcgcattgattggcatttcaatggagacgcttccagccgtgaggttgaggcgaaagtgcaagtggctgtctaccaagggcgtatcacatccgaagctcgtaatgtgatgcggttccaggctggtggagatttccacttcgttggtggacatgggaagacgcgtcttgatagaagacatcatgctgttgacgcttccgttatcgcaatgatgacccctgccgcagcccagacattggctgaacggatgaatatccgtgacagccagcgatacattggtcgcatcgaagaagacgaagttgattggaaacagtggcctgccaagcccactgagaaatatcagcagtggttgaacaacagcacgcgtctttttgcattgatcaatgacgctttggatgcggatcgcattccagtgacgcattggcaacgctattcattgggcaattccatagcacataaggacacaattaagccattgcttaaggttcctcttggcagtgcgattagcaaagaaacaattaatcgtgcggcaaccccagcactttattgcgcattgaccggatgtgcagattattctccgacagatggccttccagagaataaacagaggcatatcacagtcaatggtaccgcctacgggccagatgacgtagttgagtttttcaaggacgattctgctcaaatagcggtccaagggggttctgccgacattggtaatgccattcatcatgcacgggtttaccgttgctacacgttgagttccaagggtgtcaagaagtggttttatggcatgattcgagtgtttcaagccgatcttgtgcatgccaggcatgatgatttgttcacttaccctctgccgcctcaatccatctctatgcgatacgcggagtcacgaactgcgcaagcggtgcttgatgggcgagctgagtatcttggaaatcttgttgtcggggatgagattgatattccgatgaaccgcgagcttaaaggtcaaatagctacgtgcgtagttttcttcaacgagctgccggggaatcattccctgattgaaaaatggagtgtggatggtttttactcggactcgacacttcgtttgcgccctctgtatcttgcaggtgagggcttgcctaaacttggggaggtgctcggagttgagataccggcagatattcgaaaaatactggttcatccaggatggttgccgtctgtcgataaaacattttctacatgtcctcaagtgattcgccgcaattcattgggcgaaccgcgatggaaatcatgctccggcatgcctgtctcgtggcgaatcctgagctcagaagaagcctaggaggcattgagaatggagaacgcctggcgtgttatcgactgtatcaacgtcgaaggtcagcttcgatatgaacgcgggcgcatggtggtctgtgccagagataaggaacctgttgagattcctctggcacaggctgctgttctcctgcttggcctgcgggcaaatatttctacagcactgttgagtcgattggctcaagaaggagtgagtgtcctcgtttgtgactggaaaggcgtgcctgttggtgcgcttgatagctggggcgcaactccttctcgcgttgtgattcgacattgggctcaggtcgaaatgaccgtgccgcgtcagaaaaatgcttggaaacgcatcgtgaaagcgaagatccgcggccaggctcgatgccttgaaatgtgcggacgcccgcgtggtggagcacttctccagatgtctcaccacgtcagaaccggtgatgtgtcgaacgtcgaggggatggctgcacgtgaatactggcagaatttattcatgcctgaagaagggtttagcaggcaaccgggaagcggcattggcaaaaatgctttgctggattatggatatgccattctccgtggatttgtgattcgagcgattctcgcggcagggcttgacccgacttttggtgtgaatcatcacaatcgctcaaattacttctgcttggcggatgatctcatagagccttatagacctgtggtcgattgctgtgtggcgcaaatgggtgttttcactctagaccgggaagcaaagcagcgaatcgtagaggctgtcaatgggcaatatacggctggaggtcttacagtgcctagctcgttgaatgattttgctcagcaatatggtttgtattgcgagggtagatgcgacctgctgagagtgccagtgtttggggagaataacaatgaagaaggatgaggagagcggcggcatgtggtgtgtggtgatgtttgacttgcctgttgaaaccaagatggagagacgagctgctactcagttcagggatttgctactcgaccaaggtttcatgatggtgcagttttctgtctatgcgagatatacaccgacacttggcgggaatcgatcaagcgttgaattcatcaagaagaacattcccgcaaaggggaaggtcaggattctgaatctaagcgatcaccagtgggcacagtcgttccactcttatgattcgcagattgggaatccgaatgatggcccaactgccccaggtgctcttacgcttttttgatcgtaaaaacacttggaaacgttgggattccttcctttttgatgaactatcaagtttatcaaaaaggaaagatgctaattctcagcgtagaggttgatggcgtcctggcgttgccaagtttatcaaaaaggaaagatgctaattctcagctctgaccttgacacctatcgtcttcgtaacaagtttatcaaaaaggaaagatgctaattctcagcgatgaggttgagcatgatgcggtattcacaagtttatcaaaaaggaaagatgctaattctcagcgtcgtagcactgtcggtcgcattgctcacaagtttatcaaaaaggaaagatgctaattctcagccgtcctagcgacacgttcgccttgttgacaagtttatcaaaaaggaaagatgctaattctcagcccgtagtccaatggcatggcgggattatccaagtttatcaaaaaggaaagatgctaattctcagctgcttcatcttttccgcctttcgtcccgcaagtttatcaaaaaggaaagatgctaattctcagcgctcgcctgattgccaatgacagagttacaagtttatcaaaaaggaaagatgctaattctcagcccctttctgctgaagagaaggccgaactcaagtttatcaaaaaggaaagatgctaattctcagcgccacgttcttcgcagcatcaaccgcgtcaagtttatcaaaaaggaaagatgctaattctcagcgtcgcccgtgccgtccgcgcgcaggacccaagtttatcaaaaaggaaagatgctaattctcagctagacaagcacggcgttggttttgtcaccaagtttatcaaaaaggaaagatgctaattctcagcttatgcccatggcgccatgcccgtgcccaagtttatcaaaaaggaaagatgctaattctcagccaggcggttatcccgaaactctatttcgcaagtttatcaaaaaggaaagatgctaattctcagcgatcaatacgaatttccgcgtcttgtgtcaagtttatcaaaaaggaaagatgctaattctcagcatcgacgggagcacctcgtgcgtcaccccaagtttatcaaaaaggaaagatgctaattctcagccgcgacacatccacagtctcggcagcgtcaagtttatcaaaaaggaaagatgctaattctcagcatcgtcgcgtccaccacatcatccgtctcaagtttatcaaaaaggaaagatgctaattctcagctcaacactcgagactggcgacgtgccgccaagtttatcaaaaaggaaagatgctaattctcagccgaattcaacgagagattccaacccgatcaagtttatcaaaaaggaaagatgctaattctcagccagagtgcaaacgtcgggatgtccatttcaagtttatcaaaaaggaaagatgctaattctcagccgcgttgtgttgtatgtcgccagctcgtcaagtttatcaaaaaggaaagatgctaattctcagcatgttccacccgtcgattgccgtgtagtcaagtttatcaaaaaggaaagatgctaattctcagcattgggggcacttggatagccgtcgcgccaagtttatcaaaaaggaaagatgctaattctcagcaatcttcgtgatttacgccgtatgtttccaagtttatcaaaaaggaaagatgctaattctcagcgtcacggtcacgtatccgccgacagtgacaagtttatcaaaaaggaaagatgctaattctcagcctgcagagggccactgtttttcggatcccaagtttatcaaaaaggaaagatgctaattctcagcggtggattcgagcgaaggcgggaaggtccaagtttatcaaaaaggaaagatgctaattctcagcctgaatgtgggtggttgcaagcaccagccaagtttatcaaaaaggaaagatgctaattctcagctgagcccacgtgacatacatgtcagtgccaagtttatcaaaaaggaaagatgctaattctcagcgcattgatcgcgaccaggcgttaaccgacaagtttatcaaaaaggaaagatgctaattctcagcgactggttcggtgacgacgcggaccttgcaagtttatcaaaaaggaaagatgctaattctcagccttcggtgccttgagcttgtactggactcaagtttatcaaaaaggaaagatgctaattctcagcggattcatttcccgacactttattaaggcaagtttatcaaagaagaaggatatcaacggttagaggatgacagcacactataaacgctgagcctctgacaaagatacgggcggggcgcaagaaggggcagatgatatgaaagcgggagaaggaactcatggactatgcttcgtttgagacagcagcttatttaaatagaagtgccgggattcatgccacggttttcattgaggactgatcagagacattcaccgccattgccgccatgtgttgtagcgaacccgccatcgagctagggacatgtgcaccaccaagccaagggcatatgccctcccacaccgcccccgcacccctatctccgcaaccctggtgcctttgccgcaaggaccgcacacaccgccacaagcggcagggtagtgggcgggaagcacagcgcgagcacgacaatcgtgagcaccggcttgcgcgtgcaagcgctcacgagggctgcggtgatgcatgccaccgcgatcatcgggtcgcagccggttgccagcgccagcgcatagcccgcgctcaccccgcagaaaatcatggggaagaactcgccgccgatccagccgccggccacgcacacggcggtcgccgtaagcttcgccacgcaggtgagcgcgaggaacagcgccgtggatcgctgccagctgcccagcagcgccacggtgccggtttggccggagaaaagcacgtcggggagtccgattgccagcacccccaggaacgcgccggcaatcactgcgcgcgtcacatggcgctgctcgccgatggcggtggcgatcgtgctgctcacggcgtggcacagtaatgagaattgcgccagcgcatagccgatgatgagcgccgccagcgcccacaaccagtcgcgggtgctggtgcgcaggtagtcgatcggtgtgaagcggggcagggaaccggcggtgccgaagcatgtgacgaatcccatgatgccgagcacgaatccggcggcggcgaccacccacagcacgcctgaagcggggcgggagtatgcataggtgaagggatggcgctcggcaccttgcgccacctgcccctgcgctcctgtgaggctgcggatagcggcgctcagcgcgtggtcggggttgcgcacggcagcgagcccggaacggcgcagcgcatggatgcctgcatacacgcccgcggtcacgaccccgcatacgcccgcctcgggaccaaccgcaccgccgaacgcactcggcagcagaaacagcaccagcgacttgccgatgctcggcagccggtaggtgcctgtcgccctggccttggcgatcacctgccccagtgtgtccagactgtagccgaagcgctgtgtcgccaagccgatgagagctccgcctacgacgcccagcgccaccgggctgatttgtcgcagcagggcattgggcagtgcatcgcgcaaacgatcccacagcaggcgttgcagcagctcggaaagccgtagcgtgccgatagtgccgatgcccaccacggcacccacgaggaatgcgagcacaagcaggagcacgatgacgccagcaagcgtgccagggcgcagcggtcgatcggcggcctccatgatgcgtttgcggatgggcttgcctgatgctggccggtgctgtgcggctttcggctcccgttgcgcggccttcggctcccgttgcgcagcggcgggttgcgtcgcgttctttcgttcgtctcgcacggtgtcccttcgatgtctagtatttccttagccgctctggccgtttcgctggccgtttcaacgccatgatgccgtcatcacatgctgtcatcacaatcataaagaaccaacaacatcgagaatcaatcgttcatggaaaatcagcgagtcatgtgatgacagcggggcatacaaggtactgcgccgacatgagctgcccagacatgagtcgtttgggaggattcagctcgtagcgttgccgccgccctaggcccgctgttgtcgcaagtttttgcgagttcgttgatgcccagcagtagtggtttaatgctatcctgggctttgcaataatggtcctaagcgagcggaggcatcatgggtgatcagccgataccgattattgatcttttcgctggaccaggcggaatgggggaggggttctcggccgctagagacgatatgggtaatccgatttttcgcgttatcatgtcggtcgagatggaacgaaccgcacatgcaaccctccagttccgggcttttgcacgcaaaatcatgaacgcagatggttcattaccgcaagattatcttcaattcctgcgaaccccctcagaggggagtctggattctttgcagggcaagttccctgatgaatgggcggcttcagagactgaagcggtgcaaggcactctcgtggatggtgatgataccttcgtaaacatggccgttgagcggttgaaaggatggcatggccctgtcgtcattatcggcggtccgccctgccaggcgtattcgctcgtggggcgtgctcgtcgcacgcgcaacaaagaggcccttgagcatgatgtgaagcaaacgctttataagtgctatcttcgtttcatcgaggtgatacgccccactgccttcgtcatggaaaatgtcaagggcctgctgtccgcgaaaaacttcggagagggagtattcgggcacatcagtgctgatatgaaggcgctgggatatacgctccactcttttgttgtcagcgatcccagcactccgcatgatttcatcgtgagagctgaccagttcggaattccgcaggcaagacacagggttattctgtttggcacaagaaacgatgcgcagcaaccggccggtattctgactccgcgaccaacaattaccgtcggccaggtcttggggtcgatgcctcgtattcgctcgggtttctccgcgcgtgttcatgaggatatggactggcgtgaatacgttgagaaagcggcggcgcggctactgagaactgcagaaggcaaagagattgcagaccaattgcgtccaattacgcatgggaggggacttccagctgcccaaagtgccggatcaattcttccggaagacacgaaaaatcctttggcgtgttggtaccgtggtcacctggctggttgtgatgtgcttactgagcatgtcgcacgtaaccatatggcttccgatttggaccgttatttgtactgtgctgcttatgccaagcactttgacaaatcagtgacgctctatgacttccccaagacactattacccaatcacaagaatgctgcaggtatagctgaaggcaaagaagtgattttcgctgatcgattccacgtgcaacttgaagaccacccctcgactaccgtgacatcgcatattagcaaagatggtcactacttcatacatcccgatccggcgcagtgccgtagcttgacggtgcgtgaggcagcacgtttgcagactttcccggatgactattacttcatgggcaatcgcactgatcagtatcgccaagtggggaacgctgtcccgccactccttgcaaaacagcttgcagaagtggtgggcgcttatctcggaaggtgccaatgccttcaaccggagtcgaaagacactgacaccttgcattaattagaagtcaggcaaatccggaatcgtgaatcggaatggaatctccgcgggatgctgcagcgcgttagaaagtcgtattgcatagctgctatctttctcagcttcgtggtcggtctgagaagtctcgatggcggaggcggaggagtcttctcggcgggtgttgttgagctcgtcggggactgcctcactggtattttctcgcgcgttgttggtcgatgactcatcgacatgccgtggattatcagagactgccgatggttctttctctgcttgattttcttgtgtctgggtttgctccagatcatgcggaatgcgagtctctgattcactttcagttgacgcaggctcaggctcggaatcgacttttgcagaggtgctgtctattccgataccttgatagcgtaatggcaaacagctgggatattttttgagaagtttccagcaatcttcttttttcgcccattcagaggcgtttttcaccggcctattttcatcaagtatcacatcgttcgcctgatgggcggcttgcaacagtgaggaggattcttccttggaaagtccttggcgcagccacatctccttgaaattgaatagcacgccagcggcctgtaagtcataagacagcttcgaaatcgcgtattcaacgatattgacgcagtaactgccttcaaaccaatccgcttgcttgacgagcttgtacagtgacctgtacatgcaagcttcgcatgcaagctgcttgtaatcgtcttcggtcagtgttttcgaccagtcagtattcgcatccgttgtcgcttgttgctgcttgacgaactgcgcgaagcacttttggttaccaaggctggctatatacggtttctggttccagcacatttggtattttgcgccttcgaccattttgataacttggtttttcggatttagctttgtgaaagctcgggcctctttccctgacttttggttcttttcgttatcatattgcccacgcatgcgttcgtagaaccaatgggtttgtgtcccgttcggcatcggcgcgaaaacacgctttgaaagcttctcgagtgtcacttgatacgggttattcgccgagaagtcggcttcatccaccttgttctggctgttgctgaatcgagagatttggggaatgagttcctgtgcggatgccttgtctacaacgatgagcttgacgggaactcggacattgcttaagtcaggtcttggcgatttcatctgcgagtaaaagatggtcgccgtagtctgacctccattgacgatttgaagattatcggcacgtgtaatatgcccatcatcgctttgagtgatgtccgtggctgtcgcggtgatgccattgttgaatgcgacaaaattatccggctggtctttcagggtgttgttgattcccttgttgattttcccgcgcagcgataggaaagacctgacattagcctccatgagcttcgatccatatttacggtatgcttcagctaaatacgtcgcagggatgaacatcagatagaggcgcattacttcattgctggtgtctgattcgacagcaggtatacctggctcaccgaagtcaaggaagaagttctcgtcggtcatcatggtcgtcttggtcttttgaaggcgactgatatcccagatatgtttctcgatgagataattgcgatgcttccccgcggaggtatacgaatctttgacttctttcctctcgtcggaatctatctcaccgcgacctgtgtatagtctatcggtcaggaagtgcaacctgaaccggatgatgttgtccctattttcgtgaatgcgggaagcgaggtcgtatgcatcggtgctttcttcgatttcatcaagaatccgccccgtcaaagctcgtcctgcgaaacgcaacatcgctttgaagtgtttttcgcattcttgggtatttatcgtctgtaatggtgcaccgaggcgaagaagacaatcggggtcaacggcaatgagagtaattgattcatctgtatcgaatgatgatggatcatacccgctgatgaaaacctgttctttgccattggccgcatagttgcagggggattccacgaattcatcaatggcttcgcaatcttcaaggattgaacaagcgatggagaagaatgattcgtcgccgaatgtgccattcgtggcttgctcgtcttgaatcgttgctcggagttcttttctgaagtcctcgatatcttcttccatcgctgtctttcgttctcgtcaagtggcagttggactaccgttcagtttccccatgctgcggcgctgcatgactttctgctattctaaacggctcgatggcatgtcgggcaatcttgtatgtcactttgtcaatgccactaggaacttcggaagtgctaattcgagggaagccctcgccgattgtaaatcggctgatactgataacggaaaaggcttctgtcgtagcaatttcatcggtcagtgagattcccagctgcaaaagaccatcctctatcatctgttccgtatgcggaggattgttcgcggcattcaccacttgtcgcactgcatccgttaatgtgattcgattcgaatcattctcactgcctgatgcgagttcgaccacgataaggaacaaattccagccatcacgatcgagttgatcaggtgatgagatggtgatgtccttcgcggaagagtgaatcgtcttcacttcccacgcggttttctctgcttcgaatgtgaaatcctgcggggcactgtacggaccgctccagttttcgatgatgctgtcgatggggcagtctgtgcattcgttgatgtacgttgccgctaataattctcctaatacgcctcgaatgagattcgcagtgttggaacgcgacagtgccttgagcagatgttgccattcgttcaccgaggaatagattgcgttgagcgcatcg

SEQ ID NO: 559 - DNA, 23453 bp, synthetic construct
  source 1..23453: mol_type = other DNA
  misc_feature 1..23453: note = Synthetic
gcggccagaccgtcaaccgcgccgacgagatgctcgaggactacgcgaagcgcgactatgcgaagaacatggacatggcccgcgccatgatccccgattcgacgccgatcgccgtggccgaagacatggtgcgcggcctcaaggcgcaggagccgcgctggctgcatttcgagaaccgcgagccgctgccgatggacgaggcgttcgacaaggacctgcccgaactcgaccagctgcgtgaggtctatgcgaagattatgacgcgcaaggccatctacgacgcgatgcagacgatggaataccagatcaactcgaaccgcgtctcgaacggtcagacgccgttcgtcaccgtcggcttcggcctcggcacgagctggttcgcccgcgagatccagcgcgcgatcctgctcaaccgcatccgtggcctaggcaaggaccgccacacggcgatcttccccaagctcgtgttcacgatcaagcacggcatcaacgccgacgagggcgacccgaactacgacttgaagcagcttgcgctcgaatgctcgacgaagcgcatgtaccccgacgtggtgttctacgacaacatcgtgaagatcaccggctcgttcaaggcgccgatgggctgccgctcgttcctgcagggctggatcgacccgaagaccggtgaagatgtggaagacggccgcatgaacctcggcgtcgtcacggttaacgtgccgcgcatcgcgctcgaatcgcacggcgatgtggaccgcttctggcgcctgttcgacgaacgcatggagaccgcgcaccaggcgctgcagttccgcatcatgcgctgcaagcaggccacgccggtcaatgcgccgacgctgttccgctacggcgcgttcggccgcctcgacgcgaacgacaatgtggaccagctgttccgcaacgagcgcgccaccgtgtcgctcggttacatcggcctgtatgaggcgactgccgtcttctacggcaagaactggatgcgcgaccacggctgggatccgcagggcaaggagttcgcgctcgagatcgtgcgccgcatgaaccagctgtgcaaggactggtccgccgccgaaggctaccactattcggtgtactccacgccggccgaatcgctcaccgaccgcttcaaccgcatcgaccgtgacaagttcggcgaggtcgaaggcgtgaccgaccacgacttctatacgaactcgttccactacccggtgtggctgcagcccacgccgatggagaagctcgactacgagaaggacttcccgtactacgcttcgggcggcttcatcaactactgcgagttcccgtgcctccaggccaacccgaaggcgctcgaagccgtgtgggattacgcgtacaacatcggcatcggctacctcggcacgaacacgccgatcgaccactgcttcgaatgcggcttcgaaggcgacttcgagccgaccgaagagggcttcaagtgccctgagtgcggcaattccgacccggacaagtgcaatgtgacgaagcgcacgtgcggctacttgggcaacccggtgcagcgcccgatggtgcacggacgccacgaggagatcgcccaccgcgtcaagcacatggctggtgagaccggccgcgtcacgctcggcaacggcgagacgcgcgaatggttcgaggaaacgaagtaaacgcacgcgcatagcgcgatcggcagggcggcacatccgcggtgaacgcgggatgtgccgccctgtgtcatgatggatgcagattgggcatggaggagcaggaacgcatggtacaggcaggcacacgccacgatttcgtcaagaccaaggaataccggggcccgtcggtgccgagcccgttgacgaacaatccgcgcgcggggcagtggacgaatgcgatgagccacaacatgatcgccgactacaagcggttcctcatgaccgacggcgaaggcatccgctgctcgctgtatgtgtcgggctgcccgttccattgcgagggctgctacaactcgtcgatctgggatttccaggcgggccacgaatacaacgagaagctcgaggcgcagatcatggatgaccttgcgcagagcttcgtgcagggcatcacgttcctcggcggcgaaccgctgctcaacaccggcgtgctgctgccgctcgcccgcaagattcgcgaacgcttcggccacacgaaagacatctggtgctggaccggctacacgtgggaggagctgatgcgcgagggggagagccccgacaagctcgacctgctgcgcgagatcgacatcctcgtcgacggccgctacatcaaaacgctgcacgattcgctgctgcagttccgtggttcgtcgaaccagcgcatcatcgacgtgcccgcatcacttgagcagggcgaagtggtcatctggggcaaactgcacgaccaggagcggttcatccccgagatctacggtcacgagcgcgccgccggcgaaggcgacgcgagctgacgcgcacggcacgctagtccgctttggccgcttgcgtgtcgatccacgtgttcaccgcgtcaatcgcctcattgatcgtcacctcggccgctttgtacactttggaatccttgatgcccgagtcgtcgatgagccgttggccggcgtcgaccgccttctgcagcacgccggtcaagtaagatccaacggccgaaccgtcatagtgcgcgcgcagatcatcaagcacgccaccagcgcggtcgagcgcggaacgcaatccgcttttcgcactgtcgacggcgtcaccagtcgtctcacccgcctcatcgagcgcatcggacgcgccctgcttgaggtcttcgccgccgagcgcgtcatccacctcgtcctgcgccttctgctcgatctgcttcgtggactcgcgcagcgaatccgtggcgctgtcgagcgtgtccgcgaccaggttgagctggatgatcgtcgcgttcgtggcgcacccctcgtccgagaccgtgccctcggcggcggtcgcggccttcgccaccgcgtcgaggatgtcatccaccccgagcacattgcggatgaaccgttggatcgccggcgaatcgtccgaagtggcgagcagcgccttgcgtgcgtcactgaactcactgaccgctgtacggcagcgggcgagcgcctcggaatgcttgtggctgtacaccacgccgccaatcaccgcgccgatcagcgcgatggccgcgatcaccgccaccacaatcggccattttttgcgcttgtgcggctgcggcacacccggtgcgccgcctgctgtatagctcggcggcaccgcctgtgccgcgctcgcgcggatctcatggaccggcagcgcctgcgttggcggatcttcttcgaactgcgccatcgcaacgtcgatgcgttgtgtgggctgcgtctgcccggacccgtctgcactccgaccgctcatccctgcctcgtttctcgcgccatcggggaaaggcgaacccgccggggcgcaatggcgcgcatgtgaaatcggttagggaaattatagatgggtgtctacgcagtgagccacacgctgaaccgcctcttaccaacgtacccgctcggcactaagataatcggattattgacgattatggcagtcgcgcgcgcggcaacacagatgacggtgcgcgcccaccaacgcacgtcccgaagatgaacgaggtatcgatggttcagacggcacccatgagcatgccgaacgacaacacaacaaccgagccgaaccgcattccgaccgcccacccagaacagcgcgccgaccccgcgcgcccgctgcgcgtggggctcgacatcggttcgaccacggtcaaagccgtggtgctcggtgaatcggacgcgctgagtgagccactgttcgccgactaccgccgccaccacgccaatgtgcgcgccaccatggagggcctgctcaaagacatccgcgccacactcaccacgctcgggcgcgccgatgagccgatcgcgctcgccatcaccggatcgggcgggctggcgctcgccgacgcgctccatgtgccgttcgtgcaggaggtgatcgccgagacgcgcgcgatcgaccaggatgtgccgcaggccgacgtgatcatcgagctcggcggcgaggacgcgaagatcacctacctcaagcccacgccggaacagcgcatgaacggctcgtgcgccggcggcacgggcgcgttcatcgaccagatgagcacgctgctcgacaccgacgctgccggactcaacgcgatggcgaaggactacaccacgctgtacccgattgcctcacgttgcggcgtgttcgcgaaaaccgacctgcagcccctgatcaacgacggcgccgccaaaccggacctcgccgcctcgatcttcaccgccgtcgccacccagacgattgctggcctcgcctcgggtcgcccgatccacggcaccgtcgtgttcctcggcggcccattgttcttcatgagcgagctgcgcgaagcgttccgccgcgcgctcgacggcaaggtcgatgaattcatcacgcccgccgacgcgcacctgtacgtggcgtacggcgccgcgctcaccgccggcgaacccgaccagatcgagcacgccggtgactacgcgccgcgcacggcggacagcatcatcgccgcgctcgaacacctgagcacactgccggcgaacaccgccaccatgccgccgctgttcgccaaccgcgccgaacgtgaggcgttcgacgcgcgccaccaccgcgaacacgtgcacatcggcacgctcgaaggcgcgcgcggcccgcacttcctcggtatcgacgccgggtcgacgacgattaaggccacgctcgtcaacgacgaccgcgagatcgtctggtcatcgtacgccacgaacgacggcagcccactgaccgcagcgatcgagatcgtgcgcacgctcgaacacgacctgcccgaaggcgcctggatcgcgcgcagctgcgccaccggctacggcgagggactgatcgccaccgggctgcacctcgatgagggcgtggtggagacgatggcccactaccggggcgcggaaatggtgagccaaggtgtcaccgccgtcatcgacatcggcggccaggacatgaagtacctcaccatcgacgacggcgtgattgattcgatcgccgtcaacgaggcctgctcctccggttgcgggtcgttcctgcagaccttcgcgcgctccatgggcctgaccatcgaggagttcactcatgcggcgctcgcctcggaacaccccgtggatctgggctcgcggtgcacggtgttcatgaactcgagcgtcaagcaggcgcagaaagaaggcgcgagcatcgaagacatcgccgccggactgtgctattccgtcgtgcgcaacgcgctgtacaaggtcatcaaactgcgcgattcgggcgagctcggcagcacggtcgtggtgcagggcggcacattcctcaacgacgccgtgctgcgcgcgttcgaactgctcaccgaacgcgaggtgacgcgccccaacatcgccggactcatgggcgcctatggtgcggcgctcaccgcgcgcatgcactacgacgacatcgccgacgacacggacggcgacaccgacgccgctggcgtgcacgtggcgcgcatcgacggcgtggaccacaccgtctcgagcatcctgcacggcacggccctcgacgagctgtcgatgacgaccgaacgcgacgtgtgcaaactgtgccagaaccactgcaagctcaccatcaccacattccacgacggatcgcgctacgtgaccggcaaccggtgcgaacgcggcggcgacgccaaacgcaaacgcagcgaccggcccaacctgtacgacttcaaatacaagcgcgccttcgcctaccgccgcctgaccgataaaaaggccacgcgcggcgaaatcggcataccccgcgtgctcaacatgtacgaaaactacccgttctggttcaccttgctcacgagcctcggattcaaagtcgtcatctccgggcgctccaaccacgaactgttcgaaactggcatcgaatccatcgcgtccgaaaacatctgctatccggcgaaactcgtgcacgggcacatcaagtggctcctcaacaaaggcatccgcacgatcttctacccatgcgtctcgttcgaagacgacctggtgcccgaagccgacaaccactacaactgcccggtcgtagccaactaccccgtggtcatcggcgccaacatgcccgaactgcgcgaagacggcatacggttcatgcgcccctacttcaacctctccaagcacagcctcatggtcgaccgcatcgtcgaggaattcgcatgggccggcgtgacgcgcgaggaggccgaaacagccgtcgccgccgcctacgccgaagacaccgtgttcaaacacgacgtgcagcaggaaggcgtgcgcgcgctcgcctacatgaaggagcacaactgtcgcggcatcgtgctcgccgggcgcccctaccacgtggaccccgaagtcaaccacggcatccccgagacgatctgctcactcggcatggtcgtgctctccgaagactccgtgagctggctcgaccccaacgacgtgcccgcgctcaccgcatacctcgccgaagacgagaccgacccggccgcccacacgagcgaagggttccggcacgtcgatgaccgcaagctcaccaccatgccgctgcgcgtgatgaaccaatgggcctatcacgcgcgcctctaccgcgctgcgcagttcgtggcctcgtggcccggactcgaactcgtgcaactcaactcgttcggctgcggccttgacgccgtgacgaccgaccaggtgtccgaaatcctcgccgacaaagcagacgtgtacacgatgctcaaaatcgacgaagtctccaacctcggcgccgccaaaatccgcctgcgctcactcaaagccgccgtcgaggaacgcgaacgcaacgcccagcgcgccgctacgcccgcagctggcgccggcaccttccggcacaccggcaccgcagcgcccacacccggccggcagattctgctcgacgccgtcatggggaggcaagccggcgccggcgcccagcagaaccggcaaagcgctaccatgagcgcctacgccaaccgcgtgcccttcagcaaggacatgcgccgcgactacaccatcgtggccccgcagatgagccccatccacttccggctcgtcgaagcggccatacgcgcctccggatacaaattcgacgtgctcgaacatgccagcaaaaccgacgtggagaccggcctcaaatacgtgaacaacgacgcctgctacccggcgatcatgaccgtgggccaactcgtggaggccatcaaatccgggcggtacaaccccgacaccacggcgctcgcgatctcgcagaccggcggcatgtgccgcgccacgaactacttcgcgctcatccgcaaagcgctcgtggatgcaggctacccgcagatccccgtgatcgcgatctccacgcaaggttttgtggacaatcccggcttcacgcccacggtaccgttgctgcaccgtgcggcaaagtcgctcgtcatcggcgacctgctcatgaagtgcctgtaccgtgtgcgcccgtacgaggcgaatccgggttccgcgaaccgcctgtatgagcggtggaacatgatcgtgcgcgagacactgctcaaccacggcatgtcgaagaccgcgaagatgttgtacggcagcgcatactggccgtatgcgaagctcgtggcgaagatcgtggagaccttcgacgcgctgccgctcaaggacatcgagcgcaaggtgcgcgtcggtgtggtgggcgaaattctggtgaagtaccagcccgacgccaacaaccacgtggtcgaggtgatcgagtcgcaggactgcgaggccgtggtgcccggcatcatcgatttcatgacgatgcgcccgtacatcaacgaatggaacgagcgcaatctgggcacaggacgcaacaaggcgctgtacacggcgttcaaaggcgtaatccacgcctacatgaagccggtgaacgatgcgcttgacgcgagcggtggcaaattcgagaaagacctgccgatggaccagctcgtggccaaggcgcagaccgtcacgtcgatcggcgtgcaggccggcgaaggctggctgctcacgggcgagatcgtggagctcatcgaatcgggctgccccaacatcatctgtgcacagccgttcgcgtgcctgccgaaccatgtcacgggccgtggcatgttcggcaagatccgccgtctctacccgcaggcgaacatcgtctcgatcgactacgaccccggtgcgagcgaggcgaatcagctcaaccgcatcaaactgatgatcgccgcggcgaagaagaacgccgcagccggacgcagcagtgtgtgaattgtgcacgttatagggattttttagaacccgcacgccgtgtccccatgcgcgcgcgttagtatgggcacttatgacagcaccacgagtttcctacgcgcacctgctggttcagccgaacccgcggcacgtgcgcagccttgtccgcttcttcgaggaggggtgctccgcgccggggaccggggggttcggcgtggagatcgaacatctgcccgtgcacaacgccgacgacacggcggtcacgtacggcgagccgaacggcgtggaggaactgctgcgccgtctgcgcccgtactacgaccccgcgcaggagtactggcaggacgatcatctcgtcgggctcgcgcgtgagggaatcgccatctcgctcgaaccgggcgggcagatcgagacgtcgatcggcattttgcgcaaacccgaggatctgctcaaactgcacgggcagttcatgcgcgaagccgcgccgatcctcgacgaactcgatttccgcctggtgaactacggctaccagccgaagagctcatacgcagacatcccactcaaccccaaactgcgctacgccgcgatgaacgagtacttggggcgcatcgggcagttcggcccgtgcatgatgcgcgcatccgcctccacgcaggtgagcatcgactatacaagcgagcgcgacgcgatcgacaagatgcgcctcggcaccgcgatcggcccgatcctcgcatggttcttccgcaatacgccgtatttcgaaggtgcgccgaacccgtggccgttgtgccgccagcgcatgtgggattacctcgacgtgcagcgcaccaacgtgacgccgggcctgtacgacgagcggttcagctgggaggattacgcggccgacgtgctgagcaccccactcatgttcgccgacctgacccacacgccggaagcggaaggcgcgtctgtgcatggcatcgaattcgccgcgttctacacgaccgcggccgacctgtacccggaccgcgaactcaacgcgtacgagatcaaccacgtgctctccacgcacttcaacgacgtgcgtttgaagaacttcatcgagatgcggcactgggactcactgccgatcgaacgcgcggaactgctcacgcagatcgtgagcaacctgttctacgatgtagagcgccgaaccagcctcgaatcgtacttcagcggactgaccggcgaagacgtgcacgccgcaaaggccgtgctgcaggcgcgcgggggagacgcgaagccctacgaccagccgatggactactgggccgaagtgctgggcgtcggggatgcacttgccgatgtgccgggagacgcgaagtggccggaggtgcggcaggggtaagttgcgtgcgggcggatagtcgcgtataatcagatttgctaatttccagtaaggatggactcgatagccatcttgaatgctaacggaaattctccgcaggggaagcttcggcttccccgtttccattccatcgtacttttggtgcataacgtgcaaatacagaattattgatgtagtaggagcatgggtctacattaggtgatttgagaaatatgctatacgctgagagaaagatgctttccaaaggagggaacatgagacaaaagcgtcacgttattggaattgatgttggtctgaattccgtaggattagcggccatcgagctcgatgagacagaaatgcctgtgcgcattctcaaagcaatgagcgtgattcatgatgggggtgtggatccaaattcgcagaaaagcggggattctcgacggcagcaggctggtatagcacggcgtacacgtcgtatgcgtaggcgtaggaaagctcgcttggccaggttggacaaaaaacttagcgatttggggttccccatcgtggacgaaaagctgctccgcggctttgatgtgtggcggattcgtgcactggcggcatctgagtacattgaaaatgaggatgagcgcaaacgtgcgatctccatagcctgtaggcatgttgcacggcatagggggtggaggaatccgtatattcgtgcggaatctttgctgagcgtggatgcaccgtcatcagagcaatatcaacaattgcgcgataatgccattgctatacttggtggggaatatattccggaaactgctactcctgcccagatcattgatgcagtgctcgctgaaaaccatggtccggcaacccgcatccgtacatcgactggcagtaagaaacttggcactagggaagggcttatttccactcgtcttatgcaggcggactatgcatatgaattgcgcactatcttcaagcagcaacatgttccggaagaagtggctcgtgagttgattctcgccatattcgaagcgaaatctccgcgtggctccgctgaacgccgtgcagggcgtgatgccctcgataccacggagatgagggcatcaaaagcttctttggccttccaacgttatcgcatcgccaatatcagcaccaaccttcgcgttttggatggcaatgcactgcgaccgcttacggtcggtgaaaagcaacaggtgtaccagcgccttgcgtcgcaacagacggaagagcacctgttgtggaacgatatttgcaaggaactgggattgccgaggaatcgtctcaagggcgttggatcgctcacccaggatggcgaggaacgagtgacaagccggcctccgcaattgacatccgtgcagcggattatgggattgaaggatccaaagctgcgcaaactcctccagcaatggtggaatgaaactgatgattcagctcatgaggcaatgattgcattgctttcgaatacggttgatattgacgacaagcgagaagacccgatatttatagaagccatcgaatttattgaacgtcttgatgatgatgcgttgaccaagttggattccattgacttaccaagtggtcgcgcggcatattcagtgaagacactgaataaactgacgagacgaatgctggatactgatgacgatctgcatgcggctcgcaaagcattgtttggcgtggacgataattggcggcctccgcaaccgccgatcaatgcgcccctaggtaatgctgccgtggatagggtgctgagaatcgtccatcgattcctggtcgctgcgcaaaggcgatggggggatccagagtcggttcagattgagcatgtgcgcaatgggttctcatcgattcccactgcacgtcaagacaagcgtgattatgagtcctatctcacgaagcgaaacacatatcgagctcaacaagcagagaatctgaaaaaagagtttgggctggataccgttcgcgattacgatcttcggcgcatcgagtgcattacccggcagaatggcgagtgtctgtattgcggccgcaccattaccttcaagacatgtgagatggatcatatagttccccgcaagggtgttgggtccacaaataccagaaataactttgctgccgtatgcgaggaatgtaatcggtcgaaatccaatatgccgtttgccgtatgggcacaaacggatgtagcacggcagcggggcgtttccttcgaagatgccattgctagggtcaagatgttcaatatcgattcgtcggcgatgagcagtcgagaggcgaaggatttcatgaattctgtaattgcacgactgcggcagactgaacaggacgaaccgattgataatagatccatcgaatcggttgcttggatggccgatgaattgcatagacgtatcgactggtattacaactcggcacggtatatgggggttgtgccggcagacacgcctattgcgacacgtgtaagcgtgtatcagggcggtatcactgccgaggcacgtaaggcttctcaaatcgatggacggattcattttgctggagcaaggtataagacgcgtctggaccgcaggcatcatgccgttgatgcagcagtaatcgcaataatgacaccaggagctgcgcaatctttgcagattcgccggaatctgcatatagcgcagaacgcgatagggcgcattgaaaaggacgaagttgcgtggaatgagtatccgactccggggaaccaaggatatgctgcatacggcaaatgggcggagtctatgcatgcgctgttaaatttgctcaacgatgcattggatgcagaccgtataccagtcactcatttataccggtattcactcggtaattccgtggctcatgatgcgaccattcactcgctggttaagattcctctgagtaacgcgatggatgccaaaatggttgcgaaggcctcaacaccagcattgtattgtgccttgactcgtttgccggagtattcgccgaagaacggtcttcctgaagatgctcatcgcgagattacagtgaatggaacgcattatacggtatcggacaatgtgacattcttctctcgaaatggcgcgcagatcgctgtgcagcatggatcagccgatatcggatgcgctattcaccatgctcgcatctataagtggtataaggagaacaggaaaggtgaacgtacatattcgtacggtatgattcgcgtgttccaagccgatctgctgcgtgccgttcatgaggatttgtttacatgcattctgcccgaacagtccgtttcgatgcgatacgcaggccataatgtggttgatgcgattcgcaacaatcgtgctgaatataagggttatcttattgcgggtgatgagattgagttggattttcccgacgatgtgagtgaccagctggtttctttccttgatctctttgaacaggatctgcatattgatagcgctattcttggtcgatgggtggtgacgggcttcgagtctgcgacgagaatcaacctgcgaccgagtgtattggcgttcgaagggttgtcgaaagtcctagaacgattggatgtcgactctaaagtccttgctgatgtgaatacgctcttttccagaagttggcgtttgaccatagggaagattcttccctacaaagcaacggtagtccgtcggaatacccttggtgagaaacgatatgtttcctacaaccatatgccagtttgttggtccttcgattaagcgggtggaaacatgcaaagcgcttggcgagtcatggactgcacacaattacgaggtaagctgcgatatgttcgcggacgcttgcgtgtatgtcgtgaagacgaggatccggtggagattccgttggctcagattgccgtaatactactggggcaaaaggctacatgctctacggcattgttgttcgaactcgcagaacatggtattagtgtcatgctctgcgattggcgtggaattcctgtgggagccttgcatacttggagtgccttcccaacatttgttactcgcagacagcgtgcacaggtctcgatgagtgttccacggcagaaaaacgcatggatgcagattatcaaagccaaagtgcgaggtcaggcgcattgtcttgatttatgtgaaaaatcaggtgggaacgaacttcgtgagcttgcgaaatcggttcgttccggtgatttgaccaatattgaaggacaagcggcgagaaagtattggcagtatctttttggtgaagagggttttcgtcgcgttccgggagcaggagaggggcgtaattcacaactggattacgcctatgcagttctccgcggtttcgttatcaaatcaatatgttcagccggtttgtcgccggttttcggagtcggacaccacaaccggtccaattatttctgcttggctgacgatttgatagaaccatatcgtcctgccattgattgccgggttgcgcaactggatatccaaggatcttccctagggaaagacgaaaaaacagcattggtgcaggcagtgcactctcagttcaatggagggctgacaattcccagttccattgacgagtttgcgcagcaatttggcttgtattgcgagtcaaaggagagagtattgacaactccgatttttggaggacaggatgaaaaaggatgaggagagtgggggaatgtggtgcttggtgatgtttgatttgcctgtgcagaccaggaatgaacgacgcgaggcaacagcgttcaggaatatgctgattgatatgggttatatgatggtgcagttctccgtgtatgcgagatattcaccaacccaatcgggaaaccgatccacggtgaaaatgattaagcagcatttaccgtccggcgggaaagtacgggtggtgcatattagcgaccatcaatgggcgcaatctctgcgttttgtcaacgaggttcctcaaaacgatgtggaggcaccagatgtctgcactgttttttgaacatctttttaataaaaatcattgggaaacctaccttcttggcaggctatcaagtctatcaagaaggtaggaagctaatttccagcggaacgggtctcgttggaacagtcatgtcaagtctatcaagaaggtaggaagctaatttccagctgctggcagccgagggtgtggcggtgtgcaagtctatcaagaaggtaggaagctaatttccagccggcgaactaaaacgagaaatcccaccccaagtctatcaagaaggtaggaagctaatttccagcgatcaccggcaacatcacgggagccaggcaagtctatcaagaaggtaggaagctaatttccagcgtgtgagtcatgcatgaccattgtgtgccaagtctatcaagaaggtaggaagctaatttccagcaacccgagaaaaccattcccgcgaaggacaagtctatcaagaaggtaggaagctaatttccagccacgcaatgcgcggtgatccatgcagcccaagtctatcaagaaggtaggaagctaatttccagcacaatgacacatgggaggacgaagcatgcaagtctatcaagaaggtaggaagctaatttccagctcgcggcgagcaggctttctgttgtgcgcaagtctatcaagaaggtaggaagctaatttccagcagcgcatacgtggcgagtggaatgtaggcaagtctatcaagaaggtaggaagctaatttccagccgtattcgacgagtgcgatggatccgcccaagtctatcaagaaggtaggaagctaatttccagctcaacgccaaaaacggtgtgccctcgcacaagtctatcaagaaggtaggaagctaatttccagctcatgtcgatgttgggaggcgcgaagttcaagtctatcaagaaggtaggaagctaatttccagcggtggcagtcgagcggattggccgaagacaagtctatcaagaaggtaggaagctaatttccagcgcgaaccgaacaacagtgtgtcggtgctcaagtctatcaagaaggtaggaagctaatttccagcacgcgctgcgcatcaaccagacgcgcgccaagtctatcaagaaggtaggaagctaatttccagcgcggagcatgtggtcacggcgatcgcgacaagtctatcaagaaggtaggaagctaatttccagcatgggtctacttatctcatgtgtcaaggttagtttatcaaagagcgagccaatttgcagactcccctatcccgttgtctcgatgaaagtacaaggcccaatagattagtaattgtccagaaaaccagtccgaggggattttgacctatgagaatgatatattcgcatctgcttagaagaccaattggccatccagattgatatcggacacagcaccggcataggggcaataggtgcgatgctcgggtgtagcatatccaccatcaggaggtagatcaagcgcgatatctggttcccgtttaacgagagtgagtcctattacctaggtcaaatgcctcaagacgggtctgtagccggtctattgcatcgctggcctcgcgcaatataagcgcagactgaagccgtgcagccgcaggcggtcgcatggctggactgtggtcgcttgctgctgccggtgtcatgggcaggctgcgtgtcctgtggccagatgatcggctcatatatgtgtgtccaggataattacagcgagcgcgggacggctcggttccgaagcatatgttcggaggaggttggaagatacttgagcggcccaattcgactgatctgcttctgcaggatctcatgcaggttctcttggatggaaaggcctatgcggacgccgacatgatccaaagtgccgctgatgctggtgaatacgctggtggtttcgattatgcgatgctggtgttcaaggatcttgaactgattccagacgtgcggttgatttgtgccgtgctggattcaccgtggtgtgagaaagactcctatgccgatatgattgggcgtgaactgcttgcaaagatgcagtcgaatcgcggaagatgatgggcggttacactgatagggggaaaggcggtgatatgcacacgacgttggatttgagccaatacaatgatgtgacggcatatgctgatgcagtacatcgtccagtggtgcatgtggattatctgccaactccacaagctgtcgcacgccgtgtgcgtgaggcgatgaatgaccggcacctgagtatggagcagctggcgaaggatgcgcatgtcagcatccaggctgtgtactcgctgcgcgatagtggtttggcgagtctgagcgaggctcgacgtgtgttcgctgtactggatattcgtgtgcatgcatacccggtagaaatggtgccattgtcgctatgagtgatgtgctgcatacatggatgggcgattgacatcatgtgggtgtaatcactcttggcgggaaaggcgtggccgattttgagtatgatctgatctctctggccagtcatatacgtcctgggataggaacctgtggatggaacgcaactgcgctaccgtgccatctgggacaggaagatcatccatcagctccagcgccctcgccgtggcaagcgaatgcttgatctccgccaattcccgttgcgtgcgcgcaccagccaagttgcgcaataaatccgtatcaggaacgagatacggatcgaacaccggttcgctcatcggtatgtattatctcttgtcaagaccgtaccgggcacgcacacgacggcccaacgtcgcggcgtcaatcaacccattcgcgtaatcacgcgcctcatgcaggaacacatccgatacatggccgccatccatctcagcggaatggagggcaagcgcaagattgcgcgtattgcgtgcggccttcgctgcacgcaccatttcaacattggattccttcacagacatgacccaattatcccacataccacctgtcatcgtaatgcatttatcatggttgatcaatgaccatcatgtctatcactgaacgcagccgagcataccgtgggagatggaatgcgccgctacgcgtcacatgttggtttgccccgcatgcgcggggatgatgattaataccatgatgaaggaagtgctagcatgaaaaaccttagactcgatgctgcttgtgctggtagctttgaacagtttctcgccgatggctgtgatgagacaacattacaaaatgccattgggaacgcgtcgataatgtaccacggcatgttttatgaaccgttcctcaatatagaggacacgtccgtcgacgtttctgatgaagaactgtaccagtgggtctgctggtgtatcttctacgggaaattaaaggaagaatatccactcatgaatcaatgaagcaatgcaaagcctcctattatgaggccttttgcatagaactgaagaggcagatgtctgttcgcttattctgcaagcacgggatgattcgtgctcaccaaggatatgagggagaatctcctgctgtacaaacccatgtgggtcgtgtaacggcatggttaaccgccggcctgtttgcgcggacgacctccaccacgccacagccaggactgcggagttccacgtgtcaatctctccgccttctagccgcgcatgcggccgattatcgcatccggctccggcggcctcaggttgaataggccaccgctcgtgatctcaaacgctcgccaacctgttttgctcccggatgcggctcaatcacgcttcgcaccacccagcagcgagaacgccgcggcgatgatcgcgcaaccgaacgtgaccaacggtggccatgcgaaccatgcactcgcggccgtgctgagcgcgaacaccgcaccgattatcgattcgtacctcataatgccttcaatctgcttctcgcatgtatctcagatcttgccttgggctttgagttgtcggtattcgtcgctcagtttgaatgtggacagttcggggtctgtgtcgaatctcagtttccactgctcggcgatccatgcctgctcgtcatctggcagtgggcgcacaccagtcttctcgtggatacgcttgagttcttctggattcgtgaccggtgtgagctggtcaggctcaaacgtgtatcgccttgatcgttcctcgctgatcgacataagggcattctaccagtctgaatcaatcagccgccgtacaatcgagcaatgagtaggcaaccaaattcgactgatctgcttctgcaggacctcatccaggtcctcttggatgggaaggcccatgcagatgcggatatgctgcaaagtgcagctgatgctggtgaatatgctggtggtttcgactacgcgatgctagcgttcaaggatcgtggtctgattccagacacacgattgattcacgcggcgctggattcgccgtggtgtgaggaagactcctatgccgatgtgattggtcatgaactactcgcaaaagcggagacgtccattgcgtcgtgatgcgtccagctatcaactccaggaatccggcctataggtcaaaatgtgttgattatgttgcgggtttggcgttgcggcagtaagtgtgttggggtgttatttaggttcccagtccataaccgcgtttcgcgctgctgcatgacgaatccctgagtgcccctgacgaaagtcatgtccggagccgctgagcatgacgactgtctgtaattgtccaaaatcacgtggccacagtgatatttaagacagatatgactggtaactgtccgaaataacgtggtggcatcgacatttgcgacatttaggcatccaaatccctcttgacggccacctgtgcgcctaactatccatgcagcgccggctagcctgaatcaacgcaaaacgatcaatagactcatattgggatacgacctcatccgttcataccggaagataccttttcaatgcgcgcatcacatgaagtgaggtgatgctcctcgccctattcagagctcaaatcatcacctcatgatcatcgtaagatacgacgtgtattacccgtagtagcttatcaatgcttcacgagtattcttggctgcgacggtgatgcggatggagtcaaagtagttctggaactcttaccgcctgtggccgacgtctggatgggcggcggcgtctgttttcttgctacgggtagtgctctttttgctacgggtagtgcttctctggggcgctgctcactataatctgccatttttcaacgattgtaggagggaattgcccgaggaatcactacccgtagcagaggaaccactacccgtagcgggaggagcactacccgtagctgagaaggcgctacccgtagcggcggtggtgccacagtcaacgcgaattcgctgtttatgtcacccgcatggctgctggtgtcgatggtcagacatcagcagccataagggacgcgattattggactcccgtgactgacctcagtcaccaactaccatctcgggcgacttttacggtattccatggctagactcagtcgctcactaccgtctctgacggttcggggtctttgtgtcagtgactttcctcttctcaagcagggcgttgccgatttcataggcatgcgaacccttttcacaccgtggagaacccatcatggactggagcagctgagtaggtggagtaataccgagttctcggcaggaaagcatcgcaaagtcgaaacctatggcaaattcaccggcaatggcgatgttgtcgagcatgtcagcatgttcgtatgccttggcttcttcaagaatctgtgcaaaatcggccaacagaaggtcgtcagggtcatcaaggtcatcagggtcgtctgcgctggccggggtctccctgttcgcgagtggatactcgtcttttgaccgcccgtagaagatgcaccagctgacccaccggtacagctcttcgtcggagacgttgatagaggtgtcctctatgttgaaaaatggttcatggaacatgctgcaataggtcctcaatgcgtcatctgtgtctttttcagtgtcgccgcatcgtggtcctcggcgaggaactgctcgaagtcgctgtcgtagaagacatcaagcccttgcgttttcatgccagcatttccttcaccatggtattgaatattgtaaacgactgtgggggatacttctctatccagtgctctaaatagaacacaacacccggtagattggtatctggaaacgaatcggaggggtgctacgtgaagagggacgaaaggccacccggatcaagatggccgcagtgccggcatatgggcgattgtcacggtacccgaggtcgtcgcccgtccaacgagagcgagtcgtacgggctatatagtacgtacactgcatacccaactcaaggaaggcggcaccaacacgcgctcctccgaacatcccatgtttggcgaacgctgaaacgcccgatggtggattcctacaatgcgttccatgagacgacttccggaacgcattgggctgtggctggccgatgcgatcatgagcgtgtacgctttccagattccccgcaccgagcaccgatctggctgtggatttccacatcatccagatcgtttgcgtcgtgatcttctgtctgcagggcgccacgatactgtcctatgagaaaatccaccatggcagcatcctgcggccgcgcgcatagttcggacgtgtggcgaacaaccggattcgggttgcgcggcccatgccacacaaacacgacaacaatcggctgggtgcctcggcatgtgactggatcctgtggtgcatgcgctaggagccatgctcacgagttgttctcgtgctcctgtttcacggtgtcgtggatgccttgcttgatggtttccgtatccaccacagattgctgccccaattcgtcgtatacggccctgtcctgttcggtgtagggggtgtcttcgtcgaatttcctgtgcatgatgcgaatcatcttcgtacgggttcgctgttcgcgttggatggcccgcagattcgacagccatccgtacaggaggacaacgagcatcacaataccgaggtaccccagaatcgggtacatgaccgaaatcagctgcttgaacccgaagaaactcagcaggtaccccgctgccaccaaggcggataccgtcatgaccagcttctttttgctggtccccgcaacacgtctggccatcgaatagtagaggctgaaggctgtgttgaaaatcagcgcgaaaatgatcaatgcatagacgaccgccagcaccggtgacacacgttgcaccagttcgagcatggggatgtccgagtccttcaccacgttgatgcgcgcgaacagggtgcaggtcgcacacacgatgatgattccgacgagcgctccgccgatgacacccgcccgcttcgccacacggatgcgtatcagggacccgccaaggacaaacgccatggagactccggtcatggcgcacaatgcgtaatagttgatcaccgaaagccaaacattgggcatcggcgaggggagggtctgcgctatggcgtccatgcgcgcatagtcataggacttgccgatgaatgtccatgcggtgatgccgacgatcatgaggatgatgatcggtgtgaatacgcccagtactttggtgatcctgtcgaaatcgaggaagctcatgccgatgatgaggccggcgcacagcaatgcccccagccaagaggggatgccgaactgttgttggaggttcgacccggctccggcgagcatcacgaatccgatgacgaatccggagatcaccagggatgcatccaaaacgcgtttcgtgaacggggtcgcgatctgctccagcacttcatcatggctgttcgactggtagaaacagccgagcgcgatgatgatcctgccgaagatgatgttgagcacggcaaggagcaccaccccgacaagccccatcttgccgaaactgatgaagtactgcatcaggtcctgcccggaagacaaacccgcacctacgatgatgcccacataggcaagtcccacttggattgatttcttccacatcgtgccgctcctcaccatatcgacgtcaagcacattgatctgtcggtgcgcatcgcggcggcgcacctattcgtcgattgtatggcatatggcgtttgggcaaggaagctcagggctgattttcgtcatcgcgcgcattgtcgtccacgtctgtgccttccgcaatctcccgtgcaagccgctcaagccgcgcttcgcgtgcggcgccgcgcagctcgcattcccacacgtcgatcacgcgccaccccatctgccgcagctgttcgtgctgccggcggtcgcggtctcggttgcgcgtgagcttcgccgtccagaactccatattcgacttcggcatatggaacgactcgcacccctcgtgcatgtgccagaaacagccgttcacaaacacgatcgtgcggtacttgggcagcacgatgtcggggtgcccgggataccgcttgtcgtttttgcggaatctgaacccgcgcgcgaacagataggagcgcaccgtcttctcgatcgacgtgtctttgccgcagatgcgcgacatggtgtagctgcgcgtgccgcgcgcgtacggggactctgggtgtgagggggattgtgccacgcccaccagtatcgcccgggcagtggatcgcccgcacataccattgcgcgcccttccacgctttgttcacttgtggctatttccgggtgcgccgcgcgcgcggacacaccatgatggatagcagttcacagctccgcgggccgtgcatgaccaccatgccaccg

SEQ ID NO: 560 - DNA, 23450 bp, synthetic construct
  source 1..23450: mol_type = other DNA
  misc_feature 1..23450: note = Synthetic
gtcggttcgatgaagtccctcggccgcgatccgatgagcccccacggccacggcacaagcccccacggccacggcgcggacccccgggcggtaaggccccagacattcgactcacgcaggccccgggcgctgaccgcgctggccgccgcgctggccatgaccatggcgctcgccggctgcggcgccggctccccgggtgcgtcctcgtcctcgtcgggcggatcgaacgggtcgaacacctccgattacgatccgagctccacggccaaacccaccgtcaccaacaacggcaagaccgaacagtacaagccggccgaaggctcggccaccgccaccttgcggatcgcctccggatcggagaacaaggaggtctccgccgccatccagaaggccgtcgacgattccaaggtcgccgtgaccatcgactacatgggttcgctcgacatcatgaaggcgctgcaggccggcggccgcaactacgacgccgtatggcccgcctcttcgatgtggatctccatgggcgacaccaagcacgtcgtcaaggacgcgaacagcacgtccgtcaccccggtcgtcttcggcatcgccaagtccaaggccgtcaagctcggttgggccgactcgtccggcaagaccaaatccgtaagcaccaaggacatcatcgccgcggtcaagtcgaagcagctgaagttctccatgacctcggccacgcagtccaactccggcgcctccgcctatctggcgttcctcaccgccatcgtcggcgccaaccgcgcggtcacggccgccgacctcagcaacgcgaacgtgcaggccaacgtgcagaccctgctctccggcgtggaccgatcctccggctcctcggactggctcaaggacatggtcgtcgccaatcccggccggttcgacgcgatggtcaactacgaatcgctggtcatccagaccgaccggtcgctcaccgcgaaatccaaggacccgctgctggccgtctacccgtccgacggcatcgcggtctccgattcgccgctcggctatgtggatcgcggccagaagctcaacgacgcctacggcaagttcagtgacgccctgcactccaaggattccaagctgctgttcgaacgcgccggccgccgcaccggtctcggcggcaccctcaccaacaaggacgacgccaaggtgaaagaggcgttccgtgccgactggggcatcaacaccagcgccgaaaccctgaaggccatccccatgcccgccgccggagtgatcaacagcgcgctcaccgtctaccagaccatgctgcgcaagcccagctggacggtgtgggtggtcgactactccggctccatgtacggctccggcaaggacggcgtggtccgcggcctcaacgccgcgctcaaccccgcacaggccaagcaggcccgcatcgaaccggggtcgaaggacgtgaacatcctcatcccgttctccagcgacgccagcgtggcggccaagaccgtcggctccgacaccacgcaggtgctctccgaaggccagaacaccgaccccatgggcggcaccaacatctacaagggactcgaactcgcccttcggaacatgccctccgaccgcagcgcctacaccaccgcgatcgtgctcatgaccgacggccagtcgcagaccggcgacaaggacgcgttcacctcgctctaccgaagccagggcaatgacgtgccgatcttctcgatcatgttcggcgacgccgacccctcgcagctcaaggagctcgcctccctctccaacgccaaggtgttcgacggacgcagcgaggacctcgccaccgtgttccgcgaagtgaagggattcaactgatggtgggtaccatactcgccttcatcgccggtctcgccctcgccggcgtgaccttctggatcagtgggggagggctgctcggcctcggcgcctccgccgtggtggccgtgctcggctacgtgggggtgagctacctgaccgcgccggaacgcaagatcggccagctgctcgcctcggcgatccccaacgggcagcaggcggccgacaccctcgaccgggcccgctcctgcgtcgacgacatgcagcggctgatcgcccgcactctcgacccgcaggtgcgcaaggaggccgacgacatcgtcgtggccaccggctcgctcatccggttcgtggaggccaacccctcctcgtacgacaccttgcggcatttcatcaacgtctacggcggccagagcctcaagctgctgcgcgggtacgtggacgtggagcacgccggcgcccccgaccagaccgaacgggccaaggccgaaaccatcgaggccctgcaggtgctggagaagactgcggccggcgagctctcccacgccgtggagtccaagcggctcgccctgtccgccgactctgacgcgatcgtacggctggcgagcatggacgggtacacggccgatcgggagactgccgacggatacgcggccggtgggaatacggccggcggacacaaggctggcggatacgtggccggtggatatgcgtccggcgggaatgacgatcatggaaaggaacaggcatgaagctgtcgaaatcaaagaccatcggtctcgccgcgctgcttgccgtggtgctgatcatcggcggcatcaccgtgtttcgcaactggcagacaagcaacgcgcccaaaccggtcgaaacgcagagcgtgaccggatacctcggcggcgagaagatcagcctgttcgaggacgccgggttcgccaagctcgccgcctcgcacggcatcaacgtcgactaccgcaaggccggatcgctggcgatgatggacgccgaccgcaagggcatggactatcttttcccctcgtccaaggccgccgtggaatacggcaaggccaagggggtcgacacgtcacgggccgacatcgtgttcaactcgccgatcgtgctgtacacgcacaagcaggtggccgacggactggtcaaaaccggtctgatgagcaaaagcggcaacgtgtaccacatggacatggccaaggccgtggacgcgatgcgcaacaacaagacctgggccgacgtcggctggtcgtccggatacggtcagttccgcatcgactccaccgatccggtgaaatccaactccggcaacgagtacgcggccctggtggccacggtgctcaacggcgggcagcccgccacgtccgcgtcgatcgaccgggaccgtgccgcgatcaagtcgatcttcgacaagtccgggtggatggaaaccagttcggaggacagcttcaaccagttcctcacgctgggcgtcggatccaagccgatgatgatcggctacgaaagccagatcctcgacctcgccgccaaccagcccgacgcgtggaagcaggtgaaggatgacatcgtgatcgcctaccccacgcccaccgtctggtccacgcacatgctgatcccgttggacgacaagggcgagaagctgctgacactgctcaggagcgaggacatgcagaagtacgcgtgggagcatcacggattgcggtccgcgaactacgtgggcaccgatccgatcaagcggttcggcgtctccggcacggtggaccagatccccgcggtgagcgaactgcccaacaacgacgccatgcagaagctgatcggcgtgctctccggcaagtaagcggtgaaacgatgaccggcgggtgcgcacggaccgtgcggacatcaaccgggcaggaaacggcctgaatagaaaggaacggccatgaaggaaatcagtctcagtgatctgaccggatcgaagacgtccggcgatcttacggcgacgacgggggatgcggcttcgatgatcgaagcggatgcggccgattcctcggcggcggcccagctggcgaaactgcccgaggcggatcgcgcccgcgtggagcagatggcgaattcgctggatctgacccgcgacggcattgaatccagctacggcaaggacgtgcagcgcgccacatccacgttcgccgacgacattctctcgcgcacgcggtcgaaggacgtgggcgaggccggcgaactgctgcaggggctgctcaccacggtggatgaggcggagctcggcgcggtcaagcgcattccgatcatcggcacgctggcggtgaacatcaacaagctgcgccggcgctacgagaaggtctcctcgcagatcgacgacatcgtcggccggctggagcgctcgcagacccagctggtctccgatatctcgctgttcaacacgatgtacgaccgcaacgccgagcagtatcgggagctgaagatcaccgtgctggccggcaagaaggcactggacgatttcaacgccaaccagctgccgaagctggaggccgaggcgcaggccagcggcgacccgatgcaggcgcaggtgctcagcgatttcaagagcaaactggagcgcttcgccaagcggctggacgatctggaccgggtgagcgtgatctgcctgcagaccgcgccgcagatcaagatcatccagaatgcggatcagatggtgtgcgacaagatcgatacgacgatctccaccacgattccggtgtggaagagccagatggtgatcgcgctgggtctggagaaccagcgtcaggcgcttgatctgcagaagaagaccgacgatgtgacgaacaagctgctggagcgcaacgcccgagccctgcatcagggcgccgtggacgcggagaaggcgaaccagcgttcggtggtggatatcgagacgctggagaaggtgaacgccgagctgatctccacgttgaaggagaccgtgcagatccagcaggagggcaaggcgaaccgtgcggccgacgaaacgaagatgcgtcagctggaaagcgacctgaagaccgcgctgatcgaaaacgcccagagtctgggccgctgagcctgagtcgctgagtcctgggtgttacgcgggtgcttcgttcgccctcatcagtcggctacgccgccagcttcccccagagggggaagcctgaaaggaccgggatcttgccttccccttgaggggaaggtggccggctttgccggtcggatgaggtgactgcaaacaccaaagggtggtgtccattccatgaaatcggagaggacaccaccctttgttattcgggcgacggccgcaggcccatcgccccaaccgtttccttgaagtgaaatagcgcgtgcggtttcaaggcgtgggagacgaaggcgctgagccgtgaaaccggcagtccggtggactgccggtaggcgatgcgagcggcctctgcaggccgcgagggcgcgtagcgcaggtacgtcgaaccctctgcaacgccgcagacgctccgctatttcacttcaaggctttggcgccgatgtcgtggcgataaaacagtcccggcgtttccaccgcgtcgatgatcgcgtacaccttgtcctgtgcggcttggagggtgtcggcggtggtttcgacgaggaggacgcgaccggagttggcgatgagctggtcgccctgttcgccggtggtggtgacgccggcgtagtagatgtgggtgtcggggtcgtcgatggtgaaggcggggatgtgggcgcctttgatgacgttggtggggtagccgtcggaggcgaggacgacgccgagggtggcgcgctggtcgtcccaggtgaattcgggggtgccgccggtgaggagggcccagatgccggcgccgaggtcggaggtgagcttggggaggacgacttcggtttcggggtcaccgaagcgggcgttgaattcgatgaccttggggccgtcggcggtggcgatgaggccggcgtagaggatgccgttgaagggggtgccttcgtcgaccatggcggcggtgacggggcggacgatcttgtcgatggcttcgtcgatgacggactgggcgatctgggggacggggctgtaggcgcccatgccgccggtgttggggcccttgtcgccgtcgtaggcgcgcttgtggtcctgggagatcggcatggtccagaattccttgccgcggacgaagctcatgagggagaattcctggccttcgaggaattcttcgatgacgacggaggcaccggcggcaccgaagcggtggtcgaggaagatctcttcgagggcgcggatggcgtcctcttcggtcatggcgacggtgacgcccttgccggcggcgagtccgtcggccttgatgacgatcggggcgcccttggcttcgacgtattccttggccttgtcgaagtcagagaacgtggcgtaggcggcggtgggtacgccgtgacgctgcatgagctccttggcgaaggtcttggagccttcgatctgcgcggcctgcttgtcagggccgaacgcggggatgttggaggcggcgaagtcgtcgacgagtccttcgatgagggggacctcggggccgacgaagacccagtcgatgtcgttctgcacggcgaagtcgacgagggcggcgtggttggattcgctcagttggatgacgtggatgccgtccgcgaccatgccggggttgccgggtgccacgtagacgtcgtcgacgctggctcccttgagcagggtgtgggcgatggtgtgttcgcgcgcgcccgatccgacgaccagaaccttctgtcccatgatgttgctgttcctttcagctgctgtatgccgttgcgttgtacgttttgctgtcgtgtgccggtgcctgtgagggtcggccggccgtcggtcagtcgtgcagggtgatctgcgaaccgtcggcggacttgacgatggagccgagcacgtaggcggcttcgtcgtgctccttgaggatggcgagggtttcgtcggcgcggtccttggcgacggcgagcaccatgccgatgcccatgttgaagatgttgtacatctccttgtggtcgatgtcgccggccttttcgagcacgtcgaagatcggcaggacgggccaggtgccgagctggatgtcggcggcgaggccgccggggatcatgcgcgggatgttttcgatgaagccgccgccggtgatgtgggcgacgcccttgaccacgccggccgtgaacagcggcttgagggtcttcacgtagatcttggtgggggtgagcagcacgtcgccgagcttggcgccgccgagttccggcagttcggtgtcgacggtgtagccggcctgctcgaacagggccttgcgcacgagggagaagccgttggagtgcacgccggagctgggcaggccgatgagcacgtcgccgtcggtgatggtggagccgtcgacgatggcggacttttcggccacgccgacggtgaagccggcgagatcgtattcgtcttcgtcgtacatgccgggcatttcggcggtttcgccgccgatgaggccggcttcggcctgcacgcagccgtcggccacgccggcgacgacctgttcgagcagggccgggtcgttcttgccgcaggcgatgtagtcgaggaagaagagcggctggccgccctgggcggcgatatcgttgacgcacatggccacgcagtcaatgccaatggtgttatgcttgttggccatcttggcgacgacgagcttggtgccgacgccgtcggtgccggagatcagcaccggctccttgtagccgagcgaggcgagatcgaataggccgccgaagccgccgatgccgccgacgacgccggggcggttggtgcgggcgacgtgggacttgatgcgcttgacgacttcgtatccggcttcgacgctgacgcctgcgttctcgtacgctttgggcatgatgaacctttcttgggtgttccctgaggtggggctccccgaacgggagctggatgatgaacgggggattggggatgtcggtggcgtatggctcaccgaggggtgccggagccgaggctccggcggcggctggttgttggcggttattcgccggactcgagtccgtgctggcaggagtactcgttgccttcgtagtggctcttgttgagcgcgaactgcggaagcttgacgcggtcctccggggtcagggacttgaggaagtcctgctcgtagtcgtcgagggcggtggggtagtcgccgttgaagtaggcgacgcacaggccgccgtacggggcgtccgcgcccaggccgatggattcgaccagaccgtcgaggctcaggtaggagagggagtcggcgccgatgaactcgcggatctcctcgacgctcttcttgccggcgatgagctccttggtggtggagatgtcgatgccgtagaagcaggggtatttcagcggcggggagctgatgcgcatgtgcacttcggcggcgcctgcctccttgagcagctggacgatgcgcttggacgtggtgccgcgcacgatggaatcgtcaatcaccacgaccttcttgcccttgaccacgccgcgcacggcggagagcttcatgcgcacgccctgttcgcgcagttcctgcgtgggctggatgaacgtacgagccacgtactggttcttgatcaggcccatctcgttgggcaggccgagctcttcggcgtagccggaggcggcggaaagggaggagttgggcacgccgatcaccatgtcggcgtcggcgggggcctcctgcgcgaggcgggcgcccatgcgcttgcgggcggagtgcacgttcacgccgtagatgttggaatccgggcgggcgaagtagatgaactccatcgagcagatggccagctgggtcttgtcggtgtacgtgtcgatggtgtagccgtcgtcgttcaccaccacgatctcgccggggcggatgtcgcgcaccagttcggcgccgacgatgtcgagcgcgcaggtttcggaggcgagcacgtaggcgccgttcttcatgcggccgaggctcagcggtcggaagccgttcgggtcgagtgcgccgatcatggcgtcctgcgtcatgatcaggtaggcgaagccgccgtggacggtgttgagcgcctccttgagcttgtccatgaaggtgggctggctggaacggcggatcaggtgcatgagcacctcggtgtccgagttggagtggaagatcgcaccttcgtcctccagcttgcggcgcaggctggggcagttggtgagattgccgttgtggccgagggccatgtcgccatcgtggaagcggaagatgaacggctggatgttgtcggtggtgccgctgccggccgtcgcatagcgcacgtggccgatggccttgtcgcccttgagtcgttcgatttcgcgttcgtcgccgaacacctgggtgagcagtcccagtcctcggtgtccgatcagatggccgtggtcgttggagacgatgccggctccctcctgaccgcgatgctgcagcgcatgcagaccgaaataggtgagacgggcggcatccggatgaccccagacgccgaagacgccgcactcctcgtgaatgtcttccaattcggcggacaagcctagctccttcatatagagttaccgtgaggattcaatcatccccacgttatcaaccgcgcaatacaaccgacgccccgtcgtggtgtgaactacgttgtccccctcgagcggcataataagaactgctaattcccagtaagagcggactcgttagccgctttgaatgctaagcagatttctgcaggggcgggccgaaaggtccgccccgtttttcgttgtaagccttccttgggttacgggccaagatgtgtgtccggcaatccgatcggtcaatggggactgcggggacgtgacaacggttaggccccacagcaggtcgtcagggttggagcgtgaccgggggcgttggggatgtgacgaggtgcgttgggggtgtgacagggtgcgggacgcgtcacagggtgcgggtgcaccgagtgacgccacctgcacccggtgacacacaatccgcacccggtaacgcgcagcccgcacaggctcggacaggaggcgcttactgccgtaacggcaggcgagtcgaaacagacacacattttggcctataacccacttctttgatagcatgttgcgagtagcgaggaggcataaatgactaaacgaccatacaaattggggattgatgttggtctcaattcagtggggcttgcgtcaatcgaagtggataatgagggtgctccgattcgcattctgaatatgcaaagtgtgattcatgatggtggcgttgatccggaaaagaacaaggaggccatcactcgaaaggcaatgtctggcgtggggagacgagtacgaaggatgcgtcgccgtcgccgggccagactacagagggtagatttggctcttgagcaggccgggtatccaattatcgagcccgaatcgctgacattgcctttcgaagagtggcaggtcaggagcgatctggcgacacactacatcgaggatgatgagattcgtcgtgaagacatttcgatcgctgttcggcatatcgcccgtcatcgtggttggcgcaattcctacaagcgagtggattctctgctgcctgatgtcccgtattccaaacaatacgaggaattgcttgatcgggcagaggaaaagctcgggaaaacactgcctcaggaactcactccagcgcagatcgtgcatgcggtgctggccaacggcttcactgaggcgcctcggctgcgtaccaaggtgaataccgctgagaaagtttcagttcagggattgctacccgtgcgcatgatgcaggaggacaatgcgaatgagctcaaacgcattttcgaagtacaacgagttcccaaggaggagtggctgccgatcttccgcgaagtgttccatgtggtatccccgaaaggctcggccgaatcccgggtcgggcgtgatccactggaccccagccagccacgcgcgttgaaggcgtctctgacgtttcagcgctaccggatcattaatgtcgtcaccaatctgcgaatcttcgaaaacgggatggaacgaccgttgacggttgatgagcgacagatggtgttcgataacctctgcacgccgtccagtgacgatattacgtggtctgatgtggcggaattgctgggattgaagcgcagccagattcgcggcgtaggtaaacttactgaagacggtgaagaacgtatcgctacgaggccgcctcgtttgacgtctatccagcgtatctatgctgccgagccgaagattcgcaagccattgctacgttggtggaatgatgcctcggaggggtcgcaggaggcaatgattcgcctgttgaccaacacggtggacgtcgatcgagttcgggacgatcttgattatgccgaagccatcgaattcatcgacacgctcgacgatgacggtttgacgcgtttggattccatcgatctgcctgccggtcgcgccgcatattcggtaagcaccttaacgaagctcaccgaacgcatgctgactgccgaagacgatctacacgaggctcgaaaatcgatgttcgatgtgtcggataattggcggccgccgtcagatcccatcgatgcgccgttgggtaatcctgcggttgaccgtgtactgaagatcgtgaatcggtatctcatcaattgccaacggcgatggggggatcccgtcaccgtgcagattgaacatgtccgcaattcattgggctccgtagcctctgcccgaaaagcccagagagagtatgagcggatcaacgagcgacgattcgcttcccgacaggaactggaaaggaaactgcgggaggatgagtctcaggacagtgtgcgtaattctgacatacgtcgcttggaggctgtgcagagacagaacggccagtgcctgtactgcggctcgccgattacgttccgaacctgtgagatggatcatatcgtgcctcgtaagggtgctggatccacaaacacgaggaccaatcttgcggccgtttgtgccgagtgcaatcgaatgaagtccaacatcccgtttgccgtgtgggcgaggacatctgctgcacgcgaccgtgaggtgagcctaagcggtgcgaagaaacgcgtcgatgcgtttcttgcggattcgggtgcgtctccgcgggaacagcgtgccttccaccaggccgttaaggcacgactggagcaaaccgagcaggacgatccgatcgacaaccggtccatcgaatcagtggcatggatggcggacgaacttcatcgacgcatcgattggtatttcaatgccgagaggtatcggaatgatgcgcctgaggactcctatgcatctgtgccgacgacgaaagtctgggtgttccagggaaaggtgactgctcttgcccgtaaggcaagcggtatcgagggcaagattcatttcattggagcgaagacgaagacgcgtctggatcgccgtcatcatgcggttgacgccgcggtgatcgcgatgatgaaccatgcggttgcccagacgatgatggaacgggattccatgcgtgaatctcagcgtctcacgaggagaacttcgggtgaggtgtcgtggaaggagtatccgacaccgaccgacagcggatatgcctcatatcaacaatggctgtcatccatggacagactgctggctctgatgaacgaggcattggatgaggaccgggtgccggtgagccaatggcgacggtactccctcggcaattcaatcgttcacgacgccaccattcataagttggtcaagttgcgcctgtgcgaagccatggatgcggatctgattcggcgggcttccaccccggcactgtactgtgcgcttacgcgattgccggattacagtcccgtcaaggggttgccagccgatgagtcgcgtagcatcaccgtgaacgggcagagggtttccactcaagaaaccgtcggattttttgcgtccaaggcagctcaaattgccgtacagggaggatccgctgacattggatcgaccatccatcacgcgcgcgtctatcgatgttggaaggcgaatgccagaggcgtacgcaagtacttctatggcatgattcgcgtgttccagacggatctgcgatattcacgacatgatgatcttttctcggtggcccttcatccgcagtcgatttccatgcggtatggcgaaccgagaacggtacaagccgtgcaggaagggcgtgcggaatatctggggtatctgatcgtcggtgatgaaatcgagctggacctctcggctgctccgctcagcggacagatcggagaattcatgcaattcttcgacgggatgaacgatgaagggcgtaatgcttgtaggagatgggttgtggatgggttctattctccatcaaagttgcgtttgcgtccgaggatgttggcttcagaaggattgaagaagctaacggaattcggaaatatcgaaattcccgacggtgtcgacaagattattaatcgtcaaggatggtttcctgcaattggagtaatcgatcgatatcggcctcgcataatccggcgtaacgcattcggggagccacgctggacgtcatcatccggtttgccggtctcatggtcatggccggaatgaggtgaatgatcatgcagagccagtggagagtgattgattgtaccaagctccaaggaaggatctcgtatgttcgcggcaacatgcggatacgccgggatgggaatgaaggtacggcggacgttccactagctcaggtggcggtcgttctgctgggtctgcgtgtggactgttctgccgcggtcttgcatgagatggcacggttcggcgtgtccgtcatgctgtgcgattggcgtggagtgccggatgcggcgctccacgcctggaccgatcttcccacgacggttacgcagcgtcaactggctcaggtaggcatgtccgttcctcggaggaagaacgcgtgggcgcgcatcgtccagtcgaaaattcgaggtcaggcggcatgtcttgatgctcagggcatcggaggaggaggtgttcttcgtgctattgccgcttccgtcagatctggtgacccctcgaattgcgagggacaggctgcccgagaatattggaaacgagtatttcctaaggatctgtcattctccagaattccaggtaaggggagtggccgaaacgcgcaattggattatgcgtacacggtactgagaggattcacgatcaaggcggtcatctcctccgggctgattccatcgatcggtgtgaatcatcatggtcgaggaaactacttctgcttggctgatgacctattggaagtgtatcgccccgctattgattattcggtagcacaactcgaatctacggattcgttgaacgacaaggacgttaagagatatctggtggattcggtgaaccagcaattcaacggcaccggattgaccattcccagctcattgaatgatttcgcgcaacagtttggtctgtactgcgagaagaagatcgaccgattgccggttccggaatatgtgggggcatgatgaaaacggatgaggatagtggtggtatgtggtgtctggttatgtttgatttgcctgtggcgacgaagctacagagaaaatatgcgactgattttcgtaatttgctgcttgatatgggatattgcatggtgcagttctccgtatatgcgcggtatacgcctactcaggccgggaacagggctacggttcgtgccatcaaggagaatcttcctcccaaaggcatggtacgtgttctgcatatcagcgaccatcaatggtcatctgctctgagattttcgggtctgcaacaggatgaatccaaggaaacgcccgaggtatttacgcttttttgaatggaaaagcccttgaaaccgttgaaaaataacccctcctgatgggctaacaagtctatcaagaggggtgaatgctaattcccagctgatcgcatcggtgatttgcgccgaggacaagtctatcaagaggggtgaatgctaattcccagcctcgcgtcccttgggttcatggcgtggccaagtctatcaagaggggtgaatgctaattcccagcacacaacacgactaacgggtatgctagccaagtctatcaagaggggtgaatgctaattcccagctccttatcggtgtagccgtgttggtcaacaagtctatcaagaggggtgaatgctaattcccagcgagctgggcccgtaccgtgtccagtgtccaagtctatcaagaggggtgaatgctaattcccagctggtcggtactttccgcttacagccatccaagtctatcaagaggggtgaatgctaattcccagctctcctttaccgtggtcttgtttggggtcaagtctatcaagaggggtgaatgctaattcccagcgcgtcgttggaataccgtgcgcaagtggcaagtctatcaagaggggtgaatgctaattcccagcacacgagccccggcaagctggttggaaccaagtctatcaagaggggtgaatgctaattcccagcaaggtctccttggcgcgtcgttccgcgtcaagtctatcaagaggggtgaatgctaattcccagcggacgagaggcgcatcgaccgggggtcgcaagtctatcaagaggggtgaatgctaattcccagcacgtctggaggctgacgccgccgacgtccaagtctatcaagaggggtgaatgctaattcccagctggttcgatcgacgtaatgccatcggtgcaagtctatcaagaggggtgaatgctaattcccagccgttcctagcgggtgggtgtgtgaggtccaagtctatcaagaggggtgaatgctaattcccagcctcttcgaggaggcgattggtgatgcgccaagtctatcaagaggggtgaatgctaattcccagcgacagtcgtgcctatgaggtttgcggaccaagtctatcaagaggggtgaatgctaattcccagcatgcgagttcccccacgtaggcgttgcgcaagtctatcaagaggggtgaatgctaattcccagcccgtgttgtgcgtgcggggagcacccggcaagtctatcaagaggggtgaatgctaattcccagcagcggaaaccgctgattcctcgaacggtcaagtctatcaagaggatgtattgctactcgaacatctcaatttcgatccgctgatcggtcatgttgtgcagcctcttttcttccgcttcgaccttcggatctggccatgtgtgcgaatcgaagacgcaacggtataactcccaatgcgtgcacagtcgtacgaggagaacatgttggtggatgaccttgtatatcagaagcacgtcgtcttccacgtgacattccatgtatccggtaaggcatcctctgccgatcttgaggcgatgcggattacacgattcgggaacgccgccgtattccagcaaatggaaatcgagcagatcatagaccgaatcgaccagtattgcctgatatctgcgtagtcgtgcgatatctgcataaaaccagtcggtggcatcgtattcgatcattcggcgtcgaccttatcgatgacggcgcgaatgcttgccagaaactcttctttggaacggtatcgacggatgccggtaggcagatcgtttccgatgctcaattgggtggaaagggcggcgatggcttcgctggtgcgtctgcgctgcgcggcctcgatgtttctggcccgtcgtttcatggtcaatgtggacatgctgcaccacctttcgttactgttcccagcttagctcgtgcggcttgccgatgttctcggtggcaagggtggagtgctaattcccagctttagtcattgccttgaactatcggtgaggatatcagaattccggccaaaactccaatgggtcgcctgtgctatccgtcgtaatggcacggccgtcgtgccacccaatccatagaacaaatgttcgattgttctggtagtctggggagaacgccgcggaatcggttccgcgcggatccgccgatgggaggtgatggaatggctgacggaaaccattggtcgcgcacatacatcgcgatcgatctcaagtcgttctatgcgtcggtggagtgtgtggaacgcggtcttgacccgctgcgcacgaatctggtggtggccgaccgatcccgtacggcgaagaccatctgcctcgcggtctccccgtcgctcaaggcgtacggcctgcccggccgcgcccgactgttcgaggtcgagcatacgatgtcgctggtgaacgccgaacggcgtctgcactctccgggccaccggttctccggcgaatcgttcgacgccgacgaactggccgccgatcccacgctgggggccgccttcatcgccgcgaaaccgcgtatgtcgcactacctgcactgcagtgcgaagatttacgagatctatctcaaatacgccagtgacgaggatatccacgtctactccatcgacgaggtgttcatcgacgcgaccggatacctgcgggccatgggcatgaccggccacgacatggcccggaccatcgtccgtgacatctaccgcaccaccggcatcaccgccaccgccgggatcggcacgaacctgtatctggccaaggtggccatggacatcgtcgccaagcacatgcccgccgacaccgacggggtgcgcgtcgccgaactggacgaacgatcctaccggcggatgctgtggtcgcaccgtccgctcaccgacttctggcgggtgggacgcggatatgcgcgcaaactggagcggcaggggctgatgacgatgggcgacatcgcccgctgttcgctcggccgcgcctcggactatcacaacgaggatctgctctaccgcatgttcggggtgaacgcggaactgctcatcgaccacgcgtggggctgggagccgtgcaccatcgccgacatcaaacggtatcgcccggccgatcacagcatcagctccggtcaggtgctcaccggtccggccgatttcgccacgggacggctgatcgtcaaggagatggccgacgatctcgccctcgaactggtggagaaacgggtgctggccgaccggatcgccctgatggtcggctacgacgtcggaagtctggactccgcccggctggattcgtgcgcgaccgacgaggagcgggccgccgcggtccgtgcggcgaaggagtatacgggcgcggtgtcgctggaccactacgggcgtcgggtgcccaaaccggcgaacggatcgatcgacctcggcgggcatacggcatcgggtacgaggatccggcaggccatgacggatctgtatgaccggatcgtcaatccgctgctgcaggtgagacgcctcaccgtggtggccggcggattgaggacgaaggaggagcttgacgccgaacgccggtatgagcagcccgatctgttcgcggtcgccgcggtggatgccgacggattgctgacggatgtcggcggattgcagacggacgggtcggcggtcggtgcgggggagggcggagccggaccgacgcagaccgaggacgcggacatgcggtcgtcggacgatcgggagacccgggtgcaggagacgctattgaacgtgaaacgacgattcggccggaacgccgtggtcaagggcatgaacctggaacagggcgccaccggactgcagcgccacacgcagatcggaggccatgccgcatgaaattcgaatccacgcgccgatacgatgacatcatcgatctgccgcatcaccggtccacgaagcatccccacatgccgatgcgcaaccgagccgcacagttcatgccattcgccgcgctcgccggctacgacgagatcatcgcccagaccgccagggaggtccgcgagcgcggcgaatgatcggccgatgtcggtatgcgatgccgggtgtggtgtctcgataagccggcaggggatattagtggtccgcgatttgctggcgtatgcgtgccgcggcctcattgcggatcgtggcgatggtctttccgtatgattccacggttcggctaacagtcgaaaggtgctgtgctatttcaccgatccgctccggaggaatcagcttcgcgtgtcgttgttctttgactttctgctgtcgttgttgctccgctagttgttgcttccccttgtcgctgagatagtcgtctattgcggtgggggcttcgtatcgttgtcgcagcatggaggaaaacgattccacgagttcaaagcggtcaagccgtatctcctgctccacgcgttcccgttcctgttcggcttcttgggggtcgtcgcagagtcttctgcacatataggctttcaccagacgctcgtaatcactgcggatcattggatcgaacatgtccacgatgatttcggacatgacggttgatccattttccacccttatgccgtcgatgatttcgggcttgagctccagcaacagggcgatcgcaccggggtcaattcccagacggtcggcgagggcctgctcatcgtaatgtcgggcttccatgtcgcccatcagatacggaacgtcgacgccgaggcagtcggccaatgccagcatcttcatatatgaggggaatcctttgccgtcagcggatacgtgctcccatcgccagacatccttgaccttgcagcggccgaatccccgaagcttcatctcatcggcaagaccctgctgggtgagcttgcgttctttttgaagtctacgcagattctcgttccattgtcgtatttgatatgcccatgccatgggtatattttactgatatttaaacgacatacgcactataaaacccatggtgaggtaatccattcgcgaatatggtgggaggcagaagacgattcaaagcgccacgcgaatttgaatatcgatacggcatgaatggaaaggaactgtggaagtcatggacgaaatgattaacgcagcggagaattctcccgagagctcatcgcgatacgatcgagcgcgacggtgggcgcgtaaccatcgaaccgttcttatcatgggagccgttggcattggcactgtcggagcatgcgtggccgcatatgtctgttctcgggaatcgagcgagcccaacacccgggatttcacgcctatggatcatctggcaaaaggttgtgacgccatattgtctgatccgtctggctcctcagacacggaatgtgagcgtatactgcgcatcgattctcatctgcgtcgacttcctgaaggatggattcgatcggcgggcaaggaacttgaaatgtccgcattgggatatggtggtttgccatcgaacattacgtacgtcgattcgtatgatcggtcatactagaggaagacgcattcaaggaggaatgatgaaatatcaagtgactatgtgctacccggacggggatgtggaatgcggcgagctattcgataccatgtcggaagcggaatcattcgcacagtatcagataagctgctacaggaccgggggcgaggtgctgcatatgtcgagtccgggggattatccgctttcctctgatgcggacaatatcgactacagcatttcggaaatcgaggaatgaccatacgctgaccgaggatttggtcgagtccggtgctctgtcgttttggatgaggcgattggaagccttgaccgaatcaggggacctatcatggatggtgttccctattggaaaggaaccgatgatgtccgaagacaatgtgttcattatggatgggatcaaaacccaatgggatgacaccacgatggtggtgtccgaactcggcttcgatcggaccgccacgttggatgatcacggcaacatcctgacatccacgttcggcaaggcaggggagccctttctacatcactggttcgagaagatgaagccgatgatcgacgattttcgagccatcgaccgggaatatgccgatgcctgagatcttctttctggccggatacagcatctacttcagcacactggatcgggagcatggtgttcacgttcatgtggcgcgtggaggacggcgggatttggcgagattcgtgctgcatgaggatggtacggtgtcgctatcccataatcatggcaaaattcctccgaagcatatacgtttgatacacgcggctctggtccggggattcgatgaggttgtcgatgcttggcgaaggctgttcggtgaggatattcattttgatcgttgatcgggggatataggggatcggttgagtgccgcgcatcccttgccacgctattcggtatggattcgcttaccaccttggttggctttgccgatggacgcccgcggcggggatgccgggtgtgttctcgcggcgaaaacatggctgttgatggcggtgaaaagtactgcccccccataccatgactgtagggcagtgatgccgggggttgtgaaccatcaggctaaggagacgatcatgagcgtgatcgacaatgtaggcaatgcggcgaagaatgtggcggacggcgtgggcaaagccgcgtccggagccgcggccagcgccgccaatacggcgaacaaggtcaaggagaccgtgcagaacatcggctccaccgtgctcacgcaggagcagatgtctgaaatcctcgacaaatgctacgacgcggcgttgaacggcattcccaaggtgagcaaaagcagcgacgatatggcgcaggaatatctggatcgttacggttcgccggagaaggcggccaaacggttcatcgccaatcagatcgccaaatgctccacctccgggttcgtcaccggctttggcgggctgctgaccctgccggtgtccatccccgccaacatcagcagcgtgatctacgtgcagatgcgcatggtcgcggctcttgcctacatgggaggctacgacacccatgaggatgaggtgcagacgctggcctacctgtgcctcgtgggtacctccgtgacggatacggtgaagaagaccggcatagaagtggcgaacaaggtcaccatgggcatgctgaagaagctgcccggctcggtactgacctccatcaacaagaaggtgggattcaggatgctgaccaagtttggcaccacgggaacggtcaatctggtgaaggtcgtgccggtcgccggagcgttggtcggggccggcatggatttcgccggcacgaaggtcatcgccgatcgcgcctacaacgccttcattctcaagcagatcgactgatccgatcatcgaaaaaaggacaaaaagggcgttgccgccggagtcatcatgctccggcgacaacgcccttttgattatcggcgataatcggcagcccggctatcaggcggtgaagtactcgacgccggcctcgaagatcggctggtacttgttgcccggcacgttgaggtacaggccattgccgctacgctccgagtggcccatcttaccgaacacgcggccgtcggggctggtgatgccctcgatggcgagcagcgagccgttcgggttcacgtccagatccatgctcggcacgccggcctcgtccacgtactgcgtggcgatctgaccgttggccttgagctcggccagcacctcgtcggaggcgacgaagcggccctcgccgtgcgagatggccacggtgtgcacgtcgcccacctcggtcttcgccagccacggggagaggttcgaggccacgcgggtgcgcacgagtcggctctggtggcggccgatggtgttgaacgtcagcgtcgggcaggcgtcggtcatcggcacgatgtcgccgtacggcaccagacccagcttgatgagcgcctggaagccgttgcagatgcccagcatcagaccgtcgcggttcttcagcaggtcgcgcaccgcctcggtgacggccggggcgcggaagaacgcggtgatgaacttcgcggagccgtcgggttcgtcgccgccggagaagccaccggggatcatcacgatctggctgcggcggatctcgtcgaccagcgcctgcgtgctttcggccacggcctcgggggtgaggttgttgatcaccagcgtggaggcttcggcaccggcgcgctcgaacgcggcggccgtatcgtactcgcagttgttgccggggaacacggggatgatcacgcgcggcttggcgatcgtggcggaggagtggctcaccttgcggccggcggtgtagttcaccgtctccacggcctcgcccttgcctcggtacgggaacacctcttcgatgccgtgctcccacgcctcctgcagcgtggcgaggtcgagcgtctcgccggcggcggagaactcgtaggcctcggtggtctcgccgatccggcccatgcacaccagattgctcacgggcggcagcttggcgtcgtcggccagctccacgacgaagctgccgtacgccggggtgaacaggtcgtccacggcgatcgacgggtcgagcgccacgccgatgcggttgcccacggtcatcttgaacagcgtctcggcggtgcagccgtagccgggcgtggcagccgcggccaccatgccgtcctcgatcaggccctccaccacggacagcgtttcgatcaggctctccggatcgggggtgagtccgtcggcctgataacgcggggcgatgcgcaccagcgtgtgaccggccttcttgaactcgggggagacggtgttgcccatcgggcc

SEQ ID NO: 561 - DNA, 23447 bp, synthetic construct
  misc_feature 1..23447: note = Synthetic
  source 1..23447: mol_type = other DNA
gccgtacgaaccacgaaccggcgatggtttcaccagatgatcagatgaaaggcaggatcatgccaacgaacaatgccccggtacggggtaccgacaaacccacccgcgtcgatatgctcgcccatatgggcagcattcagcaggccgcctacgtgcgtccgatcgagtatcaggagggacgcgcccacgggctgcgcgccatcgaggtgaagaacggtccgctgcggttcatgtccatggcggatcgtgcgctggacgtggcccagatcgaataccgtggtgagaacctcacgttcctgtccaagccgggactcaacggccgcaaccagttcgacaccaacggattggaggcacagcgttcgattatgggcggtctgttctttacctgcggattcgagaacatctgcgccccgtacgtgacgcctgagggcagcgactacccggccggcagctatccgatgcacggccgtatccgcaccacgcccgccgagcacatctgctccgacgcccactggaccgccgatggcgactacgtgctggaactgagcggcgagatgcgcgaggccgaactgttcggcgagaacatggtgctgcgccgtcgcatcaccagcgtctacggcaccccgtcgatcacggtcgaggacgaggtgaccaacgaaagcttccgcaacgaaccgctgatgtggatgtatcactgcaacttcggctggccgctgctggacaacggcgcgcaggtgatcattcctagccgcaaggccacgccgcgcgatgacaccacagccgcggacaccaccccgtggaacgagatcggcgccccggaggcgaacaagccggaaagcgtatacctgcatgatctggccgcggacaaggacggccgcagcttcgccgccgtggtgaactgcgggcttggactgggcgtcgtcatcgacttcgcggccaaggacttcccgtatttcatggagtggaagtcgatgggctccggtgactatgtggtcggtctcgaaccgtcgaactccagcgtgcatggccgcggctggcatgagcagcgcggcgatctgcacatgatcgcgccccagaccagcgaacgcaagacgatcaccttcaccgtgatcgaaggggatgccgccatcgacgcgctgatcgcccgccgcgacgcgttgcttgcgtagaatacgcgcggaactgcattgcggatatgcggaggatggcagacgcgtctggatacgtctgccatccttccgccgtccggataattgcggataattgccgttttgccgtttgagtggttatccgagatatcgcgcgaattcaatggccgcaggtgatcgcataccctgctttttccagacgaacacggtttcgcagtccaatgccggactcagcgggatcatgcgtacgccggggtaggtgttgccgaggtcgtagcacaggtagatgcccatgccgttggccgccatattcgccccgttgccggggagattgcagtagccggcgatggtgagactgttgaattgggagtcgtgggcgttgtcgtcgaaccagttgatgagcagtcgacgtacggatgcacgtgacggcagaatgagcggtgtaccacgcagatcgtcgggcgtgaccgtctctcgcgtggccaatggatggtcgtcgggcacgaacgcaccccaatggtcggggattccgggacgcagatagtcgtattggtcgacgtcgactggttcggtgagcagaccgaagtccataagtccttgttcgatccgttcctgaataaggtcggatgtggtgctggtcacgtggaatttgacgttgggatgcagggcgcggaaggcgctcatgtgctgggagaggtaggtcatggcgcgtacttcgccgcatccgatgacgatttcgccggtgagttcgtgggcggatcgtttgagttcgccgacggttttgtcggtgagggcgacgatggattgtgcgcgctcgcggaggagttgcccttcgtcggtgagggtgatggtgtgtggtccgcgatggaagagggtgacgccgagttcctcttcgagttgtttgagttgccgggagagcgtgggctgggagaggcgtaggagttgggcggcccgtgtgatgttgccttcctcggcgaccgccagaaaataccgcagcacgcgcagttccatgatgccgttccttcctgtggcgtggttgcgccggcattcagcgcaaccacgcctgtccagaaacctgaaacaaaatactgcgtgtgtcgtcaaggcgcagcagacgaaggcgtatatgaatacgtcgagtctgccgtaacgcaggcgacactgcagttttctcgtttctgaagtgagataacgcgtgtgtcgtcaaggcgcagaacgcgaaggcgtatatgaatacgtcgagtgttctgcaacgtagacgacactccgttatctcacttcagggctttggcaccgatgtcgtggcgataaaacatccccggtgtttcaagcgcgtcaatgatcttgtagaccttgtcctgcgcggcttggagggtgtcggcggtggtttcgacgaggaggacgcggccggagttggcgacgaggcggtcgccgtcctgcttgacgccggcgtagtagacgtgggagtcggggtcgacggggatggtggggacaggggcgcccttgataacgttgacggggtagccgtcggaggcgaggacgacgccgagggtggcgcgctggtcatcccaggtgaaggtgggggtgtcgccgttgaggagggcccagatgccggcgccgaggtcggaggtgagcttggggaggacgacttcggtttcggggtcgccgaagcgggcgttgaattcgatgaccttggggccgtcggcggtggcgatgaggccggcgtagaggatgccgttgaagggggttccttcgtcgaccatggcggaggtgacgggcttgacgatggtgtcgatggcctggtcgatgacgctctgggggatctgggggacggggctgtaggcgcccatgccgccggtgttggggcccttgtcgccgtcataggcgcgcttgtggtcctgggagatgggcatggcccagaattccttgccgcggacgaagctcatgagggagaattcctggccttcgaggaattcctcgatgacgacggaggcgccggcggcaccgaagcggtgatcgacgaagatgtcttcgagggccttgtaggcgtcgtcttcggtcatggcgacggtgacgcccttgccggcggcgagtccgtcggccttgacgacgatgggtgcgcccttggctgcgacgtaggcgcgggcgtcggcgaggttgtcgaaggtggcgtaggcggcggtgggaacgttgtggcgttccatgagttccttggcgaaggtcttggagccttcgatctgggcggcgaccttgttggggccgaacgccttgatgccggcggcttcgaagtcgtcgacgaggccttcgatcagcggcacttcggggccgacgaacacccagtcgatggcgttctgcttggcgtattcgatgagggcggcgtggttggattcgtcgatctggacgatcgtgatgccgtcggactgcatgccggggttgccgggtgcgcaggagacttcgctgacggtgtcgcccttgaggagggtgtgggcgatggtgtgttcgcgggcgccggagccgatgacgaggactttctgtcccatgttctgttcctttctgcgggaatgggttcggccgacgacggaggaacggtcgccggccgaactgtgttcgacgctatttcagctatttcgatgtggggatggtacgaggctcacagacccttgtgcagctggacgcgcgtgccgtcgatgtccttgacgatgcggcccacggtgtggtgtacttcgccttcggcatcgaggatgcgttcgacgtcggcgaccttgtcgggggagacgatcagcaccatgccgatgcccatgttgaagatgttgtacatttccagctcgtcgatctcgcccagctgctggagcaggcggaagatcggcggcacgtcccagctggtgatgtcgaatgcggcggccaggccttcggggatgatgcggggcactttttcgatgaaggcaccgccggtgatgtgggccacgccgtgcagcagatcgtcttccgcgaacaggggcttgagcgccttcgcgtagatgcgggtgggcttgaggatctcctcgccgagggtttcgccttccagctcggggagcttggcgtcgatgctcaggtcgtggtccttgaacaggatcttgcgcaccagcgagtagccgttggagtggatgccggaggacggcaggccgatgaggacgtcgccttcggcaatggtgctgccgtcgatgatcttggacttctcgaccacgccgacggtgaagccggccagatcgtactcgtcggggtcgtacatgtcgggcatttcggcggtttcgccgccgaccagtgcggcaccggcctgcacgcagccgtcggccacgcctttgacgacctgctcgagcagttcgggatcgttcttgccgcaggcgatgtagtcgaggaagaacagcggttcggcaccctgggcgaggatgtcgttgacgcacatggcgacgcagtcctggccgatggtgtcgtgcttgttcgccatcttggcgaccatgagcttggtgccgacgccgtcggtgccggagaccagcaccggctccttgtagccgagggaggacaggtcgaacagaccgccgaagccgccgatgccgccggcgcccggacgcatggtgcgggccacatgggacttgatgcggttgactacctcgtaaccggcctcgacgctgactccagcattctcatacgcttggggcatgatgcacctttcttgggtgataatagtggtttatcgatgggatcgatgttatgaaaaacttggattacctggattacttggattgtttatgaattgagactgtctactcgtcgtctgatacggcgctggtctcgttgggatcttcgacgtcgccggcacgctggcaggagtactcgttgccgatgtacttgctcttgtacagcgcgaacttcggcagacgaacgcgatcctcggcggtgagcgacttgaggaagtcctgctcgtagtcgtcgagcgcggtggggtagtcgccgttgaagtaggcgacgcacagaccgccgtacggggcgtcggtgttcagtccgatgcattcgaccagtccgtcgagcgacaggaacgacagcgagtcggcgccgatgtattcgcggatctcctcgacgctcttcttgccggcgatgagttccttggtggtggagatgtctatgccgtagaagcaggggtacttgagcggcggcgagctgatgcgcatatgcacttcggcggctccggcctcacgcagcagctggacgatgcgcttcgacgtggtgccgcgcacgatcgaatcgtcgatcacgacgacgcgcttgcctttgaccacgccgcgcacggcggacagcttcatacgcacgccctgctcgcgcaattcctgcgtgggctggatgaacgtacgtgccacgtactggttcttgatcagacccatttcgttgggcagtccgctggcttccgcgtagccggatgcggcggacagggaggagttcggcacgccgatcaccatgtccgcatccaccggggactcctgggcgagacgggcgcccatgcgcttgcgtgcggaatgcacgttcacgccgtagatgtcggagtcggggcgggcgaagtagatgaactccatggaacagatcgccagctgcgtcttgttcgtgtactgcacgatcctgtagccgtgatcgttgaccacgacgatctcgccggggcggatgttgcgcacgagctcggcgcccaccacgtcgagcgcgcacgtttcggaggcgagcacgtaggcgccgttcttcatcttgccgaggctcaggggacggaatccattcggatcgagcgcgccgatcatggcgtcctcggtcatgatcagataggcgaatccgccgtgcaccgtgttgagggattccttgagcttgtccatgaacgtacgctggttggagcgacggatcaggtgcatgagcacttcggtgtcggagttggagtggaagatcgcgccttcatcctcgagattgcggcgcagggtgcggcagttggtgaggttgccgttgtggcacagggccatgtcgccgtcgtggaagcggaagatgaacggctggatgttgtcggtggagccggagccggcggtggcgtagcgcacgtggccgatggcgcggttgcccttgagtcgggcgatctcgcgttcgtcgccgaatacctgagtgagcagaccgagtccgcggtggccgatcagatgtccgttgtcgttggagacgatgccggcaccctcctggccgcggtgttgcagggcgtggagcccgaagtaggtgaggcgtgacgcatcggggtgtccccagacgccgaatacgccgcattcttcatgaatttcttccagttcggcggacaagcaaccgctccttccgtggaaaagtcaagggattatcgctcataagactttaccaagcaagggctacattccgccgttcacgcgtccttgcgactcgctacgggggtctgcgtcgagcaatacatggcaacaggtgatgtcgacgctgatgcagcgacaataatggcgaattgtgcacaggcacggcaagcagggacgccgtgtcgtctgctcggcgaagatgctgatgaggttgtcggcgtcaccgttgagccgcacaaggttgggcaatagtcaagatgtcgctgatcctatgaatcgcgactgaacggagttgggaagatgattcaacttatctgggtgctggtgggcatatgcctgctggtcgtcctgaatctgaaattcaagatgcacaacatgctgtcgctgctgctggtgggtctgttcatcgctctgacggcgggcattccgatcgacaagatcatcaccgccgtcgaaaccggcgtgggcggcatcttcggcaaactggcgatcatcattctgttcggtgccatcatcggcaagatcatgaccgatacgggtgccagccagcgcatcgccgacaccgtcatcgaaaaatgcggcaccagattcctgcccgtgggactgatgttcatcggtgtgatcttcggtatcgccatgttctacgaggtcgccttcctgatctccgtgccgctggtgcttgccgtggccaagaaggccaaggttccgtacatgaagctggtcattccgatcgtcaccggctgcacgatgggccattcgctgttcccgccgcagcccggcccggtggctctggtcgccgcgttcgacgccgatatctccaaggtgtacatctacggcattctcgccatcatcccggcgttgctgtgcgccggactgctgctgccgaagttccttcccggcatcaagagcattcctctgaactccatgctcaaaccggctccgaccatgccggaggatcagctgccgtcgttcgcgtcctccatctccattccgctcacgcctgcggtggtgatgatcgcgtcgtccgtggtcaaggagttcttcgacgagaagtccacggtatacaaggtgttcgggttcatcggctccgccgagatctccatgctgcttgcactgttcgccgcgttcttcctgctgatgcggagccgtgggcagaccatcgccgatctgaccggcaagatggaggaggccattggccaggtgggtaacgtgctgatcgtgatctgctccggcggcatcatcaaggaggtcatcatcgaatccggtgccgccgatcacatcgtgcagctggtgtccgcgattccggtgtcgccgttcatcatcgcatggatcatcaccgcaatcattcgtgtgctcaccggtcagggtgccgtggccgccatcaccgctgccggcatggtcgccccgctcgtcacccagttcggactcgatccggcgctgatggtgatttgcgtggcctgcggctccaacaccatcacgctgatgtacgacggcggtttcctgctgttcaaggagacgttcggcatttcgatgaaggacaccttcaagacgtggggtctgctggagctgatcaactccgtggtcggcctcctcgccgtcctcgtcatcgacctctttgtgtgagcatgaaatgagcgaggcgaatgcgatgaacgatatgaggaatcccgacgatgtgacgacccggagaacgtggacgttgcgtagcaagcgcaggcattacttcgattcctccgtgccgctcgatgaatgggatccgtatcagctcgatcttgtcgtcggcgatctcgatagtgtgtctctacgtgcggtgccggagggagtggaagtcgacaacgcttcgactgacgatgccgtgtgtctgtggatgccgggacgggggaatgtctgcccgtatggagttatcgatgtcgatgttgccggaactgcggaatcgtccacgaatgtggatgcgatcgtgtcaattcgtggtgggaataacgatcgcattgacgtgattcagcgtcattgtggtgatttagccacaggcattcatgtggagattgcccgcggaggaacgatcatgattgccagggatcttccggtgccagagggactccgttccaaagtgctgcgagtgagactcaacggacggtgtctaagcgtgcatgtcccgtctcgggaggttatggatggtgaaggtgccagtgaatcggtgacgtctgaaacactagggcatgactattgcggcagtcttgatattggtgacatcttcgatctccgtgacaatgcgttgcgttcgcgttttcgtctctatgggggcgtgcgaatccccgccggcggtcgtgccacggttcgtgccgttcgtcagtatctgacctgcgggacgggacaggccgatcctcgtgtgctgcaaaccgtcggcggagagccaatcgtggaccgtgactgcatctggctgtccatgaccactcgcggttacatgcgtgtcgaagacagctgtcagggcgtgtacgaacttgatctgcgttctttccgtctgaagctggtctccattctggcttttcgcccgagtcccgatgacccgatcgatggccatgacctgagtagtaccgatcgtcagtggcatgctgccagtcttttgtatgaccgtgacaaagatgggtggctgttcacagtcacctcgcacggggatgatcatgggctgtggcaggggactctgccgcgtgatccgcgtgatggcgggttcatggaggttcaagcctcgcgaatgcactatcgatccatcggcaatgaggaggattcgcatattgtccgtgaccaacggaccggggaatggcttatgacctatgtgcgaagaaacctcaaactggacaagtacgagaccttccttgcccgctccgatacatggaatggaacatacaccgacattgccggtccgtctgacgcacagaccggtccgatcctgcaaacggtcgacggacggagatacgtcttcgccgggctgggcgacagcggacgattcgttgcgatggatccggatgacggtctgcgcaggatcggattcctgcatctcgatcaggagccggacggcagaagtgtgtggccattggtggtgccgttgccggattcatcggaggacgctgacggtcgccgttgcctgctgatctcattcaaccgcgatcccaagctcggtcagaccccgaccggtagagactcctacggcgacgtgctgatctatgattccgtcgaaaaggagaggaatcgctgacgtttcgtacgacgaactttcgtctgctcgtttctcatgatcaactgttccgttctccgagtgtcatttcgttcccgtgagttatattgaaaaagctaattctcagtaagagcggactcgttagccgctttgaatgctaagcagatttctgcaggggcaggtcgaaagacctgccctgttttgtttttcagcccctatcgtgcataatgaaatcagcgaggaggctatagatgattaaacaaccatacaaattgggcattgatgtcggactcaactcagtaggcttggcagcaattcaggtcgatgacgaaggcatgccggttcgtattctgaatatgcagagtgtcattcatgacggtggtgttgatccggagaagaacaaggaagcgatcacccgcaaagcacaatcgggtgttgctcgacgtgcgcgcagaatgaagcgacgtcgtcgtgcgaggttgaaaaagatcgacacgctacttgaggctgcgggttaccccatcatcgatccagagtcattgactggcccgtttgaagagtggcatgttcgtagcaatctggcgacacgtttcattgacgatgacgagatacgcaaggaggacctttctattgcgattcgtcatatggctcgtcaccgtggctggcggaactcatacaagcgagttgattctctgcttgtggataatccgtattcagaacaatgcgaagagctgttccgccgtgccgaggagagagcgggagagcctctgcctgaggattgcactcctgctcaggcagtgtgcttggttcttgctaacggattcgcggaggctccgcggttgcggaccaaggtgaactcggcagaaaaggtagccgtggaaggcctgttgccggttcgtctgatgcaagaagacaatgcgaatgagctgaaacgtatttttgcggtgcaacgagttcctcgagacgaatggcttccactattccgcgaagtattccacgtgatatcgccgcgcggttcggctgaatcccgtgtcggccgcgatccactggctccaggcaaaccacgtgcgttgaaggcgtctctggtattccagcggtatcgcatcattaatgtcatcaccaatctacgagtcgtggagcatggcgctgaacgacctctgacggtgagcgagaagaaaacggtatttgataacctatgctcgccttcaaaggatgacattacatgggctgatgtggctgatcttctagggatgaaacgatcgcaaatccgcggagtgggcaagttgacggaggatggtgacgagcgtattgccacgcgtcctccacgtctgacctccatccagcggatatacgatgctgatgcgaagattcgcaaaccgttgttgcgttggtggaacaatgcgcctgaagccgctcgggaagctatgattcggttgctcaccaatacggtagacgtcgaccgagttcgcgacgatcttgattatgctgaggccattgaattcatcgatgagcttgatgacgatggtctgacccgtctggactccattgaccttccggctggtcgggccgcatattcggaagacacgttggtgaaacttaccgaacgcatgctgaacacggatgatgacctgcatgaagcgcgaaaagcgatgttcggagtatccgacaattggcgtccaccaactgatccgattggtacgcctctcggcaatccggccgtggatcgtgtgttaaagatcgtgaatcggtatatcgtcaactgtcagcagcgatggggcgaccctgaatcggtgcagatcgagcacgtcaggaatgctcttgggtccgttgcatcggctcggaaggacaaacgcgattatgagcggcagaatgagaagcggttcggatatcggcaggaccttgaaggacaactccgtaaaggcgagaatcttgaaagcgtaagaaactctgaccttcgacggttggaaaccgtgcaacggcaaaacgggcagtgcctgtattgcggtgcgggaatcactttccgtacctgtgagatggaccatattgttccgcgtaagggtgcgggatccacgaataccagaacgaatctggccgctgtctgcgcagaatgcaaccggttgaagtcaaacatcccctttgcggtgtgggcgcggacctctgcagcgcgcagtaggggagtgagtttgactgacgcaaagcaccgtgttgacatgttcctttttgatcccagatctgataacccccgcgagcagcgcgcattcaagcagggcgtcaaaggacggttggaacagaccgaagcggatcccccgatcgacaatcgttcgatcgagtcggtggcttggatggcggatgagctgcatcgtcgtattgattggtacttcaatgcagcaagttatcagaatgtgaattctttcggtgaagtcataccagcgaaggttcaggttcgcgtctttcagggaaaggttacggcgctcgcacgtagggccagtggtatcgagggaagaatccactttattggtgctcatgcaaaaacgcggttggaccgtcgtcatcatgcggttgacgccgcagtcattgcgatgatgtgtcactctgtggcccagactctggtggagcgagactctatgcgatcggctcaattccttacgggagtgagaccgggtgaagttcattggaaggattatccgggaccatcggatagcggttacggtgtgtatcatcgttggctggaatccatggagcgactgctgcttcttatgaacgatgccttggatgatgaccgtattccagtcgttcaatggcagcggtactctcttggcaattccatcgcccatgatgccaccattcacaagctgctgagggtgcgtttgggagatgctatggaggcggatttgattcgtcgcgcatctacaccggcactgtactgtgctcttacgaggttgccggactatgactcgaagaaggggctccctactgatgatgcgcgtcacattgtagtcaatggtgaacggttagaagctgatgactgtgttggattttttgcgtctaatgcggctcagatcgccgtgcaaggcggatccgctgacatcggttccaccattcatcacgcgcgcgtatataaatgctggacgacgaacgcgaagggtgttcgaaagtacttcttcggcatgattcgagtattccagactgatctgatgcgctctcggcatgaggacctgttctctgtgactcttcctcctcagacgatctctatgcggtatggagaaccgaggactgtgaaagccgtacaggaaggccgagcggagtatctgggatatctggtcgtcggcgacgagatcgaagtggacttctcgaatacgtctacgaacggacagattgatgaatttattcgattcttcagtgaattggactccctgacagaggaattatcctatacccgatgggttttggatggtttcttttcttcaacagttctaagactgcggccgagaatgatttcttcagagggcttggagaagctgtctgatgtaaggaatctgaaaattcctcaggctgtcatcaaaatattggataagggttggctcccctcggtagggccgattggtcagtatcatccacgcatcattcgccgtaacgcattcggtgagccgcgatggtcgtcatcctcgggtctgccgacttcttggtcatggaattgacgacgttgaaatgaggtaatcatgcagagccagtggcgagtgatcgattgcaccgatcttgaaggccgtatctcgtatgttcgtggcaatatgcggatacgcaaggatggcgaagacgatgtggcagatatcccactggctcagactgctgtcgttctgctggggcttcgtgtgtcgtgttcggcatcagtgttgcatgagatggcacgattcggcgtgtccgtcatgctgtgcgactggcgtggagtgcccgatgcggcacttcacgcgtggaccgatttgccgacgaccgttacgcaacgtcagcttgctcaggtgggcatgtcggtgccgaggaagaagaacgcgtgggcgcgtatcgtacaggcgaaaattcggggacaagcggcgtgcctggacgctctggacattgatggaggcggcgttatccgcggaattgcagctgccgtgcgttccggtgatccttcgaactgcgagggacaggcagctcgtgagtattggaaacgtgtgtttccgaaagatacttcattttcccgagtacctggcaagggaagcggaaggaacgcacaactggattacgcatacatggtcttgcgcgggttcacagtcaaagcagttatttcagcaggtttgattccctcgattggagtgaatcatcgtggcagaggaaactatttctgtctagcggatgatttgctcgaggtataccgtcccgctatcgattatgccgttgcgcagctttccgctactgattcgcttgaagatagagccgtgaagaagtacctggttgattcggtgaatcagcagttcaatggcagtggtttgaccataccgagttccttgaatgacttctcccaacaatttggtctgtactgcgaaaagaagatcgatcgattgccggtacctgagtatgtgggtgtgccatgaagacggatgaggatagtggtggcatgtggtgcttggtcatgtttgatcttcctgtgaagacaaaacgtcagcgaaaagttgcggctgacttccgtaatctgttgttggacatgggatactgcatggtgcagttctccgtgtatgctcgatacactccgactcaagcaggtaaccgtgcaacggtccgtgccattaaggagaatctgccgtctaaaggtatggtccgcattctgcacatcagtgatcatcagtggtcgtcagctttgcgattttccagtatgcagagggatgagtctgaggaaacgcctgatgtcttcacgcttttttgagcgtaggatcccctgaaaaccttgaaaaatagcccctcttgactggctatcaagtctatcaagaggggtgaatgctaattcccagcgcatcgcgcagcacgtcctcacggctggcaagtctatcaagaggggtgaatgctaattcccagctattgcggttcttcggtttgccgcatgtcaagtctatcaagaggggtgaatgctaattcccagccgtacctatgtcgtagagaatgaggccccaagtctatcaagaggggtgaatgctaattcccagcgggtgacgccgttcacgctggccgtcggcaagtctatcaagaggggtgaatgctaattcccagccggcaggcggatgtgggcggtttcctgtcaagtctatcaagaggggtgaatgctaattcccagccctgctgcgccagacggccggcgggatgcaagtctatcaagaggggtgaatgctaattcccagctacaggtaccgtccgtacacgcacacctcaagtctatcaagaggggtgaatgctaattcccagcggatatcatctgtcagtcgcgtaaatgccaagtctatcaagaggggtgaatgctaattcccagcgaagacggcgacgaccgctgtcacggtgcaagtctatcaagaggggtgaatgctaattcccagcgtagacctagaacctcaaaacctgtatacaagtctatcaagaggggtgaatgctaattcccagcagatcgacgagtttgcgcagaacgttggcaagtctatcaagaggggtgaatgctaattcccagcgcaaaagaaaaggcgcaacccccggaagcaagtctatcaagaggggtgaatgctaattcccagccctcgcgcgcatccccctatcgatcttccaagtctatcaagaggggtgaatgctaattcccagcctcgatatcgagacgtgtaaggtgatagcaagtctatcaagaggggtgaatgctaattcccagcaaatcgtcgaacgcgtcagccacacgcccaagtctatcaagaggggtgaatgctaattcccagcattctcaacgcgacatccaacgtcatatcaagtctatcaagaggggtgaatgctaattcccagcgttggggcttaggtgtttcaacagttcacaagtctatcaagaggggtgaatgctaattcccagcaccggttggttggttggatgtatgacgtcaagtctatcaagaggggtgaatgctaattcccagctttaatcatcaaagcaggctatcagtgaggatagcagaaatctcgtcaatgttataatcgaacagatgtttgaatgacggaggtgtgatgatcggcgaaacgacacgtgagacgacaaggaacgcacatcgcacctacattgccattgatctcaagtcgttttatgcgtcggtcgagtgtgtggcgcggaaactggatccactgaccacgaatctggtggtggcggacgtgtcgcgcaccgagaagacgatctgtctggcggtgtcgccgtcgctcaaggcatacgggctgcccggtcgtgcccgactgttcgaggttgtgcagaaaatgcggcagatcaacgcggatcgtcgtcttcaggcaccgggaaaacgactggtcggcgaatcggtcaacgccaacgaactcgccgcgaacccgaatcttgccgccggatacatcgccgccaaaccgcgcatggcccactatcttgactgcagtgccaagatctacggcatctatctccaatacgcggcggccgaggacatccacgtctattcgatcgacgaggtgttcatcgacgccacccgctatctgcgcgccgccggtatgaccgcgcaccagctggccatgaccatcgtgcgcgacatcctcgcccagaccggcatcaccgccaccgcgggcatcggcaccaacctgtaccttgccaaggtcgccatggacatcgtcgccaaacacatgcccgccgaccgggacggcgtgcgcgtggccgaactcgacgagcactcataccgacgactgctctggtcgcacatgccgctcaccgacttctggcgagtaggccgcggatacgcgcgcaaactcgaagcacacgggctcaacaccatgggcgacatcgcccgatgttcgcttggccgcgcatccgactactacaacgaggacctgctctaccggctcttcggcgtgaacgcggaactgctcatcgaccacgcatggggatgggaaccatgcaccatcgccgacatcaaggcatataagccggccgacaccagtctgagttccggtcaggtgctgcaacagccgtacgattacgcgcatgcgcgactggtggtcaaggagatgactgatctgctcgtgcttgagatggtgggcaagggattggaaaccgaccgcgtgacattggcgatcgggtacgacgtcagcggcgtggctccgaagcggtcgacacagtcggcacagtcgtcactgccagtgcaatcggcagagcgcgcaatcgacggtgggcccaccaaaatcgaccgatacggcagaaccgttcccaaacccgtgcatggttccgctgatctcggcggatacacgtcgtccactcgccggatcatcgccgccatgaccgacatcttcgagcggatcgtggacccgaacctcgccatacgtcgcatcaccgtggtcgtcgaacgactgcatcggaccggagagcctctgccggcaaaccgccgatacgaacagccgaacctgttctcggccatgggggacgaggatgacgagcgcgcacaagctgctaatacgtcggtggaaaatacgcgcaatgccgtcgaccgcaatgccgtcgaccgcaatgccgtcgaccgcggtgccgccgacaaacgcgtgatcgtcacgagcgccaggaccgctaaggcctctggaatcaccggacccgcagacacaggttccggagccgacgaggatcgcgagcgcatcatccagcaatcattgctggatatcaaacgcaaattcggcaagaacgccgtgatcaaggccatgaacctcgaagaaggggccaccggtcgtctgcgcaatagtcagatcggaggccatgcggcatgacattcgccgaaacccatcgctacgatgacatcatcgacctgccgcatcaccagtcgtcgcgtcacccgcacatgtcgatgcacaaccgcgcggcccagttcatgccgttcgccgcgctcacgggctacgacgaggccatcgccaaggtcgcggcacgggtgcggaatcaggatgatgagcagatctaggtcatgtgccgcacactcttcgaataccgattcgctgagtgcgcgatgaattggaacgacctacgattgtgcgcatccgataatcaattcctataacaacgccgatgcgaaatactgtcgaaatgggtatattcaagcgcggttttgccggtaggggaggaagcatcatgtccgtatcacagaacgagtcgcagcgctcgcagccccaatcgaggtcccagttagagccccgcgacggtcatgcgccccgcgccgggcacgcaaaccagacggtccaatgcccggtgccgttcgcaccgatcgccgagtcgattccacccaacgtgttcgccgtcatggatcgcaaggtggcgcaggccgtggcctcgggtgcggacgtgatcgacctcgccaagggcaatcccgacgcttacccggtcgccttcatccgcgacgccgccaaacgcgccgtcgacgatccagccaacgcccgatacactccgttcgacggcaagccggcctttcttgaggcggcggcggactggtaccgctgcgtgcatggcgttgcgctggactggcccacgcagctgttcgccgtggaaggcgcggtcgacggactggcgggactgtacgcgattctcgtggatcgtggcgatgccgtcgcgttcgtggatccctactatccctcctaccattgcatggccgtgatgcatggggcgcatgaggtgctgctgcccgcgctcgccgatcgtggtttcctgcccgaccttgacgccgttcccgcggagacatgggatcgggtcaagatgctggtgctcaactatccgaataatcccaccggcgcacaggctccgttgcagttccttcagcgggctgttgagttggcgcatgagcatcgtttcgttatcgtgcacgattacgcttacgcggggctgggtgtgggtggtgatgccccgggcgcgcagcagtacagcattcttgaggtgcctggcgcgttcgacgtggcggtggaggtgtgctcgctgtcgaagatgtatgcgatggcgggttggcgtgccggattcgtggccggcaatgaggctgtgatcgcacgtctgaagctttaccactatcagatgggatccatgatcaccggcagcattcaggacgccggcgttgtggcgctgcgttccgaccagtcgtgcgtcgccgagctcgcgcagcggtatgcggcgcgtcggcgtatcgtcgccgacggtctgcgtgcggcgggattggatgtgttcgattcggccggtgggatttacgtgtgggcccgtgtgcctgagtttgggtcgggcgcggctggggctgggcatgacggcgagagcgagcgcggcgtcggcaacggtaacggcggcgagaacgagcgcgtctggacgggcgagcgtctcgccgaccatctgctgtccgccgcgtccgtcgccgtgctgccgggcacctgtttcggcacggtcggccgtgactacatccgtctcagtctgctcaaatccgaacccgaactgcgcgaagccgtccgtcgcatcgccgccgcattatgaaccacacggcgatgctcgaaatgcggacgcatttatggacatcgtgctgcggaagattagcgtgaatcgcatggtcacttgggattccgcgcaatatcttcggttcaggaacgagcgcacgcagccgtcgcgcgatctggcgatgcaactgcccgccgatgacggtacggtcacgcgggtgcttgacatcggctgcggtccgggcaacagcaccgccgtgctacgtgaacgctacccgcacgcgcatattctaggcgttgacagttcaccggagatgatcgacgcggcaaaggccacccatccggacatcgaattcgcattatgcgatgtttcacgtcaggaccagctggacgcattgccgcatgatttcgacgttgtgttctccaacgcgtgcatccagtgggtgcccgatcacgcgcatctgatccccgcgatgctggggctgctgcggaaggacggtacgctcgccgtgcagacgccgatgaactacgaggagcccatccatcggatcatcgctgagatcgtccattccgcgcaatacgccgaccgtctgccgcagcagcgggagttcttcaacctcaccccgcccgaatactgggagctcttgcatcggcatgccgcgagcttccgcatgtggacaaccacatacatgcatacgttgccatcacacgaagccatcatggactggtatcggggcaccggtctgcgcccctatctgcaggcgatgcccgacgacgccgaacgggcagcattcgaaaagcaggtattcgaccgcgttcgtgacgcctatcccgtgcaatccgacggcagtatcatcttcccgttcccgcgcttcttcttcaccgcgatccgatagcggtcgggcggcgggtgctcaaccgttatcggatcggtttcatgatcatggacacgcagccgcgatcgccgctacgcgagcaacgcctcgcggtagcgctcggcggctgcggcgagcgcgttgtcgtcgagttccatcgcgccgaagatgacgaacggttcgcgccagacggcgtgggtgtatcgggccatcatccggtacggtgaaagaacttcatccatggtggcaccgtcgttctccgcctggtattcgcccgtgtctcctcccgcggtggtgacgaccatgatctccttgccgttcaacgcctcgccgtcgggaccgtacgcccagccgtaggcgaggaccttgtcctcccattccttgagcagtgcgggcgaggagtaccagtagagcgggaactgcaatacgatgcggtcatgcgcttcgacgagctgctgttcagcggctacgtcgatcactccgtccgggtagagcgcgtattcgtcgcgtacggtgatgtcgggcagttcggcggcggcctgcgcgagtgccttgttggcgcgtgattggccgttcaggtctgggtggaataccagtaccagtgtcttggtcatgatcatcgtcctttcggtttcgggaacgtttccagtgccgctgtcgggcggcggcaacgccgttcccattatctatcgtccattcgcagtgacgatcatctacacctgcagatatcgattggaatgttcccgttcgaggtgggagatggatcaggagaacaggtgtaggtatcgtgcggcggtcagggattttacgggggagtgcgagaacgcttcggaatcgcgggtgatgatgaagtccatgtcgttcttttccgcggcggctcggatcaggccgtcttcaaagtcaggttcgtccgaataggccgaatctcggcactcctcctgtccgaccggcagcaccgtcagcagtatgaggaactgtttgatgagttccctgcattccggttctcccaatggtttgcggcatagatagtagaaatccttcaatgagccggatgtcgtgtacccgagcacgtcggaaacggcgattttcctcatcaggccatcggccgaagcatgttctggtcgtccctcaaccgcgtagtcgatgagtacattcgtgtcgagcagcagtctagatggcacggttctccaactcctcacgcatctcctcgtaactcatggtgtcgagcgccgtaccgtgcggcagttcggcaatcagatgctgtgttttctcgtaggcttgcagccgtgcctgtcgacgcatgttatccgagtcggtgaattcgggcaccacgccagtgttggcgatgctttcccacagtcggcggatgagctcgttgggcgtcaggccggcctctttgatataagcgttggctatggtcttcgtattgacgtcaacgcttgcggaaacggttgccgtagccatcgcggaacctcctgtcgatcatcttgctatcaactatagataggatgatgtcggtccgtcaacaatgagtggcaaaggctgaagtaactgttgccgggccggcatcccgacccggcaacggcacgaggccaatcgtcttcgcacagcgtatgatgtgcgagaacgaccgcatcaccccacgtggcgttcgaagcggtggaatccgaggatctcctcgatcttggccatcgcatcagcggggatggtcaggccggatgccttgaggttgctttccagctggctcggcttgctggcaccggcgatcacgcagctgatctccgggtgctgcaggatccacgccagcgacagcaccgccagactcacgccaagctcgtcggccaccttgcgcagtcgctccaccttgtccaggttctcgtcggtgagcaggtcgttgatctgatgatcggcctgccatgtggcgcgcgatccggtgggcagcggctgacccttgcggtacttgccggtgagcagtccctgcgcgagcggtgagaacgtggtgatgccgatgccatggcgacggcagacgcccatgatctcgtgctcgatgtaccggtcgatcagattgtactgcggctggaccacggtgatcgggtagaggttgtaccggtcgatgatgcgctgcgcctcctcgagtcgggcgccgccccattcctccgaaacgccgtagtacagtaccttgccctgcgtcacgaggtcgctcatcgcgcgcagcgtctcggtcagatcggtcgtctcgtcgaaacgatgacagtagtacagatcgatgtaatcggtctgcatgttcttcagcgtctggtcgatgctttcgaagatgtgcttgcggctcaaaccacggtcgttcacgccggacccggtggggaagtagaccttgctggagatcacgagttccttacgcggaaactgcttgagcgtttcgccgaggaagcgctcggcgtcgccgcccgagtaggcgtcggcgcagtcgaagaagttgatgccggaatcgtaggcgagacggacgatgtcacgggcagtgtcgatttccgcggtgtcgttgagctgcgtgacccagctgcccagtgctatctcgctgatcttcagccccgatttgcctacgctgcgatatttcatatggactccttgggtgattctacgttttgtaatcggttacaaaactagattatgtcttcaagtccacttgaacgcaaatgcgtaggcgagcaatgggaaaacggcaggaagcggggcggcaagaaacggaaagggtgtggaaccgcagcggattccacaccctttccaatgcagtcgacgactcgactatgtcaatctatcggactatcgggccccgtatcggggtcaggcggcgaagtactccacaccggcctcgaacagcggctggtacttgtcgccgggcacgttcacgtagagtccgttgccggaacgctccgagtggcccatcttgccgaacacacggccgtcggggctggtgatgccttccaccgcgagcaacgatccgttcgggttcacgtccagatccatgctcggcacgccgttctcatccacgtactgcgtggcgatctggccgttggccttgagctgtgccagcacctcgtcggaa

SEQ ID NO: 562 - DNA, 23447 bp, synthetic construct
  source 1..23447: mol_type = other DNA
  misc_feature 1..23447: note = Synthetic
tacaccttcggccacgccgccgcccatgagcagcaggccggactgcagcgcggtcatgccgagcgaattctggatgtacatgggcaggatgttcatcgtcgtgatgaacgtgacgaacaccagtaccaccacgatcatcgacaggctgaacatcgggcgggagaacacacggaagttgagcatcggctgcttgagacgcagctgccggccgatgaacacgcacaatgccacggcgcccatgatgagcgagcccagcgtctcgcgtgccgtccagccctcctgaccggcgaggctgaagccgagcagcagaccgccgaagcccagtgtggacaggatgatcgacgggatgtcgatgcttggattggtctgtctggtcacgttcctcaccgtggggatggcggcggcgagcacggccacggcgatcacgatcaacggtacgaacaggaaccgccacggcaggaagtcgatgatcaggccggacagcgtggggccgagcgccggggcgaacgcgatcaccaggccgaaccagcccatcgccgtgccgcgcttctccggcgggaacgtgaggaacagcacggtctgcagcagcggcatgaggatgccggcgccgcacgcctgcagcacgcggccggcgagcagcacccagaatccgggggccgccgtgcacacgaccgtgccgaacaggaacatgcccaccgcgtagaagaacagttgccgcgtggtgaacttctggatcaggaacgcggtgatcgggatcatgatgccgttggtgagcatgaatccggtgctcagccactgggcggtgttgctggtgatgccgaactcgcgcatcagatgcggcagggccgacgtcatcagcgtctggttgaggatggcggtgaacgagccgaccatcatgatgatgatcggcaggatcggatgctttccggttttttcgggcttttccgatcgcttggtttcgggcatggctggcatggtagggcacctcgcagatatctcatgatcggaatccagccgatttcggtcgtcatgcgatgccaccgtgattcgtccgtctccgcgtgccggtgcgatgccgggcgaatgcggatggcgcggcgaagaaatcctgacactgatggtcagacacggatggaagacgtagcccccgcgaggattccccgtataaaatccgcgtatcagtctatcgatgccgcggacaagcgcttgcgagggcggctattcccctttccctaggtgcttcgcgctcgcggcagacatctatcttcgcttccctaggcacttgcgtcagtagatgacattatgggatcggagaatcgctgttgatgcgtgacggttttcggcacttttatgatgaaaactgcctaatcgtgctggcgtctattttgggaagcacctagggagcgaggggtagaccattgccggcaagcggaagtacctagcgaacgcaggataggccctggacgggtctcgggatacgactgtccaatcgacgatggataatgaaaccgatttcataactcgggagtccggcccatgagcatggaagccatgcggatccgcgaccacccaatgaggatcactgaaagaaaggcatgatcatgtcagcaaacagcagtgcgaacggcagcatcgcaggcggcgccggcaagcccacccgcaccgacatgctcgcacatatgggcagcatccagcaggccgcttacgtgcgtccgatcgaataccaggagggccgtgcccacggcctgcgcgccatcgaggtgaagaacgggccgctgcgctttatgtccatggctgaccgtgcgctggatgtggcgcagatcgagtaccgtggcgagaacctcacgttcctgtccaagcccgggctcaacgggcgcaaccagttcgacaccaacggtctggaggcgcagcgctcaatcatgggcggcctgttcttcacctgcgggttcgagaacatctgcgcgccgtacgtcacgcccgagggaagcgactacccggccggcagctatccgatgcacggccgcatccgcaccacgcccgccgagcacgtctgctccgacgcccactggaacgagaatggcgactacgtgctggagctgagcggcgagatgcgcgaggccgaactgttcggcgagaacatggtgcttcgccgtcggatcaccagcgtctacggcacgccgtccatcacggtcgaggacgaggtgaccaacgagtccttccgcaacgagccgctgatgtggatgtaccactgcaacttcggctggccgctgctgaacgacggcgcccaggtgatcatcccgagccgtaaggccacaccgcgcgacgaaaccaccgccgccgacaccacgccgtggagcgagatcggcgcgcccgaggccaacaagccggaaagcgtgtacctgcacgatctggccgccgacgccaacggccgcagcttcgccgccgtggtgaaccgcgccctcggtctcggcgtcgtcatcgacttcgccgccaaggacttcccgtacttcatggaatggaagtcgatgggctccggcgactacgtggtcggcctcgagccgtcgaactccagcgtgcacggccgcggctggcatgagaagcgcggcgacctgcacatgatcgccccgcagaccagcgagcgtaagaccgtcaccttcaccgtaatcgagggcagcgaggctatcgacgcgatcatcgcccgccgcgacgccctgctcgcgtagcgcttcgacgttcttctacttggcgagccactgcgcgtagcgtgcggcggcttcgtcgatctgcgcgtcggtctgctcgggcgtgcagccgtacacggcgaacggctcgccccagctgccctccacgtattccgcggtgatgcgcatgggattgagcacctcgtcgatggtggcgcggaacttgccctcgggcgtgtactcgtcggccgtgctgccgcagctcaccgcgcatcggaactccttgcccacgagcttgtctccgccggggccatacgcccagccgaaggcgagcacgtcatcctcccactgcttgagcagcgcgggggaggagtaccagtacatggggaactgccagacgatgcggtccgccttgagcagtgcggcctgctcggcggcaacgtcgatcgccgtggcgcccggatgcgggccggccgccggatacgtcgcatactcgtccaccacggtcacattgcccaccgtgcgcgcggccgcggccagcgccttgttgacgcgcgacgcgccctcaagatccgggtgaaacaccagcaccagcgtcttcacaggcgcggtgagggacgggttcccgttcgtcgtggttgctgcgtttgctgcggtttcggccatatctgctccttcgcggatcgttctacgtacccatccaccataccgccgttcgtcgccgttacgccgaatgcgtcggaatcgaatccgccacactgccgatgacctgcgccggattgccggccacgatcgcgttctcgggcacgtcatgcgtgacgatcgcgccggctccgacgatcgcgttgtcacccactgtcacgccctgcagcacgatcgcgcctgcgccgatccacacgcgctcgccgatcgtgatggaccgggagatggtggtggggcggttgtacgggttgcggtcgtggttggtggtgatgagctgcacgttcggtccgatgaatgtgccgtcgccgatggtgatgccgccgcggtccatcatcacgcatccccagttgacgaacacgttgcggccgacggtgatgttgtggccgaagtccgtgtggaacggcgggttcatgcggaacgacgggtcgaccggatggccgacgatccgttcgaacatgtcgtgcgtctcctccggcgtgtggtagccggtgttgagttcggcgcacagccgcatggattcgtggatgatctcgctgatcgcggcgtattcggggtccgacggcgacacgggcatgccgctgcgatcccgttcgagaatgtcggggatgttggggttggcgggactgtcggggttggcgggactgttcggcatgatcattccttttcgaagacggttctccgcgcaattgcggcgccggggttagccgggtctgccttcattgaaccgcccacgacaaggaatatccaataggtatcattcatgccgactcatgcccataaagcatgatgcccctatcagagtgtgctccctccgagggagggagctgtcacgcgaccgcgtgactgagggagggccgccatccgaataagcccctgtctccgctcccagctcatctacaccacgccgccatccgccccgccatcgtctacgaattcacgaaccgctcgaactccgccgccgcgggggagcgcaccccctgcttcttccacacgaacacggtaccgcacgtcagcgccggactcagcgggatcacgcgcacgccggggtaggtgttgccaaggtcgtagcacatgaagaggcccatgccgttggcggtcatgttcgcgccgttgctgggcagattgcagtagccggcgatgacgagtcgttcggctcgttcggtaccgaaccagttggcgagcaccttgcgcacggattcacgagcgggcaggatcagcggcgcgccggcaaggtcgtcgggtgtgatcgcctcgcgtgcggccaatggatgatgctccggtacgagtatgccccaatgatcggggatatcggggcggaagtattcgtattggctgacgtcgatgggttcggtgagcaggccgaagtccatgagtccctgttcgatccggtcctggatgacgtcggatgtggtgctggtcacctggaatcggacgttcggatggaggttgcggaaggcggccatgcgctgcgagaggaaggtcatggcgcggacctcgccacatccgatcacgatttcgccgctgagctcgttctcggattgtttgagttcgatttcggttttgtcggccagcgagatgatggtctgcgcccgttcgcgcagcagacgcccctcgtcggtgagggtgatggtgtgcggtccgcgatggaagagcgtgacgccgagctcctcctcgagctgcttgagttgacgggaaagggtgggctgggagacacgcagtagctgcgccgcccaggtgatgttgccttcttcggctaccgccagaaaataccgcaacacccgcagctccatattccctctttccctaattacactggctcccctcagagagaggagccagcggaccgtgcctgaagtgagataacgcgtgcggcttcaagacgcagcggatgaagtcgtacaacggtacgtcaagcctgctgtaataccgacgacgcacgcattacgtcattttccttcctgaagtgagataacgcgtgtgtccgcaaggcgcggagggcgaaggcgtacgacggtacgtcgagccctccgtaacgcagcggacactccattacgtcactgtccttcctgaagtgagataacgcgtgcggattcaaggcgcagcggatgaaggcgtacaacggtacgtcgaatccgctgcaacgcagaagacgctccgttatctcacttcagggctttggcaccgatgtcgtggcgataaaacagccccggcgtttcgagcgagtcgatgatcgcgtacaccttgtcctgtgcggcctggagggtgtcggcggtggtttcgacgaggaggacgcggccggagttggcgacgaggtggtcgccgtcacgctggacgccggcgtagtagacgtgggagtcggagtcgacggggatggaggggacgtgggcgcccttgatgacgttgacggggtagccgtcggaggcgaggacgacgccgagggtggcgcgctggtcgtcccaggtgaagaccggagtttcgtcgttgaggagggcccagatgccggcgccgaggtcggaggtgagcttggggaggacgacttcggtttcggggtcgccgaagcgggcgttgaattcgatgaccttggggccgtcggcggtggcgatgaggccggcgtaaaggatgccgttgaagggggtgccttcgtcgaccatggcggcggtgacgggcttgacgatggtttcgatggcctggtcgatgacgctctgggcgatctgggggacggggctgtaggcgcccatgccgccagtgttggggccttcgtcgttgtcgtaggcgcgcttgtgatcctgggagatgggcatggcccagaattccttgccgcgcacgaagctcatgagggagaactcctggccttcgaggaactcctcgatgacgacggatgcgccggcggcgccgaagcggtggtcgacgaagatgtcttcgagggccttgtaggcgtcgtcttcggtcatggcgacggtgacgcccttgccggcggcgagtccgtcggccttgacgacgatgggggcgcccttggcttcgacgtaggcgcgggcgtcggcgaggttgtcgaaggtggcgtaggcggcggtgggaacgttgtggcgttccatgagctccttggcgaaggtcttggagccttcgatctgggcggcgaccttgttggggccgaacgccttgatgccggcggcttcgaagtcgtcgacgaggccttcgatcagcgggacctcggggccgacgaacgcccagtcgatgccgttctgcttggcgtattcgatgagttcggcgtggttggattcgtcgatctggacgagcttgatgccgtcggattccatgccggggttgccgggggcgcagtgcacttcgctgacggtgtcgcccttgaggagggtgtgggagatggtgtgttcgcgggcgccggagccgatgacgaggactttctgacccatggtccttgtgttcctttcagattcagatgggatcaatcagtgcagtgggaagcccccgcggttgggcgggggctgatggtcgaggatggtgaacttagtgcagttcgatctgcgtgccttcggcgggcttgatggagccgatcacgtaggcgggctcgtcgtgctccttgagaatggcgagcgcttcgtcggcgcggtccttggagacggcgagcaccatgccgatgcccatgttgaagatgttgtacatctccatgtggtcgatctcgccggccttttcgagcacgtcgaagatggggaggacgggccaggtgccgagctggatgctggcggcgaggccgtcggggatcatgcgcgggatgttttcgatgaagccgccgccggtgatgtgggcgacgcccttgatgacgccggccgcgaagagcggcttgagggtcttcacgtagatcttggtgggggtgagcagcacgtcgccgagcttggcgtcgccgagttcgggcagttgggtgtccacggtgtagccggcctgttcgaacagggccttgcgtacgagggagaagccgttggagtgcacgccggagctgggcagaccgatgagcacgtcgccgtcggcgatggtggagccgtcgatgatgtcggacttttcgaccacgccgacggtgaagccggcgagatcgtactcgtcctcgtcgtacatgccgggcatttcggcggtctcgccgccgatcaggccggcttcggcctgcacgcagccgtcggccacgccggccacgacctgctcgagcagggccgggtcgttcttgccgcaggcgatgtagtcgaggaagaagaggggctgtccgccctgggcggcgatgtcgttgacgcacatggccacgcagtccacgccgatggtgttgtgcttgttggccatcttggcgacgacgagcttggtgccgacgccgtcggtgccggagatcaggaccggctccttgtagccgagggaggccaggtcgaacaggccgccgaatccgccgatgccgccgaccacgccgggacggttggtacgggcgacgtgcgacttgatgcgcttgacgacctcgtagccggcctcgacgctgactccagcattctcatacgcttggggcatgatgcacctttctgggtgatatcgatggggtatcgatgtatttttgatgattcgtgaaaatccgggttggttatgaccgatacggccgtcggtcggctattcgttgtcggggtcggtggtgtcgtcggcgtcagccgtctccgcacgctggcaggagtactcgttgccgatgtacttgctcttgtacagcgcgaactcgggcaggcgcacgcgatcctcggcggtgagcgacttgaggaagtcctgctcgtagtcgtcgagcgcggtggggtagtcgccgttgaagtaggcgacgcacaggccgccgtacggggcctcggtgttcagtccgatgctttcgacgagtccgtcgagggagaggaaggcgagcgagtcggcgccgatgtattcacggatctcctcgacgctcttcttgccggcgatcagctccttggtggtggagatgtcgatgccgtagaagcacgggtacttgagcggcggcgagctgatgcgcatgtgcacttcggcggcgccggcctcgcgcagcagctggacgatgcgcttggacgtggtgccgcgcacgatggagtcgtcgatcacgacgacgcgcttgcccttgaccacgccgcgcacggcggacagcttcatgcgtacgccttgttcgcgcagttcctgcgtgggctggatgaacgtgcgggccacgtactggttcttgatcaggcccatctcgttgggcagcccgctggcttccgcgtagccggatgcggcggacagggaggagttcggcacgccgatgaccatgtcggcctcgacgggggactcctgggcgagacgggcgcccatgcgcttgcgggcggagtgcacgttcacgccgtagatgtcggagtcggggcgggcgaagtagatgaactccatggagcagatcgccagctgggtcttgttggtgtactgcacgatcttgtagccgtggtcgttgaccaccacgatctcgccggggcggatgttgcgcacgagctcggcgcctaccacgtcgagcgcgcaggtctcggaggcgagcacataggcgccgttcttcatgcggccgaggctgagcggacggaagccgttcgggtcgagcgcgccgatcatggcgtcctcggtcatgatcaggtaggcgaagccgccgtgcaccgtgttgagggactccttgagcttgtccatgaacgtgcgctggttggagcgacggatcaggtgcatgagcacttcggtgtcggagttggagtggaagatcgcgccttcgtcctcgaggttgcggcgcagggtgcggcagttggtgaggttgccgttgtggcacagggccatgtcgccgtcgtggaagcggaagatgaacggctggatgttgtcggtggacccggagccggcggtggcgtagcgcacgtggccgatggcccggttgcccttgagtcgggcgatctcgcgctcgtcgccgaacacctgggtgagcaggccgagtccgcggtggccgatcagatgaccgttgtcgttggaaacgatgccggcaccctcctggcctcgatgttgcagggcgtggagcccgaagtaggtgaggcgagatgcatcggggtgtccccagacgccaaagacgccgcattcttcatgaatttcttccagttcggcggacaagcaaccgctccttccgtagaaaagtcaagggattcgtcgcttcccaaactctaccaaccaagggctacaacagttcacttccgcgtcgccgcccatacaccatgttcccgtttcccgtgcgggaagtccgcattccggacctacgacatccgtatcagacctcatgacttcacctctctggctcccctccccgaggggagctgtcggcaacgccgactgaggggagtatcgccccgactccactatcctgcatatttctccgtcatgcgctatactaaaaatgctaattctcagtaagagcggactcgttagccgctttgaatgctaagcagattttctgcaggggcaggccgaaagacctgccccgtttttgttttcggccttcgtcatgcataatggaatcagcaaggaggctatatatggctgaacaaccatacaaattgggaatcgatgttggactatattctgtgggtttggctgcggtcgaagtggatgatgaggggatgccggttcgcatcctgaatatgcagagcgtcatccacgacggtggtgtggaccctgaaaagaacaaagacgccattactcgtaaggcgcagtccggcgtggcgcggcgtgttcgccgtatgcgcagacgtcgtcggactcggttgaggaagcttgacgagttgctcgaggccgcggggtatccgatcatcgaccccgaattgttaacacgtccgttcgaggaatggcgagtccggagtgaactggcaacacggttcatcgaggatgacgggcttcgtcaggagaacatttcaatagcagtccgtcatatggcacgacatcgtggctggcgcaatccgtacaagcgggttgattccctgcttgtagacaatccgtattcatcgcagtatgaggagctcgttcgtcgggcggaggagcggttgggcagacccttgccggagaattgcacgcctgcgcaggttgtggatgcggtcctgtccaatggtttcgcagaggctccacgtctgcgaaccaaggtcaacgcggcggagaaggttgccgccgagggattattgcccgttcgactgatgcaggaggataacgcgaacgagctcaagcgtattttcaccatgcagcgggtgcctcgggatgagtggcaaccgctgttccgtcaggtgtttgccgcggtgtcgccgcggggatcggcggaggctcgtgtcggtcgggatccactgtcgccgaataatcctcgcgctctgaaggcgtccctggtgttccagcgataccgcatcgtcaacgtcatcaccaatatccggatcgcggagggacgaacagaacgaccgctgacggtggatgaaaagaagacggtgttcgaaaacctttgctcatcctctcaggacgacatcaactggactgacatcgctgatcttctgggattgaagcgttctcagatccgtggcgtaggcaagctgacacaggatggagaagaacgtgtttcaacccggccgccgcgcctgacctcggtgcagcggattcatgatgccaaggcgaagatccgcaagccgctgctgagttggtgggccgctgcctcggatcctgcccgagaatcgatgattcgtctgcttaccaatacgatggacgtggatcgggttagggacgatcttgattacgccgaagccatcgaattcatcgatacgttggatgatgagggactgacccagctggactccattgatttgcccactggacgcgccgcgtattcggaagacacgctgtcgaagctgaccgaacgcatgctgaacaccgacgatgatctgcatgcggcgagaaaggcaatgttcggggtctccgacaactggcggcccccaatggacccgatcgccactccgataggtaatccggccgtcgatcgcgtactgaagatcgtgaaccgttacatcgtcaactgccaacgacggtggggcgaccccgaaacggtgcagatcgagcacgttcgtaatgcattgggatccgttgcgttcgcacgtaaggataagcgtgattacgagcgacgaaacgaaaagcgatctgcataccgcgatgtcctcggcaggcagttgcgtgaagccgaacggtatgaccatgtaagaaactctgacatccgacggctggaagccatacaacgtcagaacggtcaatgcctgtattgcggcagaggcatcaacttccgtacctgcgagatggaccacatagtccctcgaaaaggggctggttccacaaacaccagaacgaatctggccgcagtctgcgctgagtgtaaccgaatgaagtcgaatacgccttttgcggtgtgggctaggacccctgcggcccgtcaacgaggagcaagcctgaccgaggcgaaaaaacgtgttgacgccttcctgttcgaagataagtccatgaacccacgcgagcaacgtgccttcaaacaaggaatcaaaggcagactcgaacaaaccgaatcggacccgccgatcgacaaccgttcaatcgaatcggttgcatggatggccgatgaactgcatcgtcgtatcgactggtacttcaatgccgcgcaataccaatcggattccggcagagcggatgaacggacgcatacgaccacggtacgagtattccaggggaaggtcaccgcgctcgcgcggcgggccagcggtatcgaggggcggatccgtttcatcggggcaaataccaagactcgtttggaccgtcgtcatcatgcggtggatgccgtggttatcgcaatgatgggccctcgcgtcgcgcagacgctggtggaacgtgattccatacgtgagtcccagcacctcatgggagtggctccggatgagactccgtggaaggagtatcccgaaccgtcgaacgccggttatttctcctatcatcgctggcttgcgtccatggagaaactgctgtgcctcatgaacgaggcacttgacaacgaccacgttgcggtcttccagtggcagcgatattcgctgggtaattcgatcgctcatgatgccaccatccataagctgctcaaggtgcggctgggtgacgccatcgacacggaactaattcgtcgtgcatccacgcctgcgttgtactgtgcactgacaagattgccggattatgacccggttaggggtctatctggtgatgattcgcgccacattgtcgtcaatggcgaacatctgggaccggatgacagtatcgggttctttgcatcgcaagccgcccagatcgccgtacagggcggttccgcggagatcggctcgaccattcaccacgcacgtgtataccgatgctggacggtgaacgcgaagggagtccgcaagtatttcttcggcatgatccgagtgttccagaccgatctgatgcattcacgtcagagggatctgttttcggttgcgcttcccccacagacgatttccatgcggtacggggaaccgaagaccgtgaaggctgttcaagacgggcgggctgaatatttgggatatctggtagtcggcgatgagatcgaaatggacctctcgtccgttccgctaggtggccagataggtgaatttgttcagtttcttgaggaactgggtgcttctggaagcagtagttgtaatcgatgggtattcgttggctttgattctccttcccgtctgatattgaagccgagaatgattgccgcagagggattggaaaaccttgaaaaaaagggagttgagataccggaggctgtccgtaaggtaatcaagcttcctggctggcgcgtagtggtgaatggattaggggattaccgagcacgagtaattcgccgcaatgcatttggagaaccgcgatggtcgtcatccgccggtttgccaatctcttggtcttggcaacaatgacatggacgtgaggtaatcatgcagagccagtggagagtgatcgactgcaccgatctcgaaggaagaatctcgtacgttcgcggcaatatgcgggtgcggcgagatggagatgacgatgcagtggatattccactggctcagaccgcagtcgtgctgctgggccttcgtgtatcctgttcggctgccgtcttgcatgagatggcgcggttcggcgtatcggtcatgctgtgtgattggcgtggtgttcccgatgccgcgcttcatgcatggaccgatctgccgaccacggtcacacaacggcagcttgcgcaggtggatatgtcgttgccccggaagaagaacgcttgggcccgcatcgtgcaagcgaagattcgtgggcaggcggcttgtctggatgctttgggccttgacggtggtggcgctattcgtggaattgctgcttccgtacggtcgggagatccgtcgaactgcgaaggacaagccgcgcgagaatattggaagtgcgtatttcctcaggacgtttccttttcgcgtgttccaggtaaaggaagcgggcggaatgcgcagctggattatgcatatacggtattgcgagggttcacgatcaaatcggtcatttctgcaggattgatcccatcaattggggtgaaccatcacggtcgaggcaattacttctgtttggccgatgatctgttggaagtgtatcggccagctattgatcattcagttgcacaactttcggcagctgactcccttgaagacaaggcggtgaaaaagtacttggtcgattcggtaaatcagcagttcaatggcacgggactgactataccgagctcgctgaacgactttgctcagcaattcggcctgtactgcgaaaagaagattgatcggctgctggtgcccgagtacttaggtgtgctatgaaaacggatgaggacagtggtggtatgtggtgtttggtcatgttcgatctgccggtaaaaaccaaacagcagcgaaaaatcgcaacggatttccgcaacatgctgctcgacatgggatattgcatggtgcagttctccgtctacgcgcgctacacaccgacgcaggcaggtaatcgagcgacggttcgcgccattaaagagaacatgccgcccaagggcatgattcgtattctgcatatcagcgaccatcaatggtcatcagccttgcggttttccggtatgcaacaggacaagtctgaagagacccctgatgtgttcacgcttttctgaacgcagaaaccccgagaatccttgaaaaataatccctcttgatcgactatcaagtctatcaagagggatgaatgctaattcccagcgcggcatacgcgttggtcatccgatttccaagtctatcaagagggatgaatgctaattcccagcgcaaccgggaacgaatcaacgcacgacgcaagtctatcaagagggatgaatgctaattcccagcatatatacccatgttccttgtttgcgaccaagtctatcaagagggatgaatgctaattcccagctgtgtggcccacggacagcacagacagccaagtctatcaagagggatgaatgctaattcccagcttcagccattgcttcaagcttctatgaggatagcagatagtagaaccaacgatataatcgaacatatgtttgagcaacggaatgcggggcgcacctacatcgcgatcgatcttaagtcgttctatgcgtcggtggagtgtgtggcgcggggactggatccgctgaccacgaatctggtggtggcggacgtgtcgcgcaccgagaagacgatctgtctggcggtgtcgccgtcgctcaaggcatatgggctgcccggccgcgcgcgactgtttgaggtcgtgcagaagatgcgcgaggtcaacgccgaccgtcgtctgcacgcgcccggccgacgtttgatcgacgaatcaacaaacgcgaacgagctcgctgcgaacccgaacctcgccgccggctacatcgccgccaagccgcgcatggcgcactatctcgaatgcagtgcgaacgtctacgcgatctatctcaaatacgcggcggaggaggacatccacgtttattcgattgacgaagtcttcatcgacgccacccgctatctgcgcgccgccggcatgaacgcgcacgcgctggcccgcaccatcgtgcgcgacatcctcacccagaccggcatcaccgccaccgcgggcatcggcaccaacatgtacctcgccaaggtcgccatggacatcgtcgccaaacacatgcccgccgaccgcgacggcgtgcgcgtggccgaactcgacgaacactcataccgcagactgctgtggagtcacacgccgctcaccgacttctggcggatcggccgcggatacgcgaaaaaactgcaggcgcacggcctcaacaccatgggcgacatcgcgcgctgctcgctcggtcgcgcctccgactactacaacgaggacctgctctaccggctgttcggcgtgaacgcggaactgctcatcgaccacgcgtgggggtgggagccgtgcaccatcgccgacatcaaggcgtacaggcccgccgacacgagcatcagctccgggcaggtgctgcagcagccgtacgactacgcgcacgcgcggctcgtggtcaaggagatgaccgacctgctcgtgctcgagatggtgtccaaacggatggagaccgaccgcgtgaccctggcgatcggatacgatgcgagtaatgtacgcggcacggccgacggtcacggtccggcaaaaagtcccggtccgaccgaaaccgactggtacggacgcacggttcccaaaccggtgcacgggtcggtcgacctaggcgactacacgtcgtccacgcggcgaatcctcgacgccatgaccggcatatacgaccggatcgtggaccccgcgctgagcgtgcgacgcatcaccgtcgtcgtcgaacgactgcacgagatcggcacgccgatgcccaaaggtcatcgatacgagcagcccgacctgttctcggatgacgggaatgcaggagaattgcatgaggccaatgggtcggacgatgcggaacgtatggacggatcggtcaaacgtccgaatgcggtctcgccgaacacgaccccattgaacgccaccgatcgagctggtgacgaacgccgcgaacacgacatccagcaatccctgatcgacatcaaacgcaaattcggcaagaacgccgtactcaaaggcatgaacctcgaggaaggcgccaccggccgactgcgcaacagtcagatcggcggacacgcggcgtaaaacgtaaaagagatagaaggagacaagccatggcattgaacgaaacccaccgctacgacgacatcatcgacctgccacaccaccaatcgacccgtcatccgcacatgcctatgcgcaaccgcgccgcacagttcatgccattcgccgcgctcgccggctacgacgacgccatcgccgccgtagccgagcgcgtgcgaactcaggatgactgattccgtcgcacacaaccggaagggaaccgttgagtgcgacgaatcgggacaacggcagcgttgcaatctcaagggaaacgatattcctgaatcacgcactctacggaagccgtgccaaagagtgcgtcggaaagagacgcctccggccgctttgcaccgccaataatctcgctctatagcaacgccgatgcggaatcgccgcaaaatcggtatattcaagcgcggttcggcaggaaccatggaactcgtcgtcgacggcaaaggaaggaacctgcaatgtccgattcggaagctgaatcgcaatccacacgccagtcgcgccagtcagcccaatgcccggtgccgttcgcgccgatcgccgaatccataccgcccaacgtgttcgccgtcaccgaccagaaggtcgcgcaggccgtggcacgcggcgttgatgtgatcgacctcgccaagggcaatcccgacgcctatccggtcacattcatccgcgacgtcgccaaacaggccatcgatgatccggccaacgcgcgctacacgccgttcgacggcaagcccacgttcctcaaggccgccgctgactggtaccgtcgcgtacacgatgtcaacctcgactggcccacccaactgttcgccgtggaaggtgcggtcgacggtctcgccgggctctacgcgatcctcatcgaccgaggcgacgcggtctcgttcgtcgacccgtactatccgtcgtaccactgcatggccgtgatgcacggcgccgaggaagtgctgctgccggcgctcgccgaccgtggttttctccccgatctggatgcggtgccggcggagacctgggatcgggtcaagatgctcgtgctcaactatccgaacaatcccaccggggcgcaggcgccgctgtcgttcctgcgccgggcggtcgaactggcgcacgagcaccggttcgtgatcgtgcacgactacgcgtactccggactgggagtcggcgtgaatggcgacgtgaacgcgccggacgcccagcagcacagcattctcgaggtgccgggcgcgtgtgatgtggccgtggaggtgtgctcgctgtcgaagatgtatgcgatggccggctggcgcgccggattcgtggcgggcaacgaggccgtggtcgcgcggctcaagctgtaccactatcagatgggatccatgatcaccggcaacattcaggatgccggcgtggtcgcgctggaatccgaccagtcgtgcgtggcggagttggcgcagcggtatgccgcccgacggcgcatcgtggccgacggtctgcgcgtggcgggtctcgacgtgttcgactccgccggcggcatctatgtgtgggcgcgcgtgccgggcagctggacgggggagagcctagccgatcatctgcttgaccaggccgccgtcgccgtgctgcccggaacctgcttcggcaaggtcgggcgcgactacatccgtctgagcctgctcaaatccgagcccgaactgcgcgaggccgtgcggcgcatcgccgccacgctgtagatggttccgatccggtttgggtctggggttggacggttctggttctcggggcacaatgcgggctgatccgagctctgatccgtaacgccatccgcagtcaggtcgcaatgagctctgtaccaaggaccgtaatcggtggtcggctgatagccagaccaccgactggttacgttccgtcttgcgttgataacggaacgtaaccgtagaggccgcttcgattacgttccgttgtgagccggaagcggaacgtaaccgagatggtaattacggttatgttccgcatggaatcgatggcggaacgtaactgagagcgttggatggcagccgaggccagcgtcagcccacgtggcgctcgaagcggtggaatccgaggatgccttcgatctcggccatcgcatcgtcggggatgaccaggccggacgccttgaggttgctttccagctgactcggcttgctggcgccggcgatcacgcagctgatctccggatgctgcagaatccacgccagcgacagcaccgccaggctcacgccgagctcgtcggccaccttgcgcagctgctccaccttgtccagattctcgtcggtgagcagatcgttgatctgatggtcggcctgccacgtggcgcgcgacccggccggcagcggctggcccttgcggtacttgccggtgagcagaccctgcgcgagcggcgagaacgtggtgatgccgatgccgtggcggcggcacgtgcccatgatctcgtgctcgatgtaacggtcgatcatgttgtactgcggctgcaccacggtgattggatacaggttgtagcggtcgatgatgcgctgtgcctcctcaagacgcgcgccgccccactcctcggagacgccgtagtagagcaccttgccctgcgccacaaggtcgctcatcgcgcgcagcgtctcggtcagatcggtggtctcgtcgaagcggtggcagtagtacaggtcgatgtagtcggtctgcatgttcttcagagtctggtcgatgctctcgaagatgtgcttgcgggacaggccgcggtcgttcacgccgtctccggtggggaagtacaccttgctggagatgacgagctccttgcgcgggtactgcttgagcgtttcgccgaggaaccgctcggcgtcgccgcccgagtaggcgtcggcgcaatcgaagaagttgatgccggaatcgtaggcgaggcgcacgatgtcgcgcgccgtgtcgatctcggcggagtcattgagctgcgtcacccagctgcccagtgcgatctcgctgatcttgagtccggactttcctacgctgcgatacttcacgaatgctccttggttgtgcggaataccttctgtaatcagttacatacccagagtaggccttcaaccgtacttgaacgcaaattcttgtgaagccggtttatctggtgcggcaccgagcctagcctgaaagtttggccaggagctctccatgcggaaggtgagggctcggatccccgcagtcggcagatgatttcggctatctccaagttctgatgtgattgaagggacttgcagacatcaatccgaaagttctgaagttcctgacggggaacctccgggtatgaatggtgcaattgcaacgttcatactccgttttcgggctcggggaacttcagaacttggagataggtgtccgcaagggacgtaaatcacttcagaacttgaagattgccggtccccgcagagtatttcgggactcatcgacgacgctgggcgagcaggacgagcgattcggtggccgtaccggtgttttgtcgacctaattccgagttctgtgcagattcctgcagggcacaaacatcaaccctcgagttctgtgcgcgaaattcgtcatatccagagtatgatccttgatatttcagaccttgtacttcgcatattctcccgatgacgcacagaactcgggaattgatgtctgaggcactccggaatccgcacagaactcggagattgctcgagcctcgagcctgagacaggtgatacttcgaatgcgacaacgcgacaaggtcattatcatgacccggtccgcggggaacctcggtcgggaacctgcggtctctctgtcccccgtcacggggctgccctacaccagtgggcgcactatctaagacgcggatacgtgaaggagaccgctacagaggcctgccacgttccgacgcatgcgccgcatcgcgaacaagaccgacagacggctcgccacgatttggcgtgggagtctagagctcggacgtatccggcggatctcggagaaccccgagaaacagaggagttgcgccgttgtctccgggcagatcggcatggagctcgtaaatgaagggccgatccacacgcacggtcaccgtcgtgtccggctccggcggcggcccgcctgcggggatggcgaacatggtgtatgcggcggccttggcgccttcctcggtgacctccatgcgcgtctcctgaatggcctgaccgatgtacaggggttcgtcggccatggcggagaagtccgcacggtcggggtcgaatgcgcgtgtgatgcccaagacgttcagacatgtccgtaatgcagcggtatcgaatgtggaaccggtgacgaatcgcggcatgatcaggtccaccaaccgtcgccaactgcttgttgccggcgtatcaaaagccttattaagcaatggcgcattgttcagaagccggtcaaggccgacggactcgtcgggcaggatgatgctcacgccaccttgcccgcctctgaacgaaagtgtgaccttgatccatccgtcgccatgcgcgtacccgatggtggttgacgtcttgtgcatcatgggcgtaggcgcgtcgccgtgtgtgccatgaaatggttcgggccgggtcagcttcctgtcgaacgtgctgtaccagcgaccgtcggaaaccagtgcattcagcagcaccagcacggatagcggatccacgttgatgttcggtttgagcatgccgttggtgtgctcgcccacccaatccgacatgcggcgactggtggtctggccgaatagctcgtggtcgaatacttcggcctcgcatcgtcgaatgccggcaagccattcttggtgcggagtgattccatcgcgaacccataacgagtcggcgatccgatggatgccggtggcgttgagcgcaccgcggaagtctttcagatcgtccgtggtcgcgtccttggaatgcagcgcggtctccagctcctgtcgggtttcaccagttgcgcccgtggcaaccagagtcagagccatccacagcgaagtcggcgagtagttgacgttgccgtcaccggccaagaatacgggagcagaggcatgggcgaatccacggattgcatccgtcacgcaatcgggagccaacggcggaggcatcacgtcctcgtcctcgtcgtcgctccagttctcgttgtcctcatcgtcccagtcgtcattctcgttatcgtcccagtcgtcatccgcccgagtctctttgccgatcacgaattcctcttcgtcgtccatcgtcatccattcctcctcgaacagaaagccaacgctgcgcatacgcagccgcagtggcacgtgcatcttccacgatacccgaagcattcgtatccggcgctcattcgaacgtcctcagatgacgcatccagccgaatttggtagtcgaagcgcgacgtagtggttggcctggtagtcgaaacgtgacgtttcggacgctgtatgaggacgcacgctgtcccgttcgggctaccaagttcggctgaacgcggctggattcggtcagactacgccagactgccaaaatctccgtcggatttgcgatgaacggtgggacgacagagggggtgcggaaccgagacaggttccgcaccccctctggatttaggtgaagcgcgcgcgaatcttatgcggcgaagtactccacgccggcttcgaagagcggctggtacttgtcgccgggcacgttcacgtagaggccgttgccggagcgctccgagtggcccatcttgccgaacacgcggccatcggggctggtgatgccctccaccgcgagcagcgagccgttcgggttcacatccaggtccatgctcggcacgccgttctcgtccacgtactgcgtggcgatctggccgttggccttgagctgcgccagcacctcgtcggaggccacgaaacgaccctcgccgtgggagatggccacggtgtgcacgtcgcccacgttggtgcgggccagccacggggacaggtcggaggccacgcgggtgcgcaccagacggctctggtggcggccgatcgtgttgaacgtcagcgtcgggcattcggcggtcatcggcacgatgtcgccatacggcaccagacccagcttgatgagcgcctggaatccgttgcagatgcccagcatcagaccgtcgcggttcttcagcaggtcgcgcaccgcctcggtgacggccggggcgcggaagaacgcggtgatgaacttggcggagccgtcgggctcatcgccgccggagaagccgccggggatcatcacgatctggctgcgcctgatctcctcgaccagcgcggcggtggactcggccacggcggccggcgtgaggttgttcacgatcagcgtggtggcctcggcgcccgcgcgctcgaaggcggcggccgtgtcgtactcgcagttgttgccggggaacacggggatgaccacgtgcggcttggcaaccggggagcccacgtacacggtcttcttcggcgcgttgaagctcacggcctcgacggcgtcgccatgaccacggtacgggaacacctcctccatgccatgctcccaggactcctgcagcacggccagatcaagatcctcgccggcggcgtgcagcacgtagtcctcagtggtctcgccgatcttgcccatgcacacgaggttcgacaccgcgggcagcttgccgttgtcggccagctccacgatgaag

SEQ ID NO: 563 - DNA, 23420 bp, synthetic construct
  misc_feature 1..23420: note = Synthetic
  source 1..23420: mol_type = other DNA
ccccttgccgatatgcgttcccggagcaatcgacacattccctgcaatccaaacgttttcctcgataatcaccggggcgtcgatgtaacgatcgtcaaaagggacggcgttcaaatcggaagaaccatagttatgcgtgccggcatagcagaacacatgaggaccaatcatcgtcccgtcacctatggagattaaagaattcgcattaaagtaacaaccatcaccaatgaacacattggacccaataatcatattatatgaattacatagttcactttttccaccaaatcttacattgagaccaagttccctaagtttaataaatttgacgccaaaacgaatcatttttcgtcgcggatatgatgcgcacttcatccacattctaattttcctcagaactttatgcattattacctcgcatattcgaaggattcaataattctcgggaataaaagccaagataaagaataaaatggaaacctatatcatacaattcaccaaatacgccacacacaagaaaaccggtaagaaaaatagtgatgacaatggcgataggactattcctacaatcatacaatttccatatacagaccaaaaccagtaccgccacaaccgcaaaacccacgacaccatacttgtacagggtgtccagcagcgcatcatgcgcatgcgtcactatctgcccgtacggggtaaccagttccgtggtggaaatgtcatgatagccacgtcccagcaacggccgttccgctattctccgcattgcggtatcccagatttcggcccttccggtaaaggtcatatcccttttcaatacatgcgtgatgaaatcgctcagcaatgggacacggcgcaatagcacgcagaacacaaaaaccgtggcataaataccaagtccgacgaaggaattgaagaacctgcccttgatgacaccaattgcgtataacaccgcaatcagacagcacagcgtaaggatcgtagtgctggtggcggaattcgcgctcaccgcacaccacaccacgacaatcatcagaaggacagtaccgaatgaaggtcttttgcttttatacaaatccaacagcacagcggtgacgaccagagggaagaaccagtcacggaattggttcttatgtccaagcggccacatctccaagttgaccgcatcggagaaaccatcaggatgtgacggcagattcaccaccatgaacagcgcattggcaatcacgatcagcgataatacaagcaacgctattctcaacattttgcgcgaatcggaatgtacgccgatattcatcacgcaccaaagctgaagaaaatacaataacgtttttatataatattgcgacaaatcgccatacatcatagtgggaacgaaaaacgtcacgcacatcgccagcgtcaggaaaaagacggcatcgagtttgatacgccggaatgctacgcaagccaatgctcccgtggccgctatgccgatgagctgcatacgatacgctacgctctgcatgccgatgattcccattcccacaggtgcgaacaatcccaggaatgagagcagcatcaggatgtcgaacagcgaaatcgggaacgacaacccgttctcgatccatcgcaacgcatcaaatcgggatctacggcctgagccgtcagaccgcatgcggattggattctgcatcgccgaacacaaccttctcgaaaagcttcacagcggttttcatattgaatgaggtgtgaagaatctgttctcccgtactgacgcgatcctccaaggctaccggcctgcaggcatcagcccatgcggagaccgagccctccccaataggcaagaacaccgtttccgaactgatacgagcctgttcggtgacggagtcggatgccaggcatttcaagccggatgcctgcgcctcaatcaatacgttcggcattccttcaaagaacgaggggaataccagtacgtcaaacgccgcgtacagtctcgatacatcactggtgggaggaagaaaaacaacatgatccaagaccccgcacgcaacggcgtaatccttcaactcacccagcaaatcacccttgccgacgagcatcaaacgactgttcacattacgccgcagcaattccgccagaacatcaatgcaataacgttggttcttttgcggcgcaaacctgcctatattgcccagcaacatgacatcatccgcgatgccgtaccgttctctcaccgaaacgcgagccgacgaatcgaacttgtatgcgttgaaatcgatggcattgggcagtatggtgaccttcccgtcgcgtctgcttctttccccgaacatgaaatccgcggcgacatcggagggggcgaccatgcgatcacaacaggcatgcagaatcacccttccgaccgaatgcgcgacgcgctccttcagagacctccctgatgtgttggagttggttgagcggaatacggtgcgcaccttcccagcggtttttgcggccagcagatccaaggaggccatggcgttctccgcgtttctgatcaccgcggcataaccgttctccttcaccacatgcctgatatccgtaaacgccttgatcggattgcggctcttcttggtcacccggatgatacggcctccgagacgcttgatctcggcgtcatagaaaccttcctcatcggtggagacggcgaaatcaagctgatagcgcgacttgtcgagcgcacgatagtacttcatcatcatcgtctcggccccgccggtatccattttggagaccacgaccagtgcacgtttcatctatctctccttctcaatgcttacgtccctcggaattcatcattatcccgttatcaccggcgtggaccgatgccgccctccagtacatcgcgatatacggcaaggtactgcggtatgaccttgtcctgggagtacgcggagcggacggcctcgatattcctgcgcgacatcgcctccctgacctgcatgggtcgcatccgttccaatcccgcagcggccgcatccgtatcaccgacgttgacgacgacgcctccttcggaaccgatcatgtccttgttcgctgcccaatcggtgacaacgcacggcaatcccgcggccatcgcctcggtcaatgccaccgagaatccctcatgcacgtaatgagacagaaagaagaacacgtcggtgttcatcaacgcggcatgaaccgcatcatggctctgaggaccggtcagcaccacgttcgacggcgccgccgcggtgacaccctcttcgatcttgccgatggcggtgaatgtgatgtccgggaagcgtctggcgatgttcagataatcgtagatgcccttttcctcgcatacgccacctacatacaacgcgttcgttatggcggaccgcaccgtgatgtgctcatccaattcgctaccggagacgaaattggggatgagacgaatcggggtcttcgaacgggccgccacgaactcacgagacttctcgttcagcacgatgatctcgtccgccgcatcggacagcctgcgcaacaggaattccgacagcctggacgatacggaactgctcaccgtgctgtggtagtgaatgacgaacttgcgtttgcggctatgcgcgatatgcgcgcataccagttcacgcagcatgccgccggggacggcggggatattggaatgcaccacggtgacatcgggatccttcagcgttcgtttcagatcgcgccagatacgcaggcaacgtttgacctcgtcgaataggttcttcttcgagttctcaccgaagaactccctgccgccgatcaatccctcatcgacgaacaccacttcacactccttgggcatcacctctttgaggcgcaacgcccaggtgccgatacctcccatgggaggcggcaacggtacgagaagagccactttcatttctggtgttccttcctgtcatagccgtggtacgtgtgaccgtcatccagcaatgtgcgtgcgaactccgcaatggagtaggaacggtaaacatcgtccggcaacggatggaacggtctggcgaagaattcatcatccacggactgagtcccgtcccagaccaggacatccccattggcgtgaaaatcgtagtgcgccacgtcgtggttggcggtgatgagcttacggcgggctcccaccgtctccaatgtgcgcatggtcagtcccagctgcccctgctgcggtgaatcgatgatgcaccgtgaatgggcatacacgcccgccactttatccgcgggcaggccttcgaacttgaattccactcccctataggtcgcatcggtgagcttgcggagcttctcgacggaccgcgacggcatatagaaccacgtgaacacacgcagaccatgccgttccaaggcccttgcgatttccagcacggtatggaacttgctgggctggtgcacgctgccgatgaagcaggcgtcccactggaaaccgtcatcgggggtcaacggcaatcccctgtaggcgtccgaataaaacaacgggcggagttccatgccgtactgttcgcaatcctccggttcaaaggaaagaacacggtcgaacaggtccatgctgtccttgaatcgctggcagttggcgatggaatcccacaggtacgccgtgaatgtggcatcactggcatgccggatgcgttcgaactgcgatctggtccaacagaacgacataccgcccatgtagatgacctggtcgaaacgcttatccgccacataccgcgcaagcgaggtcgcataccggtcgatggacccctcgaccagcttgtagctgatcttggccagcgacttgaacgtcacatcctcacgaggacggtcatccatgcattcgacggcatgcccctgacggatcagctcttcggagacccgttggcggtatccgaagaacgatggcgagataaggaggatcctggacaactgttcttccgtgcctttcgcgataggtgttcagtgccgcttgcgaacgaacatgccggcacgttccatctcgtccagggaacgctcatacccgttgtcgccgatggtttcggtctccacccacttgcagaacgcgttcaggccatcctgcaggccgatggacggctcgaagccaagcagctgccgggccttgctgatgtcggccttgttgtgggcgatgtcgccgatgcggaagtcgccggtgatgttgatgtcgctggagctgccgtaggaggctttgaggatgtttgcgatctcgatgacggaggtgttcacgccgctgccgaggttgatggtctctccattgctctccgggcgggtaagcgatgcggccacgccggcggcgatgtccttcacgttgatgaaatcgcggctttccagtccgtcctcgaagatgttgatgggctcgttgcgcagcatcctcgtggagaatacggacagaatgccggtatacgggttgtccagggactggccgacgccgtacacgttctggaagcggaacacggtgtagtccacccccatcgccgggcacatggtggccagcatctgttcctgcgcgagcttggtgaacgcgtagagcgaacgcggcttggcgggcgtgtcctcggtggtggggaccaaggtcagcttggtgccgcagacgtcgcagtacaggttgaaatcgcctgcaagcatccgctccgcggtcctggaggaggggttcacgtatccgcagttcgggcattcgtatttgccctcgccgtacacggatcgcgaggaggacagcacgatcttgcgcaccgtattgtcctctcccctgctggagatggcctgcaacagattggaggtgcccatgacgttcacctcgttgtatctgttgatctcgtacatggattggccggtaccggtttcggcggccagatgaacgaccgtatcacagccggcgatggccttcgacatggcgtcgaaatcacgaacatcgccacggatgaaccggcatttgccctgaatggaacgatacaggtacgaatcgtccgggctcgtgccatgaatctgctcggacagacagtcaaggaccgtcacatcccaaccgccttcctcatgcagacggttcacgagggcggagccgatgaatccggctccgccggtgatgagcaccttacgcatgggaggtctcccgcatgatgcgttgaatcttgtcgccattgccccagacggccttggaatcatagggacgatcagggaacgcgccgtatttgagggcgatgtcgtacccgttctccttgatgaatcgttcgacacgatcggcgagcttctccggtttgcccgacccgatgttgatgatgccgtcgatggacttctgggaaacggcggcggcgacctgatcgcagaataccggataatcgacgaaatcgtactggttctggccggtggtgaatgggaactccttcttgccggcgtgagccgcggcggtgatcttcgagaagatggagttgccgtattcggaattgcccacgatgtaatagccgcgcagccactggaacacgacgccgtgctgcttgcacagcagtgccgtcgtctcacgcagggcgttcttgccgatgccatacaggctcatcgggttgcacggcgtgtgctcgtcgatgctgccttcatagaagccgatctcgtgcatgctgcccatcacggcgatctgcgcgatgccggattcggccatcttcttgatgaagtggtaatgcttcggcagatcctcgatatgggcgtcggagttgtgcacgaaaccatcgcgccacgccagatgcagcaatacatcgggcttgccgaagaacgcgaacggatcctcgaccgcgaacagatcgcaatcgaccttctccgcccgttcatcgacatgggtggtgccgaaatccgccgcaaccacggtatgcccgagttcgagcagactgcggacgatgccctgaccgagatagccattggctccggtgaccagaatacgcatagtgaatcggtcctctctgtagtcgtgtgccgtattggacgtgaatccgggtcagtccctgcggaacaggtctcgggtgtagaccttgtccttcacgtcatcgaggcaggggtcataacggttcgcgatgatggagtgggagcgcttcttgaattcatcaaggtcgttgacgacctcggagccgaagaacgtggaaccgttctcgagcgtgggctcgtagatgatgacggtcgcacccttggccttgatgcgcttcatgacgccctggatggagctctggcggaagttgtccgagtgggacttcatggtgagtcggtacacgcccaccacggtctcgtgctccttgctggcgtcccattcgctgttcggaccgtaggcgccggcgagttcgagcacacggtcggcgatgaagtccttgcgggtggcgttggagtccacgatggcctcgatgaggttctccggcacgtcctggtagttggcgagcagctgcttggtgtccttcggcaggcagtagccgccgtagccgaagctcgggttgttgtagtgggtgccgatgcgtgggtcgaggcagacgccgtcgatgatctcgcgggtgttcaggcccttggactcggcataggtgtcgagctcgttgaagtaggagacgcgcagcgccaggtacgtgttggcgaacagcttgacggcctcggcctcggtgaagcccatgaacagcgtatggatgttctcctcgatggcgccctgctgcagcagcttggcgaaggtgtgggcggcctccacgaggtgctcgtcctccggatcggtgcccaccacgatgcggctcgggtacaggttgtcgtacagggccttggattcacgcaggaactcggggctgaagatgatgttcttggaaccggtcttctcgcggatggacttggtgtagcccaccggaatggtggacttgatgaccatgatcgcgtccgggttgaccttcatcaccagatcgatgacggattccacggcggaggtgtcgaagaagttcttcgtgctgtcgtagttggtcggcgcggcgatgatgacgaagtcggcgtcggagtatgccttctcgccgtcgagcgtggcggtgaggttcagggtcttctccgcgaagtacttctcgatgtagtcgtcctggatcggggacttgcgcgcgttgatcatatcgaccttggcggggatgatgtccaccgcggtgacctgatgatgctgcgacagcagcgtggccaggctcagtcccacgtaaccggtaccggcgacggcgatcttcaacgaatcgaaatccttcatatgttgcttcttttccttgggtttgaatggggtctgaacgtatgacgcgtcatgtgcggaacgtgcgaggttccgcatatgacgttcatcgaggggggttattcggcgtggccgtcgatatagaaggtcctgtaccattcggcgaaccggcgcagtccctcacgcagcggggtggacggcttgtagccgtaatcgcgctccagcgccgcggtatccgcataggtgaccggcacgtcgcccggctgcatggcgacaagctccttatgggcttcgaaatcgtagtccgcgggcagcacgccggcgcgtacgagttcctcctgcaggatcgtcacgaattccagcagattctccggatggccgttgccgatgttgtacacggcgtaggggggaacgggcaggccgtcctctccggtcttcttctccggcgccccctgcattacgcgcacgacgccttcgacgatgtcgtcgacataggtgaaatcgcggcggcagttgccatagttgaaaatcttgatggtgtcgccggcacgcagcttgttggtgaatccgaaataggccatgtccgggcggcccgccggaccgtacaccgtgaagaagcgcagaccggtagaggggatgtcgtacagcttcgagtacgcgtgggccagcagctcgttggacttcttcgtggccgcatacaggctcaccggattgtcgaccttgtcgtccgtggagtacgggaccttcttgttggaaccgtatacggaggaactggacgcgtagaccagatgggccaccgggtagttgcggcaggcctccaggatgttgtagaagccgatgagattggactggatgtaggcgtccggatgcgtgatggaatagcgtacgccggcctgggcggcgaggttcaccacgaccttcggcttgtattgttcgaagagcgcgaacaccgcatccttatcggccagatcacccttgatgaaggtgaagttcccatagtgcgacagcatgtcgagacgatgctccttgagccgcacatcgtagtaatcgttgacattgtcgaatccgatgacgcggatgccctggacgtcttcaagaagccttttggcgaggttggagccaatgaacccggcggccccggtgaccagcacgcagctgttgcgcaaatcgatggtttccattgcttgcgaccgcccttctatgccttctcgatttcgacatgacggccgttatcggctgaatacttcttcttcactgctttccttcctgccaaggcacaagtgccgagacaaaaactgaaagcagtatatctcaagggggcacccctaaccccctgccgggcatggaagtgagacgatgcgccaatccttacgaaataaaggatttgcacgcgcccaaacaagacgatgggattttcaaagggggcaccttcgcatccccgttaccccctgttcacatcgaaccacgatctgccgcgcaaacacacgagtccggcgatacggacgacggcgcgaacgcgaacgccggattccactcctcgccggtcaggcgctgcaccgccgcggcttttcggctgtccgggaactatcgtacgaatcggatgcaggccttgttgcgtgtccgacgcagatacgggtatagtgagttttgctaattctcaataagagcggacatgttggccgctttgattgctcggcagcgttgctgtcaggggcgagtcgcatggctcgccccgtttttattccggtaccattcccttagcaatagattctcagagcagaggaattgatgatgaatacgaaacggtacaggatcggcatcgatgtgggtctcaattcggtgggacttgcggcgatcgaggtcgatgacgatgacatgccgatgcgcatgctcaacgcgcaatcggtcattcacgatggcggcgtggatccgaccaagaacaaagaggcgatcacccgtaagaacgtctcaggagtaagtcgccgcgcacgacgcatgatgcgcaggcgtcgcaagcgactcgatcgtctcgatgccgctcttgagcgggccgggtatccgatcatcgaaccggaatcactgaccacgccgttcgaggaatggcatgtgcgcgcccggctggccgagtccttcatcgaggacgaggccacgcggcgcgaggacctgtccattgcgctgcgccacatcgcgcggcatcggggatggcgcaatccgtaccatcgcgtggaatcgttgctggcggacaacccgcattcggcgcagtacggcgaactgaagacgcgtgcggaggagcgactgggacgtggcatcgaagacgatcccacgccggcgcagctggtcgtcgccgtattgtcgaacggatatgcggaatcgccacgtctgcgcaccagcaccaagcgcggcgagggactgttgccgcagcgtctcatgcaggaggacaatgcgaacgagttgaagcgcatcttcgacgtgcagcatgttccccggacggaatgggaaccgttgttccgtaacgtgttccgggcgacttctcccaaggggtcggcacaagggagggtgggacgcgacccgttcgacccctcgcagccgcgtgcgttgaaggcgtctctggtgttccagcggtatcgcatcgccaatgtgctgacgaacctgcgcatccgggaggcgggtgccgtatcagaacggccgttgacggttgaggagaagcaacgggcatatgcgttgctctcctccgcttcacgcgaggacatcacatgggccgatgtcgcgactcatcttgggttagcgagacaccggcttcgcggcgtcggcacaatgacggcggacggcgaggagcgtatctccgccatgccgccgtgcatgacgtccgtgcagcggattcgcgaggccgaccgaaagatcgccaagccgttgatgaagtggtgggatgacgcgtcggaggcggcgcgtgaggcgatgatccggctgctgtccaacaccgtggacttcgatgccgtccgcgaagatcttgcctacgcggaagccatcaggttcatcgacgcattggatgatgacggactgaccaaactggattcgatcgatctgcccgccgggcgtgccgcatacggcgaggagacgttgcggcgactcaccgaacgcatgttgacgaccgatgatgatcttcacaccgcacgcaagacgctgttccatgtgtccgattactggcgaccgccggccgatcccatcggagcgccattgggcaacccctcggcggacagggtggttcgcatcgtcagccagtggatgacaggttgccgtaatcgttggggcaacccggtatcagtacagatcgaacatgtgcgttcggcattcgactcggtggccaccgcccggcagtacgaacgacgcaccggctcacggagcgtctaccgttccgcactcgcgtccaagctacgggagtccgagcatctggaacgtgtacgcgcatcggatattcgcaggatcgaagcgatacaacgccagaacggccaatgcctgtactgcggacggccgattgcgttcggcacctgcgaaatggaccatatcgtgccaagaaagggcgtcggttccaccaacacccgcacgaatctggccgcggtgtgcgccgactgcaatcgactcaagtcgaagacgccattccccgtatgggcggcctccgagccggccagacagcgcggggtcagtctctcggacgcgttgcagcgggtcgacaacatgctgtatgacaggaaggccgacactcctcagacatggcggcggttcaagcaggagatgaagacgcgcctgaagcagaccgaaggcgacgagccgatcgacaaccgatccatcgaatcggtcgcatggatggcggacgaactgcaccgccgtatcgactggtatttcaactcgcaacgctacctcgccgagcgcgacgaggaccgtccgtcaagggaggtggccgtggatgtcttccaagggcgtgtcacggcgctcgcacgtagggcaagcggcatggaagggcgcatccatttcttccaagctcgttacaagacgcgtctcgaccgtcgtcaccatgcggtggatgcctcggtgatcgcgttgatgcgtccgtcggtcgcaaagacgctggtggaacgcgattcgctacgcgaatcccagatgatcgcaggcggactggccgaaggcgaacgcagttggaaggagtacccatacgaaagctgcacgggctacgactcgtaccagcggtggcgcgtcggcatggagctgctgctcgaactgctcaacgacgcgctcgaccatgatcgcgtggtggtgcggcagccgatgcggttgcagctgggcaattcgatagcgcatgatgcgacggtcaaggcgttgagccgtgttcgtctcggagacgccatggatgccgatctgattcggagggcctccacgcctgcgctatggtgtgcgctcacccgtcttcccgactatgatgcgaagaccggtctgcctgcggacgatacgcgacgaatcgtcgtacacggcaccgagttcatggccgatgacgaagtgggattcttcgatggacagtcggcgcaaatcgccgtgcgtggcggttcctccgacatcggatcggcgattcaccatgcacgcgtataccggtgctggaagcagaacgccaagggcgttcgcaagtactggtatggcatgatccgtgtgttccaagcggatttgctgaggtcgcgtggcggtgacctgttcaccgctccgttgcctccacggtcggtatcgatgcgctggggcgagccgcgcaccgtgcaggcggtgcaggatggcaacgccgaatatctgggctggctggtcgtcggcgatgagattcacgtggacttcgcccaaggcaagctcaaagggcagatcggcgaattcgccgagtggtgcggggactcggatagtgccgataccgcgcgatgcgtgtgggtgctggccgggttctactcgaatagcaagctgacgattcgaccacgattactggctgctgaggggctgaagaagttccaaggccagcaggaggtaccggactcggtgcggaagattgtggatgcaaaagggtggataccgtctgtcgatgttgtcagctcatattctcctgtagttatccgccgcaactccatgggtgagccgcgctggcattcacaatcggggctgccgtgttcgtggcgatggtccgactagggcggtcgtcatgcagagccaatggcgggtcatcgattgcacggagatggcgggacgtgtctcgtatacgcgcggcaacatgcgcgtgaagcgagatgatgcagacactcccgtggatgtgccactggcgcaggtggccgtggtactgcttggactgaaggtgtcgtgttccgccgcggtgctgcacgagatggcccggtacggcgtatcggtcatgctgtgcgactggcgtggggtgccggatgcggcgctccacgcctggaccgatacgccgaccacggtcacacaacggcaactggcgcaggtcgatatgacgttgccgcgccggaagaacgcatgggggcgaatcgtgcaggcgaaggtgcgcgggcaggccgcctgtctagattcccttagccgtgatggcggcggattgctgcgtggtatcgccgcctcggtgcgttcgggagacccttccaattgcgaagggcatgcggcacgggagtattggagacggttattcccggctggggaggaattccatcgcgtgccgggcgagggaattggacgcaacgcacatttggattacgcctacatggtgttgcgcggattcgccatcaaagccgtgatatcggccgggctgattccctcgttggggatgcatcaccgcaatcgcggtaattatttctgtctggcggatgacatcttggaaccgtatcggccggcgatcgaccgtagggtggcggaactgggctccgatgattcgctatcggaccggaatgtgaaacggcgccttgtggaggcggtcaaccggcagttgaacggcaccggtctcaccattcccagttcgttgaacgatttcgcgcaacagtacggcctgtattgcgaggggaagatcgaccggctgcccgtgccggaatacgcgggtgccgaatgaaaaaggacgaggacagtggtggcatgtggtgtctggtgatgttcgacctgccggtcaagaccaaacagcagcgcagcgcggccacggagttcaggaacatgctggtggacatgggctacggcatggtgcagtattcggtctatgccaggtacacgccgacgcaggcgggcaaccgtgcgacggtgaaggcgatcaaggaggcgttgcccgcgcacggctatgtgcgcatcctgcatgtcagtgaccaccagtggtcttcggcgttgcgtttttccaatctggagcaggaggatgcagtggagacgccggagttgttcacgcttttctgaacgtaagattatctgaaaaccgcagaaaatagcccctcctgagaagctataaagcttatcaagaggggtgaatgctaattcccaacctagctgataggcggtgacgttggtgtcaaagcttatcaagaggggtgaatgctaattcccaacggcgcgatcgaacgccccggcttccccaaaagcttatcaagaggggtgaatgctaattcccaacgttgcgtcgcgctgaggtatcgggtcgcaaagcttatcaagaggggtgaatgctaattcccaactacaaagccaagggccggccgttggaggaaagcttatcaagaggggtgaatgctaattcccaacgtcaccaccaaggagatgaagttcgacgaaagcttatcaagaggggtgaatgctaattcccaacctcatcttcgaatgggacgacgacaacaaaagcttatcaagaggggtgaatgctaattcccaactcgttgaggaggatgtcgccgggccttgaaagcttatcaagaggggtgaatgctaattcccaacgagtcgctcgtgacccgcaacacgtacgaaagcttatcaagaggggtgaatgctaattcccaacctacttcgacattatctccagtgacaagaaagcttatcaagaggggtgaatgctaattcccaacttgcagcacaggccgttgacccaccagcaaagcttatcaagaggggtgaatgctaattcccaactgtgctcgctcaggcatcgattagcgagaaagcttatcaagaggggtgaatgctaattcccaacgatttgctcgagagtggcatcggcgagacaagtttatcaagaggggtgaatgctaattcccaacacgggtaacgctggttactgcgaacagtcaagtttatcaagaggggtgaatgctaattcccaactgaggaggagtgtgcctgcgccggcgaacaagtttatcaagaggggtgaatgctaattcccaactcttggctttatggcaaggatgcgacagcaagcttatcaagaggggtgaatgctaattcccaaccgcacccacgcctattatccagccgcaacaagcttatcaagaggggtgaatgctaattcccaacgtatgcattagggtggccccttaccaagcttatcaagaggagtgaagctaatcctcagtccgtgcgaccctcgatctgcggggtctgggtgagggagagcggggtctgcacgccaggggcggtctgcacgtgcatcgtgcactcgtatgattcgccgggtgccaacagcaccgtcttgacgccgacggtcagggtgtcatgcacggcgagtccgtcgtagcttgaaccatcagatgccttccaatccaccaagcggacgccggccggcgcatacgcgtacattgccgtttttatgcctccatctggaatgccctccagttggtctccgagtacgtattgcggggtggaggcgacctggtcggcggtcatcatatttgtgagcttgacatgtaccgtgtactggttggctccgttggcggcggttccgtcgaacgtcatggtcaccttgcgtttgagataccagtccatcttcgactgggtgatgtccgagaagtacacgcccagttccggtgtggacgcatcggtcttcaatgcgccggaaatcggggtgttgagcagcagctcctgctcgtcctcatgggcgctccacaccttcatgtgcccctggctcacggatgtggccaatgctttgaggaacgccttcgcgtcggaggaatgagacatgatctgcgtgaacgacgcggccgcggccgccgagaaatactcatcttgctggtcttcgggcttgtctgcatacacctgactcagcaggtactgcgccgcgttcgtgccgtcgagcgtcaccccgtcctgcagggtcacgccgccgctcaccttgagcatgttctgcaggaacaccgggtcgatcgcgatcacgccgtccacgtcctggccggcgtgcgccttccacaatgccttggcgatcacgcccgtacgcgggaaatcgggggtaaagttcacatccacggccacacgccccagtttgtcggtgaacagcgtgcgctcctccgccgtgagatccaccaccggttcgtcgaaccacgggatctttccacccgaaacgaacggctgcatctcgaccttgccgttcgtcaccgtcatcacgccccatgaaccgggcagaccaccgcccgggcggatctccgagttcgtctgcgccaggatcagataggtcctggtctgtccgtcgttggcgagcatcttcggcaccacctgggcggcaacgttcatgtcatgcaccatgccggacagcgtgtgcaggtagttcttcgcctgctccatcgcatccgccacctgcgtgacatgcggcgtaggggcaccggtcaggtcgcggtccgcgtcctcgatcacgtcgtcggccctctgcaacggttcggcggatttgctcagcgcggacacgtcgatgacaccgtccttcaccgaaatgtccttgaggttgagcgcaccggacgcttgtttcatggcaggcatcgcctgcgaggagatgttctccatcgcggtgacggcggtgcgcaccgcacgcacatcatcgccatagtaaggcacatgcgaggcggccttccacaagacggaactcgtctgggcgtaggcggcggacgcatggacggagaactcgtccatcttcgcgttcaacgtggccgtatcgccgctctcgagcgcatcctgcatgccggaggccaccactacagcctgctgcacctcgttcttcgtcttcaccgcggaccatgcgaaccatgcgcccgcggcggcaagcaacgccaccagcacgccaaaggcgatgagcgcacggcggattctccggcgacgacgaatcctacggatatgctgcgcgctcatcctgcggcgccggcgatgatgccggggctgctccgcggactccacatccccgtccccggcagacgcatcggacgtcggcggcatcggaggattcagcccatcggaatcggtcatgtacgcgatgtcgaaatccttcggcttgcttccggcagcgccgttatcctcggattccccggacatttcggccatgactcaatcccccatcgcgtgaacgtgcgccgtatagcggcggcataccacaaactgggtgaccagtgtagtcgggggcattgatacccccgaaaacgaaggtgggtcgaatcagtaggcgcccttcgggttgatcatcactccgacggtgcggaagatgtagctgatgtctcccagaacggaccaattctgcacgtaggcgacatccagctgctggctttcctcctcgctcaggtcattgcggccagacacctgccacggaccggtgatgccgggcttgacgagcagtcgggtggcgtacacctgatcgtattcgtccacttcgtactggcgctgcggacgggggccgaccacgctcatcgatccaaggaaggaattgaagaactggggaagctcgtccagcgaggtcttgcgaatgaaatgcccgaccttcgtcacgcgcggatcgttcttgagcttgaaacgggcgcccagctcctggccggcggccgcggccacttcggcgtccatcttgtccgcgtccaccctcatggaacggaacttatagatcttgaacggtttgccgtacaggccgatacgctcctgcttgtagaggaccggaccatgatcgtcgagtttgatggcaatggcgacgcccagcatgaacggggaggacaatacgatcgcgatcgtggacacgatgatgtcgaacagtcgcttcatcatcttgcgcgccggtgagaactgggcaagacggatggtgatcaccgtggtgccctgaatggaacgcacctgcgtctcatggccgctgacgtcggctgcggaggtcaccagggcgatctccagaccgatggcctccatgtgcatggagaacgtgttgaagttgtcggagaaacgacgcagcacatcggtgaccatcactgtctggatgcccgaatcggcaagatgttccgccagatcgttttcggagtacggaaccaccggcagcagctcgccccagttcctgcgcatctgttccctgagctcgtccaggttcggatcgggttccaccagaccgtcatcgttaagacggatggggcatacggcgagcggacggtagttgagctgctgcttctgcgccaggaatcgcagcatatgcccgatcgcctccggggaaccgacgatggcggtaccgtatgcgtacttgcccttcttgcggttccgggtgatgaacaggcgcacgaaaaagcgggcgatcatgttgagcagccatgccgccgcgaccatcagcgtcagcgtgctcagccacagattgaggttcaacacgaaattgaaagcgcataggatcacccatgcctcgaccatgccgacgaacaggcggagattgagctgatatccgtcgcccatcacatgccggtggtacacgcccgccgcgtgtaacgaatacacgtacatgagcgccgcgatgatcaggtacacactcaggtcgatgttcagatcgaaacgatacgacacgaaatacctgtaatcctgatcacgcgccatcagcacggtggtgcctgcgatgatgaacacggccgcgtcgatcagcatcagcgcgagattgatgtaaaaccgccaatacagcacgcgggacagttggctttggcggatatcacggcgcccctccggacgcggcgcatcggaacgaccggaaacgccgggattcgttgtactctccatctactgttctcttccacatctcttctcgcccacgatgtcctgcacacgtatgcactcgtacatgcatgccgcgcccggcaccggggcatcacaccaagacaccgccaactatatggtagggggtaccccctgtagggggtggtgttcatatgtcgtttggccgaaaagacgggacgagaacaccatgtgaacgcacggcgacgacgcgatcgcacgaaccgcggagatgtgaaggctcacatatttgacggggggcaggaaatgacgttcatcgaacggtcgcacacgccgatccccgggaccgcggaacgcatcctcccatctccacccggggaataccatcctgtcggcgttgctccccggtactcgcggatgcatccgcgcatcccgcacgattcagccgacgcgctactccccaatcaagtccgaggcctcccccaccgacgccccaatccgttccggttcacataggcgaaccctcgaatcgcacaatatcgcaatcttggcttgtgcgtttcaccggacctctgtacacattgccccgtgcgtttgcgccgcggcaccccgcttccctaccgtcggaaccatgaacggatacggcaacgatgcgggatcactccccacggcagtcatgaacgacatgttcgacaccacgccctctcccaccatgcgcgaaggcctcgcgcagcgcaaacgagacgtcgtgcgccgctgtaccgaagcggcgaagaccaccggacacaagctgatgttcggcatgaccacctcgctgatgctccaatccgtgccgatcccctccgaatgcgacctcgacacggccgtgctccacaccgtgtccagcaacaagcagcgccgggtacgcaagcgcggcattcccacgcagccccatgtctggcgtccgctcgtcgactcggagcccgtgcgcatcaaccggcacgtctacgccttggatctgatgcacacctgggcgcagctcgccatgcatctgccgttcgaggaactggtcgtgctcggagacgcgatcatcacggcgagcgcccgggcgaacggccgggacgcggaacacatacgcgccgatctcgccgcgttcgtcacggggcttgcaccgttccggggcaagcgctcatgcatcgccgcatgccgctacatcatggcgggcgtcgattcgccgatggaatcccgcagccgcctgtccctgctcaagcacggtcttccctgcccgcaacccggttacacggtgccgggtgcgatgttcgcgagcggcacgtcgatgatgctcgacatggcatggccgcaataccgtgtggccgtcgaatacgacggcgaccagcatcgcaccgacaaggcgcagtggcggcgcgaccaggagaaacgcgaccggctgcaaaaccatgggtgggtactgcgcatcgcgaccgctgcgacgctggcgaacgcggacacacgggcggatcatgcgttcggcgtcgcgcggcagctgatgttgcgtggggcgaggttcacattccagccggtggaacggtcattgcaatgagactcctgcccctcggtacagagaagggcgttcttcacgtcgaggggcaagaatccctgtccctcgatggcattccgatgcttttcctcatcgaaggacaggccgcttcgcccctcaccgctcaattcccttgaatattcatcgagggacaaacttctcgccgtaacaccattggaaaacagccattcgccgatgcggctcaattgatgggttgccccgcggcttgcaaatctcccattttcacgccgaaggacaagccacttcgcccctcgacattccatccccctcaaatactcatcgagggacaacccttccaccgcgcccccaaaggacaacacccactcgtcgacgtatcacagcacaagactgccccacagctcgcaaatccctcattttgggtcataaaccaaactatgtagctgctttggttggcgagacactgcggcacaaggcacgcccgatgggtgttcgactgccgtccattcgaccgggcgcatgaggacaccctgatgcgcggcctgcgtcggcaaaaagaagaaaacagcatcacttcggcggggcgggcgggaccagcccggaaaaggtcagctgacacccagcagcgtgagcacgatgagcagcacgttcaacgccacgatcagcgccgccaccatgatgaacacagcatgcttgaccggcccgtccacgtagcggcccatcagcttcctgtcgtgcgtgtagcgcagcagcgggatgatggcgaacgggatgccgatggagaggatcacctggccgatgaccagcgcctcggtggggttcggcgcgaaccacagcacgatcagtcccggcacgagcgtgacgatgcggcacgcccacatcggcgccttgatgcgcagcagcccgtgcatgatctccgagccggcgtacgtgcccacggacgtggagctcaatgacgaggcgagcaggccgatcgagaagatcgtgccgatcacggggccgagcacgctcacgatcgcgtgctgcgcgccgctgatcgaatcggtgcccttcatgccgtacagcgagttcgcggcgaggatgagcagcgcgaggttcacggtgccggcgagcacgagcgcccagaacacgtcgatcttggagccgtgcagcagttcgcgcgtggtggggcgggcctgcccgcccgcgtaatggtcgttgaccagcgtggaatgcaggtagatcgcgtgcggcatgacggtggcgcccagcatggacgcggccatgagcacggagtcgcgcgtggagaagcgcgggacgagcccgccgagcacgtcgccagggttcggcggcgcgatgaacagtcccgcgatgaacccgaacgtgatgacgagcagcagcgcgatcaccattttttcgaacaggcggtgcgtgcgcccgccctcgaacatgagcagcacggtggacacggcgccgatgaccacgccgcctgcgaacagcggcagaccgaacagcaggttcaacgcgatggccccgccgatgagctcggccaggtcggtggcgatggcgatgacctccgcctgcatgaagaacatgaagcgcccggcgtcgctcatgcgcgagccgagcagttcgggcagcgagcgcccggtgacgatgccgagtttcgcggactggtattggatgagcacgctcatcgcgttcgcgacgacgagcacccacatgagcatgtacccgtagcgggcgccggaggtgacgttggcggccacgttgcccgggtccacgtaggcgacggcggccacgaacgcggggccgaggatgctggccagcgaatgcccgtggcggaccacgccggcctcgtggcgggccgtctggcgctccttctcgatctccgattcgatgcgttccggcccggctgagcgcacatagtcgcgatgcttttcgacgctgtgccggcggccgtagcccttgccggccgccgccccggcggcggtgcgcaccgcgtgcccgcgcccgtagccgcgtccctggcgccgcgcgttcgcgacggtcgggtcgttcgtcgccgtcgcgccgtccacgacgcggtcgtcattcagcgccttgcgcgcaccggcggacgccccgtcgggcgatccgccgcgcgtcccctcgtcccgcgcatcattcgcatcctgcataccggtatcctgcacttgccgcactccccctcgcgattaccgcacaccggtatagcgcggggatgtttcgcggcgcaagtccccgccgcctcccgtcacccgtcacttgtcctcggggacggcctgccctggacaggtgtgcagcacggcgagcatcgcgtccttctcgcccgacgtgacggtcagcccgtacttggatttcacgccgatctggcgggccacgtagtcgcagcggtaggcgccgttcgtgggcagccagtaggcggcggatgcggatcccttctcctggttg

SEQ ID NO: 564 - DNA, 23417 bp, synthetic construct
  source 1..23417: mol_type = other DNA
  misc_feature 1..23417: note = Synthetic
  variation 15680..15689: note = n is a, c, g, or t
aggtgccgtatcgtggaccgctgaacgccgtgctctatcagatgctcggcggtctgcaccagtccatgttctacatcggtgcccacaacatcggcgagatggccgagaagggccgcttcattcgtatcaccgatgccggtctgcgtgaatctcatccgcacgacatcgtgatgaccgccgaggcaccgaactactccggtttccacaacaactgatctgattcctgacctgtctgattgctgaacaggtcagggactggtcactttcgagagggtccgcatatgcggacccttttttcatgcatggagcccctttgtatatgcgggcgcggatgtgcagaatcctaacattggttgcactgtgctgcattccaggggaatgcagcgcacttacagtgtgcgctgcgccacatatcggggaatgtagtcgttctgcgggaatggttcttgaagtgtctttgaggtgaatatgcactgattgtggtgcaatacggggaattgtcgggggtatgtgatgtttgcccgaaagtatcgatccggttcgatgtgcggttgctcacattgacggcaacgtcgctggtttcggctgttcaagcgagttcactttttgtcgggtgtttgtacatgttggcctccatagccttgtaaacggttgtgagtttggggatgggaggaaaacggttatgagccgtattgctgaaatgaattggggaatcaagcttcttgccgcaagtattgcggcgggaacgctgactacgctggcctttggtgttgtgaatccagtcgcgcaggcggcagacagtgatgtcgtgttcagtgaggtatgcgcggataacgggtgcggtgcgaatggctattcgactgactgggttgagatttataacaaaggctcgcagaccattgacctgaccggttggacggtcaccgatgataagggtaacaccgccgccacgctgagcggctacatcgcacccggcacgtatcgcacgttcgatgcggatgggcttggagacaaaggcgattcggtgactctgagcggcagtggtgattcataccaatggacgaagaaagctggtgccgacgaaacctggcaacgtgacaagggcaccgggtcatggaagaagagttcaccttcgccgacagataatggtaatcagcaaggtggtggcagtgaaggtggtaataccggcatcccgtcgactgcggctcagctgcaggattggcctggtccgaaggagaccgaggcccttgatgcagtggacgagtatggtcagggtggcggttcaaccaaaggcgatcatcaggatggcaatctgtccggtttggcttatgaaccgagtatggatggcgggccaggcactttgtgggctatcgacaatgatttgaaccccacgatggatagcaccgaattcaaggggccgggtgccatcagcaaatgggtgccaagggatgattacagtgcgaccaatcccgcgtggcagcaggaccccaacaataattggacgttccaggtcggtggagaaactcatggcggcaagcaattgcgctacccaggcgtcaccaagagcagtgatttggactcgtcgtcccctactcgccagtctggtccggataccgaaggcatcacgttggtgcgtaatgccacggacggccataagtatgcgttcgccgcagctgaacgtgataacggcgaagagaaggtctcctacagcggcaatagcgatcagaagccgaagaacgtgccccgctattcgatcctcgtctacgatctcgataacgcggagcgcgcgaagacgaatcttcgtgatcaagcgggcgataacgctaccggcgcgaagaccgatgtggccgatgacctgaccgccgttcacgaataccagttcaacgatcagctcagcagcaagtatggggtggatgtgcgtttcggcgatgaactgtcggtcaaggacaagaacgcaaaccttggtttcgaaggtgtcacgttcctgccggactcgtatcttgtcgctcaccaataccagattgatggcagcgcgtacacgccgagcggcaccgctcactacggtggtctgttccttgctggtctcgaacagaacgggaacatgtatctgatggagttggacgagaacggcaccggcaacattgtgcaggagatcaaactgccgcagtccgctcgtgaggcgttgcagatcgcagctgacggcaagacctacggcaaggcgatgacagtggccgacctcttctatgattccgcgcacgaccgggtcgtgttctcttgtgacaacacgtgcggcggtgtgggcctcaccgctgatggcaaggattatcaggccggaggtatgagcaaggtggcctacatgaccatccagaacggtgcgttcaccgtcactgacgtgtataagactcctgaaggtttgaatggtacgtacaacattcagccgatgaacgctgaaggatttgccatgtcgtctgacgcggagaagatcaaaggctccgacctcaagcagcgtgaaccttataagagcgcttccgatgtggatccggacaaatggtacaagcccgtctactggacggatgatggcgttggctctgagcaaggtgtggtcactagcgcgaatgcgcaggctggtcactccctgtaccgtggctacatcgaggtgccggtgccgaacccggatacgccgaccagcattgtggacatccctgtcaccaaaacatggaaagctaaagacggttcggtcactacgccagtcaagggcaccacggttagtgtgactctcgcccaagatccgagctcaggcaatgatggccgaaccgtaggcaaactcacccttaccgacggatccgcgacgcagtctgacacgagcgatgattggaagggacagttctcgaatgtcgaagtaggccacgagtacaagatcaccgaaacggtaaccaaaccaaatggcgacacaatcaattggacgacgacaatcgagaccacggcacgtgcggggcagacacaggatgacgacaatgacaataatcctgccacgttcgtcatcaagagtgtgaacggtgcacccggcgctatcgaaatcacgaacgagtcggatcagacgccgaccaaaccatcgccgaccgcagcctcgtatgaggtgcccttcaccaaaaccgtcaagggcctcgataccgctgggcctttcaatttcagtctgaccaaggcgacggatgaaaccaaggatgtccaatttggcagcaccgccgttgcaacccaggtcaacggcacgataactgacaagttcacgatggatgccggcacaaaacaggcttcgcataccgcgaagttcgccgccgtcacattcaaggaatccggcgtttatcatctgaccgcttctgagacatcgaccaccaccgccaaaggatgggcatacgacaacacgcccaaagacgtgtgcgtggtggtggtacttgattccacagcgaacaagctcacggcctccggcctcgcagtctatgacaagacttcaggctgcagcacgacgatagatgatgcactcactgcgtctggcccaacgttcaccaacgtgtatcaggcttcgatcccgcctgcgggcggtcaggaggccaatctcgcggtcacgaagatcatcccgcaattccaagcacctgcatggagcggcgacacgatgggcgcgaaggcaatcggcaacggctttaccttcaccgtgcaacagactgacaaggacttcaccgccgatgctaaggatgctgacgccaagctgcccgatagcgcgcactgcacgcctattagcggcaaggctacggcttgcacggtgagcgtgaacgcagattcctcgccgaccaccgactataaaggcaagacagcaccgctcggtacgatcaacttcgacaagaccgggatctggtactacacggtaagcgaaaacgcgagaagtgacatcgacacgttcagttactcgccggcagtgtaccacgtgaccatcgcagtgagcgatgatgcggtgacgaacacgttgaaggcagcgaccaccatcgaccgtgtgaccggcgacaccggcaacacggcggcaaacggcatcactggcaaggcgatggtgttcacgaacgaatacgtcaagccgatcgacaaattgccatttaccggtgcggcgggcacgaacatgctcgctggattgcttgccggctgcgcgttcttcgccggaggtctggccataggccgctccgatctgggacgtaaacgtcatcaaccgctcggtatctgaatcttccgttcttcggttcttcttttcactatcccacgtgatgggtcggctgttccgacccgaccctagcgtgagcctacccaattcttccggggacctgaacccggaaccgaacatcaacggtctgcataacgcggatgggggatgtccgtgcagtcggaataatcaggccctcttcggaggaacatcaaccactcccactaaggagagaaaacatgaagggaaccttcactaagacacttgccgccggtgtggccgccatcgccacacttgccggactggcgttcgggactggcatggccaacgccgcaccggtcgagcaggcagagggcagcatcaagctgaccggttccgaggcacagcttgccggccgacagttcgacgtctacaagatcgccgactacaagctggacggcacgaccatcaccggcgtgaccaccgacgccaccaacaaagccgccgtagatgccgccgtcaaggccaccgtcaccgacaacggcttcttcgacggcatcggcaatgccgatgtactcgactatgcgatcaaccaaggcaagcttccggccgattccgctgccgctcgtaccctcgccgacaagctcgccgcagccaccgctgccgatgccaacccggcactgaccaaggtcagcacggacgatccgacgtttaccatcgacgctgcctccgctcaggccggtgcctacacatacacgcctgaggatcccggtctctacctgttcaaggacgtgaccgccaccgccggtgcgcatgccactacgtcgagtgccatcctggtgggcaccaagaccgccaatgaccagttcggagccggcaccatcgccatcaagaactccgccgccaacaagccggccaagaccatcagcgccggcgctaccgatggctcggtcgccaaaggcgccacgctgacctaccaggtcacctacacggccaccaaggacgctccgaacagcttcgccttcgccgataccccgagtgccggtctgaccgttccggctgacaccacgctcaccgtgaccgaccagactgacaacaaggttgtcttcaccgacaccaccgactacaccgtcgccacggtcgttaacggcaaggccggtgccctgccgctcaccggtaatggcaccgaccagctgaccgtcaacttcaccgccgacggtctcaagaagatcaaggccaaccacgtgatcgtcctgtcctacaccgctaaggtgaacgacacagtcgttaccgacccgatcagcaacaccgtcaccgtcaccgataacggtgctacctccgaaggcgacaccgtcaaggttcaggaaggagctttcaccttcaagaaggtcggcatcgccgaagccgataagaacggactcatcggcgcgaccttcagcctgtatgcctccgccgccgacgcgaacgccaacaatggcaagggccagaacgttatcgccgccgccacttcgaatgatcagggcactgtgaagttcgatggccttgctgccggtacctactatgtcaaggaaaccggtacccccaacggttatcttgctgcctaccagcccggtttcaaggtgaccctcaccgccacccaggcagacaagaacgccaacgtgatctttaccgcccagttcgccaaggacaacgacctcgccgactacggtctggccaaggacaacaacggcacctggacggttaccaacattcagcgcaaggatcagctgcctaacaccggtgctgctggcatcgcaatgttcattgctctcggtgcgctcctgatcggcggtggtacggccatcgtgatcaagtcgcgcaagagcatcgctcgcatcgcctgatattaccccgatgaggagtccgaaaggatgaggacttcttcattgcgtgagggattccggtggattggtgataagcctgtccaccggaatccccatatccatttcgttccgccacatactgtttcaaggatcatcatgacgaccgccatcgttgcaacgggctcaatgcccacgttccacgagctcatcctcgggctggacaatgaaaccatgcggctcaagaccgcgtatcgaaacgcacgccgtcggtcgacactcctattggcgttcgggttgaccgttatcctcgcaggtttaggagcaatcggatatccaatcattttgcgggttcaatccagcgttcgcgacgatcaggtcgtcgcccgtactgaacgtaccgttaacgactggccctatcctcaagccgaagacgagatcaaagccgcacagctctacaatcagcgacttgccggcgaccataatcgtacccttggggaagcgactgacccgttctccagcgcacccggtatcacttcaacgaacaacggcaacaacgcctccgctcgtgatgatgaatacatgagcctgctcgatgccggcgacaacatcatgggatccatcctcattcccaaaatcagcgtcaacctccctatttatcacggcaccagcgacgctgcccttgcggccgggtcggggcacttatacggaacaagccttcctgttggcggaccgtccacccacagtgtgctcaccgggcaccgtggactggtgcaggccatgatgttcacccgacttgacgagctcaagatcggcgatacgttctacatcaaagtcatgggtgaacaactcggctacaaaatcgaccggatcagcgtcatcgaacccaatgatctgagccaattcacgatcaaacctggtgaagaccgtgtaacccttatgacttgcacaccctatggcgttaacacgcatcggctccttgtctccggtattcgcgctgccattcccggacagattccggaacccgcgcacggtcaacatgatccacgcaccatcatgctttggagtcttacgggtgcatgcagcaccgcaatcatcggcactgctatcgtccgccgtcgcaatcaagtcatgccaatccggcatcgcgcgaaataggccacaacaagttcgccaattgttttttgcggaacgtgtcagggctgattcgcctcgattaccttcgagaggatccgcttatgcgggcccttttttgcgtgtatagagcctctctagcacttttcgcgcgaatagtgcgcaaattggggcttgaagggggcttttcgagacttttcgcgcgaaaagtgtgcggacggaagaccgggaaagcagtaaaagcagtatgtatgtgccgcggtatagtctgaactgttcttatctcatgggagaaatacgaaaagaggcatgggcatggtagatagccatgatgcagaaacctacagcgccaaggattcacggctgatctggatcgactgtgaaatgactggactggatatcttcggcggcgacgagctggtcgaggtgtccgtggttcccaccgactttgacctgaacgtgctggatgagggcgtggacttcatcatcaagccgagccagaaggccgtggatcacatgaacgacttcgtgcgcaacatgcacacccgctccggcctgatcaacgaatgggagcacggcctgagccttgaggaagctgaacagaaggtcaccgaatatgtgcttcgcttcactccggaaggcgtcaagccgttgcttgccggtaataccatcggctctgacaagaagttcctcgaccactacatgccgaatctgatgagccatttgcactaccgcagcgtggatgtcagtacgttcaaggaacttgcccgccgctggtatccggccgtgtacgagaaccgtccgcctaagaacggcggccatcgtgcgctcgcggacatcatcgagtcgctggatgagctgcggtattatcgcaaggcgttcatggcaccggtgcctggtccgagcgaggctgaagccaaagccatctccgcgcaaatcgtggccagcagtttgctgaataagtaaatgctccgcagcgagtcattctcaataagacttactaagacttattgagtcttactgagaagtgtgcgaggaatgctgtgtagaaaacgaacattgggatcgtcattgcgtgaatcccatgcacgcttctcttaatgagaatcattcgctgcggtagaaagacttgacaattatgcgtcaaagcgaagccctagctattttgaacgccggagccaacgtcttcctgaccggtgctcccggcgcgggcaagacatatacgctcaacgagttcattcatcaagctcgcgccgacggtgccgaggtggctgtcaccgcgtctacgggcatcgcttccacgcatatcaacggccaaaccatacattcatggagtggtgtgggagtcgccaccagtttgaccgccaatctgttgaagctcatcaaaactcgccgtcggcgcaagattcaagctactgacatactggtgatcgacgaggtctccatgttgcacgcttggctgttcgatatggtggatcaggtctgccgcctagtgcgtcatgatcctcgcccgttcgggggaatccaagtggtgctctccggcgatttcttccagctgcctcccgtctccgtgtcaggacgcaacaatgatctgatcgcaccgactccggaatttgttgtcgcccgtgaacgctacgccaaggcaggacgcaatcccgaaggatttgtcactgaatcgttggtgtgggacgagctcaatcccgccgtgtgctacctgactgaacagcaccgtcaggatactggtgatctgctgactgtgcttaccgatattcgagccggtggcgtgacccagcgtgaccgcgaagtactactgactcgtttgggcaagactcctgcagttgatcaggtcgccgtacatctgttccccgtgaatcggcaggctgatggccttaacgatttgcgtctgagccagattgcccttgaagagcatgagttccacgctgaaaccgcggggccggtcgatctggtggatcggctgaagaaaaacatgctcgctccgcaacggttagtgctgaaaactggagcggcagtgatggcgcttcgcaacgattcggaccatcagttcgtcaacggttcgcttggcactgtgcgtggttttgctccggaagccaaaggcggctggccgatcgtggagttcgagaacggcaatatcgttacgatgaaaccagccacatgggagatgatggacggcgatacggtgcttgcctccgtctctcaggtgccgcttcgatgcgcgtgggccatcaccattcacaagtcgcagggcatgacgcttgaccgtgcggtcatggatctgtgtcggaccttcgcgcctggcatggggtacgtggcgttgtcccgcgtggaatcgttggacggactatacctggccggtggcaacgagcgcatgttcttggtctcgccggatgcggtgatgctcgacggtgacctgcgtgaagcatcagacgccgccagcgatcaacttagcgctgacggtgctgccgccttcaagccgtccgccaccgcactggacaataccgacgatgattttgctcaagaggcgttgttctgattaacgcgtgcattatgagaatacggatattcgaggtatactaatgacgctaattctcagtaagggtggactcgatagccaccttgaatgctcagcaggtaactgctaggggcgagcttaataagctcgccctgtttcatatagttacaatgcatacaacgatgttgtgcaagtagctatggtgcgaaagggttctaggtgtcgcataaacggtacaggattggaatggatgtgggcctgaattcggtgggccttgccgctatagaagtatccgatgaggatatgccgatgcgtgtactgaatgcgcagagcgttattcatgacggaggtgttgatccgcagaaaaacaaagaagcaattactcgcaagagtatttcaggtgtcgctcggcgtactaggcgtatgcgtcgcaggaggcgtgaacgccttcatcggcttgatatgttgctgaacaagctgaagtatcccattatcgaaccggatactttggataagccgtttgaggaatggcatgtgagatctgaactggcttcacggtatatcgaagatgatgcgctgcgacgtgaaaacatttccattgctgtgaggcatattgcacgtcatcgtggctggcgtaatccttaccgccaggtggattccctgctgaatgataatccgtattcaaagcagtatgcagagttgagggagaaagctcagctctatgtcggtgcggtagatggcggcagcctgactcccgcgcaactcgtagttgccatgttggatgctgggtatgctgaagcacctcgactacgctggcggaccggctcgaagaagcctgatgcagagggctatctgccggtgcgattgatgcaggaagataatgccaatgagctgaaacagatttttacagtacagaggattccgcgagatgaatgggttcctttattccgcagcgtgttttatgcggtatcgcccaagggttcagcggaacaacgggtcggtaaggatcctttggctccgagccagccgcgagcgttgaaagcttcattggcattccagcaataccgtattgccaacgttattactaacttgagaatcaaggatggttccgctgacccacgtaagctgactgttgaagaaaaacaaagcatttttgaccagctgatttcgctgtcttcggaggatataacttggtcggatttatgcgattttatggagataaagcgtagccagcttaagggtgtggggacgcttactgaggatggagacgaacgtatctccagccggcctccgcgaatgacttctccgcaacggatctacagtgctgataaaaagatccgcaagccgttggttgcttggtggaaaaacgcttcggaagacgaacaagaggcgatgattagactgttgtctaacacggtagacattgataacgttcgtgaagacgtagcatatgcagcggcaattgactttatcaacggccttgacgatgaggcgttgaccaagctcgattccattgatcttccctctggacgagcggcatatagcgtggacactttgcagaagttgacccatcagatgttgacgactggtgatgatttgcatgaggcgcgcaagacgctgttccatgttacagatacatggcgtccaccggcagccccgattggagaacctctaggtaacccagcggttgatcgtgtgctgaaaatagtgaatcggtaccttgtcaattgtcaacgccgttggggcaatcctgtctcagtgaatattgagcatgttcgttcgtcattctcatcagttgcttttgcccgtaaggataagcgcgagtatgagaagaacaatgagcgtagatccgtgttccgtgactcactggcggagcagcttcgtacggatgaaaaaagagaaacagtccgtgagtcggatttgcgcaggttggaagccatccaacggcaaaatgggcagtgcctgtattgcggaaggactatcactttcagcacttgtgaaatggatcatatcgtgccaaggaaaggcgttggctccaccaatacgagaacgaacttggcggcggtgtgcgctgaatgcaaccgtatgaaaacgaatattccattcgcagtctgggctcgtaccgaggatgcccggcagcgtggcgtaagccttgccgaggccaaaaaacgtgtggtgatgtttacgtttaatcccaagtcgtatgctcctcgggaggtgaaagcgttcaaacaggcggtaatcgcacgcctcacgcaaaccgaggacgatgctgcaatcgataatcgttctattgaatctgtggcgtggatggctgatgagctgcatcgtcgtattgattggtatttcaactctcggaagtacttgaattcagtttcggcggctgatgatttggacggcaacaagggcgaaaccgcggtatcggtattccaaggacgcgtcactgctgcggctaggcgtgcagccggtattgaaggaaagattcacttcatcggtcaacaggcgaagactcgtttggatcgcagacaccatgcggttgatgcttcggtgattgcgctgatgaatgttggagctgctcaaacgttgatggaacgtgaatctttgcgggaatcacaacgtttagtgggccgtctgatgccgggagaacgctcgtggaaggaatatccgtacgagggaactacacgatatggttcgttccatcgatggctggatggcatgaatggactattggatttgttgaatgatgcgctggacggtgatcgcattgtcgtgatgcaaccgcagcgttatacattaggcaattctattgctcatgatgcgaccatccatccactggaaaaggtgacattgggctcggctatggaggtagagcttatcaagcgtgcttcgatacctgcactatggtgtgcgttgacaaggctgcctggttttgatgaaaagacagggcttccagaagatgcgaaccgtagtatttgtgtgaatggtctccactatggcgcagatgatgaggttgggttctttgcctcgactgcagcgcaaatcgctgtgcagcaagggtccgctgaaattggttctgcgattcatcacgcacgggtgtaccgatgctggaagaccggtgccaagggtgtgcgcaagtacttctacggcatgattcgtgtattccaggctgatttactccatgcccggaccgaggatttgtttactgttccgttgctgccgcagtccatttcgatgcgctatggtgaggctagggttgtgcaagcggtgcaaagcggcaacgcacagtacttgggttctctggttgttggcgatgagattgagatggatttttctgaatcagatgccggcggtcaaatcggcgagtatcttcagttcttctcacaattaaatggtggggatattgccggaactcattgggtggtagatggattcttctctaattccagattaagactgcatccacggtatatagcatctgaaggaatgagcaaatcttttgctgatttgtcagttccagatggtgtacaaaaaatcgtggctggacagggatggcttccttcagtgaatgttgttgctgaaactgcaattcgcactgtacgacgaaatgctttcggcgagcttagattctccgcgaagagccacatgccttgctcgtggcgatggaagcatgagtaatcatgcagaaccagtggcgcgtaatcgactgcaccgatcttgacggctccgtttcctacgagcgtgggagaatgagagtcgtcaagagcgatacaggagagtgtgtaaatgtgccgctggcacaaattgcggtagtactgctcggcttacatgtgcgatgctcagctgccgtgttgcatgagatggctcggtatggtgtatcagtcatgttatgcgattggcgaggcgtgccggatgcggcgttgcatgcatggaccgatttgccgaccacggtcactgctcggcagttggcgcaatcgagtatgtcgcttcctcgcaagaaaagcgcatgggcgcgcattgtgcagatgaaaatacgcggtcaggcagcttgtcttgatgctgttggtcttgacggtgggggattgttgcgaggcatagcagcttcggtgcgttccggggatccttctaatagtgaggggcatgcggcacgtgagtactggaagcgcatgtttccatcggacgaggagttcagaagggttcccgggcaaggctatggcagaaatgcccagttggattatgcgtacatggttctgagaggattcgcaattaaagcagtggtgtccgctggattgataccttcgcttggcgtgaaccatcatgggcggggcaattacttctgtcttgccgatgatttgctggaagtgtatcggcccgcaatcgattacagggtctcattgctgagcgaagagaattcattgcaagagaaaccggtaaagaagtatctggttgatgcagtgaatcagcaattcaatggttctggtcttacgataccaagttctttgaacgactttgctcagcagttcggcttgtattgcgagggcaagatagatcgtttgccagtgcctgaatatgtgggtgaatcatgaagcgtgatgaggacagtggcggtatgtggtgcttggtgatgtttgacctgccggtgaaaacaaaacggcaacggtatgcagcgactgtgttcagaaatatgttgcttgatatgggctacggcatggtgcaatattccgtgtatgtgcggtacacgcctacgcaagcaggtaataggtctacggtcaaaatgattaaagacaatttacctgccaacggattggtaagaattctgcatattagtgatcaccaatggtcgactgcagcgcgtttttcttctggaaaacgcgaaacaagcgaggaaacgccggatttcctaacgcttttttgattgtagaaaaccaagaaaacgttgaaaaatagcccttcttgataatatatcaagcttatcaagaagggtgaatgctaattcccagccacccgttcgaactggtagtcgtcgaggcaagcttatcaagaagggtgaatgctaattcccagctcaggcaatacctgctcagccacgtttacaagcttatcaagaagggtgaatgctaattcccagcgcaaatgacgacacgctggcacttgccacaagcttatcaagaagggtgaatgctaattcccagcgccgtccggctgctgctgcattcaaacccaagcttatcaagaagggtgaatgctaattcccagccaatgaggcttgcgcggcttttcgctcccaagcttatcaagaagggtgaatgctaattcccagccagtgtcgctgccatatggggtgcgtatcaagcttatcaagaagggtgaatgctaattcccagcacctccattgcacacgtgcttatgcagtcaagcttatcaagaagggtgaatgctaattcccagctcgcttgtagattggtggcgttcgcgcaacaagcttatcaagaagggtgaatgctaattcccagccaatgaggcttgcgcggcttttcgctcccaagcttatcaagaagggtgaatgctaattcccagccagtgtcgctgccatatggggtgcgtatcaagcttatcaagaagggtgaatgctaattcccagcacctccattgcacacgtgcttatgcagtcaagcttatcaagaagggtgaatgctaattcccagctcgcttgtagattggtggcgttcgcgcaacaagcttatcaagaagggtgaatgctaattcccagcagcgtcacgaatggcaacgggtgtcatccaagcttatcaagaagggtgaatgctaattcccagcgaggggtttgtgatgcgcggtacgtaaacaagcttatcaagaagggtgaatgctaattcccagcctcggtcattggttgttccttttcgttgcaagcttatcaagnnnnnnnnnncaagcttatcaagaagggtgaatgctaattcccagcctcggtcattggttgttccttttcgttgcaagcttatcaagaagggtgaatgctaattcccagctggactaacacgggtgtcatgatcgtgtcaagcttatcaagaagggtgaatgctaattcccagcgaatctcgcccgtgtctgggtatgcgagcaagcttatcaagaagggtgaatgctaattcccagcctcggtcattggttgttccttttcgttgcaagcttatcaagaagggtgaatgctaattcccagccacttgccagtggtagcgccaccgtcaccaagcttatcaagaagggtgaatgctaattctcggcttcttcgagcgcggttacgttgtgtgcatttatggaagttagggtatccgataatgcatgccagtacaccaaccgcgtaacaatttgactgcggtgatggagcgagatacttttaaagtatagctttagcccatgctcctcttccggtcggaggtcggggctgatgcttaagcttaccgcaacatggaattctctgccgtgatgttcgcagccgctgcctgcggtggccacgaaggaacacctagtcttgggagcaggcgaagcagctgaaaggctgagtctcccgtagatccgttcgcgtcacgggtcgcctagcagagggcaatataaacatggattcccaacagcggggccggaggaagaatcgcgttcctccggcttacatacttgcttgagggggagcattcgatggtggggcgcaggaatgatgatattcccgcaatgcttgagcggctgcgccctcttgctgaatgctatgcagataattttcttggtcgacatgtaatccttgaatttaatagcaccgcattcgatgtgcattggcagaaacatcactttatgcatctttgtggtttggattgcattgtgccgcaacgtttgtataggttcggagcgaagccagcgaaatgcgaagtattctttgatggtttgctctctggtaggtgcaaagaattgcgtatccatcatgcacataatcgaggtattactgaagataaattattcgtactgccattgatgctgcagactccggaaagtgtgaaatttatagcagactcggccagcaaagactatcggtatttcttcggttcggatgcttggtgcgtaggtgttacgttgactaacgagcaacctgtagacccagatgctgatgtgtatgcgcctcggaccgtgcggaatgtgagtatttccagccggtcgattcaacaggctggaacggttctttacccgttgaccggagcccgtgtgatacctccacggtagtggatagctggatggggaggtcccgactaccatggttcgtagaggtggtagttatgggactatccgaaatgttccgcaagaacgatgatgccgacgatgatgtttgcagacccaagtcgagtggattgatacgtccggctgctgtggccgggtcattttatccggatgaccgaactgcgctcaaacggctgatcagtcatcagctcgattacgggcgtgccttgatgaaacaacttgagcccgaactgccggcaggctgtccgaaagcggtgatcgtgccacacgccggatacgtgtattccggcactacgtcgtcgctcgcctacgcgctgcttgaacgagggcgtggggtggtgaagcgtgcggtgatcattggtccgacccatcgtgtgcccgttcgtggcgtcgcatgttcgagtgccgatacgtggcagaccccgctgggccaggtcccggtggacactgatgccgagcgcaaggcgctgaatttgcttggagctcggcgtgtcagtgtctcagctcccgcgctgatcgtcaacgacccgacccatgcgcgagaacacgcggtggaagtgcagattccgtttttgcaaaccatattcggtccggatctgactatcgtgccactgaacgccggtgatgccagccctgaggcagtgggagatgttttgcgcgcgttgtggggcgggccggagacggtagttatcatcagttcggatctgtcgcattatcatcctcaagagtatgcgcggcagcttgatgagaaaaccatagatgatattgcccactgccggcttccgatccatccgcgaagggcttgcggtgcgcatccgatcaatggtctgctggacgtattggtgcgcggacttcagccgtctcaagatggaatcattcatgagacatcttgtgaaacgtatcgtgaaacacttcgtgaggtacgtgaaacaccttgtgaaacattaagtggcgagtggggcggcagcgcttcgaacgacgaccgtggtaccccgcaatttgatttgcggcttttgggacgcagtacgtctggcgacgactccgtggtggcgctcgcaggtcgaccacgtccggccatgaatactccagatgaaccagtagtgggctatgcgtcgtttgcgatttggcagagtggcaacggtgtcgattgtgtcgattgtgtcagttgtgccaatgatgaaaccacgcaagatgccggcgttgcccaagacggcgatgccgttggcaatcccatgtcgatcccgacgaatcatgtggcatccgggaaattgccgggaacggccgaatcaaatgctgatacggctgcaccgcaaacgcgccggaatgtgctgctcggtctcgcccgtgcatccatacgccggcatctcgggtttgatgatgctccggagaaccgcccaaacgctattatcgcccgtaatccttggcttagcgagccaggagccagttttgtgacgttaacggaaaacggtcggttgcgcggatgcgtcggcacgcttgaggcctatcgttcgcttggcggggacgtggctgatcatgccgtggatgccgccgctcatgatccacgatttttcccggtgactgcggaagaatatccattccttgatgtggaggtgtccgtgctgggcagaccaagcgcaatgccagtgcgctcgcgtgaggaactggaacagacgttgcgccccggaaaagacggccttatcttgaccgaccggcacggccgcagggcgacgttcttaccgcaggtttgggagcaactgccggtgccgcatgatttcgtatcgcacttgctggtcaaagctggaatcggtgctgactatgactgggctaacggggaaatcgaatgcgaacggtacgaggtgagcgcctatgccgagcgttaataccaagctggacgcaatgccacgcgccgcgatcggtcgatggcagaccaagttcagtgatggcagcaatcgcgcccgctgcgaactgtgcccgcgccgttgtgtgctgaggcccggccagcgcggattctgcttcgtccgttcgaaccatgatggtgctattgtttcggatacttatggccgcagttccgggttcgccgtagaccctgtagaaaagaaaccgctcaatcatttccatccaggctccagtgtgctgagtttcggcaccgcaggatgtaactctgggtgccggttctgccaaaactgggatattgccaaagctcgcaacttcgatagactcggcattgaggccagtccggagaagatcgcgcaagtggcgcgggatcatgatattgattcggtagcgttcacctacaatgatccgattgtgttcgccgaatatgcgattgacacagcgatcgaatgccgcgctcggggcatccatccgattgctgttaccgcaggatacatgagtgcggcggcgcgtccagacttttatgcggccatggacgcggcgaatatcgatctgaaaggttttactgaggatttctattggaaagtgaccggtacgcatttgcaggacgtgctggacaccattgattatgcggtgaatgaggcacgtacgccggacggtggtcatgtatgggtcgagcttacgacgctgctcataccggggctgaacgacgacgatgctcagctgcacgccgaatgtacatggattcgagaacatcttgggcctgatgtgccgctgcatttctccgcattccatccggcgtggaagatgcaggatgtgccgccgacccctcatgagacgttgactcgtgcgcgtggaatcgcccttaacgaaggactgcattatgtgtataccggcaacgtgcacgatcgtgcgggggatactacttactgtccggacccggattgcagagcggtgctgatcgaacgtgattggtatcgcattatcattgaccgactgagtggaaccgatggatgctgctcggaatgtggcactgcaattgccggacgatggtagctgagggtcgtgggttggcgggcttgtcggttcacgcgaatatcttggaacctatgacttccaatacccttcgtatgtctactttgttcctgcgcacgttgcgcgaagacccggcggatgcagatgtcgattccgccaagctgctgcagcgcgccggctacatccgcaaggccgcccccggcatctggacctggttgccgctcggcctgcgcgtactcaataagatcgaggccatcatccgcgaagagatggccggcatcggtgcccaggaagtgcacttcccggccctgctgccgcgcgagccgtatgaggccacccaccgctgggaggagtatggcgacaacatcttccgtctgaaggaccgtcatcaggctgattacctgctggctcccacccacgaggaaatgttcaccctgctggtcaaggacatgtactcgtcctacaaggatctgccggttgtgctgtaccagattcagaccaagtaccgtgacgagttccgcccgcgtgccggcttgattcgcggtcgtgagttcgtgatgaaggacgcctattcgttcaacgtggacgaagaaggcatgcgcaaggcgtacatggatgagcgtggcgcctacgagcgcgtgttccagcgcatcggcctcaagtacgtgccggtgttcgccatgtccggcccgatgggcggctccgcttccgaggaattcctggctccgatgccgatcggcgaggataccttcgcgttggctccttccggtaaggcgtggaacgttgaggcgctgcatacgccggaactgccggaaatcgatgcttccaacactccggctgccaccaaggaaagcacgccggatgccaagaccatcgacaagatgattgagcgcgccaacgccgaccatccgcgtgcagatggtcgcgaatgggctgcttcggacattctgaagaacgtggtcatcgccgtcaagcatccggaggatgaggagcatgacgaaccgtggcgcgagctgattgtcgtcggcgtgccgggagaccgtactgtcgatatgaagcgtctcgaagcgcagttcgctccgtccgagcttgaagaggctactgaagaggacctcaagaagcatcctgagctcgtgccgggctacattggcccgatggtgcttggaccgcaggctgaggctgccggcgtcaaggagccattgcgctactttgtggatgctcatgtggtcaagggttccgcatggttcaccggtgccgacgaacacgaggttgactactacaacctggtgtacggccgtgacttcgaggctgatggcgtggttgaggccgttgaggttcgccacggcgatatgagcccggacggctccggtccgttgagcttcgagcgcggcgtggaaatcggtcaggtcttccagctgggcttgaagtactccaaggctctggacctgaaggttctcgaccagaacggcaaggccgtgccggtgtggatgggatgctatggcattggtgtgtctcgcgtgctcgcgtgcgttgctgaaacgcatcacgatgaggcaggcctcgcttggccgtccgtgattgccccggctcaggtgcatgtggtggccaccggtaaggatgcagcggcgttcgaaggtgccgagaagttggtcgaggcgctggaggcaaagggcgtcgaggtgatttacgacgaccgtaagaaggtttccccgggcgtgaagttcaaggatgccgagcttattggtgtgccgaccatcgccgtggtgggccgtgacttcgtcaacgacggcacgattgaaattcgtgaccgcaatggtgagaacaaggtcgccgtacctgccgatcaggccgtcgaaacgttgcttgagcggctgtaataagttgtgaatcgtacgattcgacatcgatagcgccatcctgttgatacggggtggcgcttttcgttgtgttggtggtgtgttggtggtgtggataaccgaaagttatccacatggcctcaagccccgtcacagtatccacatttgccgattgcccttgtgcggcgagcgccccgtattgcacagtgatcataccgccggtcacctcgttcgcaaggatgcgcggttgatcggcggtccagacgtatacgcgcttgtgggcgcaacaggaaaggactcatcatggcaaaccagcaagcagcagtaacggtaaccggctttgtggccagtgatttggtcaaaggcggcaaaggtgactttacggtgctgactttccgcatgggcagtacgcgcagtcggctgaatccgaataccagacaatgggaggaattcggtaccgcgtggcttacggtcaaagcgtttcgatccttggccaataatgctctgcaatcaatacggcgaggggatcggattattgcggttggggtactgaacactgaacaatggaataccgaacaaggggagttgcgcagcaggaccattcttgaagcgaccaatatcggtcatgatctgacgttcggtactacgaatctcacaaaaacgcaacgcgccaataacggaaacgctccggtctcagggaatactggcactggtaatacaggtactggcaatccaccttctggtggagacgctcaagatcccatatccggtgttgttgcggcatcgacgccaacgccgccggttgagctcggtgatgccggcgtgcagtgtgaaccaagtggctcgcagccgttacctaccgatgtggttgacggacccgcccagcttgccgtgcaacaatcctatgctgatggttttactgaagaaccggaaatgtgacgattgctgtgtaggcgcgtgtggctgcgtgcatacacagcagaaaagcctgcagcggcacgtgcatatgtgcagctgcaggctggttgcgaggtgcttatctgataagcggcattaggcgggatgatatatgcctgagacgcttgcttaccagatgcgtacgcgggcctcgggcgcgagccacatggcgtcgccttcagacacgtggaaggcgtcgtagaacaggtctacattgctggcgatcccgttggtgcggaactcggcgggggaatgcgggtcgatttgcagatactgttcggccagctcatcgcggttcttagtgcgccagatggaggcatagctcaggaagaagcgctgcagaccggtgaaaccgtccatttcgggagcggtgtcgagcagttccttgatggcggcgggggagccgtcctcgtcgccattgccggtgatcgtgcctgcggccttgcctaaggagaacgcgtaagccttgagcgcgatatttacgccgcctaggtcaccgatgttctcgccgatggtcagcgcgccattgacgtgtggtgccttgcttgggtcgtcggcatacttttcgaccagctgctgaggtacgaagccgttgtattgctcgatgagcgccttggtgcgttcctcgaagttct

SEQ ID NO: 565 - DNA, 23414 bp, synthetic construct
  misc_feature 1..23414: note = Synthetic
  source 1..23414: mol_type = other DNA
gttcatgattgagcgcattgccttcgatatgccccagcggggcgttgagatcctgcagcgtcaatccgggctcgtgttcgatgccgagcagcacgccgagcccgccgccgcgcagatcggcatccatcagcgcgcaggagatcccacgcttgcttgcggtcagcccgcacatcgccatcagggtggtcagtccgatgccgccgcccggggaagtgaacgcgacgagattgccgcgtcctctgacggcaggtggcgatttcggcgtcatggccggtggtgctgacggaggcatcggcgggggagccggtggcggcgcattcggagccggcactggcggtgccgggtagggcggtgtcggggcatgccgtgtcggaggggcgggagccggcgcgaccggtgtgcgggttcccggcatcggtgccggctcggcggggagaggaacgttgccgcgttgtctgtcgaaggacggggttctcggttgtttcgtcgatgtgatcatgcggccgattgaaccgggtgatgtccggcacgggcaaccgattccggccaatgtggacgaaacccctcgacttgtctccgtgcgattgcttcattgcttccgatattgcttccgatgtggattcgagtacctcgagtgagtacccgtcagtctgtctgccggcttccggctcacggcttccccgcgcaacagaaagggcccgccgaagcgggccctttcgtaacaagtccaactgcgagcagaatctcaacacaacatcatcgttgcaacggtaagtctttccaatgcccgtccaacgtattagtcctttgaccattactttttgtgggctctgctctgttcagttgttcttgtagttcataatctaggcgcgccgtcgccctcgcgcaacctacaacggcaccttgttcgattctttgcgcaaatggtcatatgtgcgtgctgacaacgtagaaatggatcgacctgtgcgattcaaaacgtttgactgtgctgttgtgttctcttcgggtatccgatcggcgtgtcgcgatcgatcgcggtcggtgatgcgatcggctatccacaatggggctccccatccacaatggctgtggatgacacgccggcgatgtggataacccgggggtttcgtccacatgccccggattttccgtgttcgtcggatcgatcggcggcacagtggtcacacccggttcgacagggccccaacgtcggagccgccggtcgaaacggggaaaccaggaaactaataacgacatgatgaaggagtcatgatgaacaccaagatcaacaacatgctgaccagcgccaaggctcgtctctacatgcttgacgccaggattcgcaccctgaccgccgagcccgaagagggcgcggcgaccgtcgagtacgcggccgtcaccgttgcggccgtcagcctcggcggtatcctttggacgatcctgaagtccaaggaattcaaggccttggtccagaagatcttcaccactatcttcaacgcgatcaccacgggagcgttctccgcttgattccccgtgagtcgagcctgattgcaatcggacgtcaccgatgaaaccgtacgtgaagcgtcgcgcacgtcgtccgccggcaacgatctccgccgttgccggcggccggtgtcagtcgccgaaccaatcgccatctctttcctcgccggcccgtttagggccgacgcccccgatccataaccgtgatcgtctcaattccagtcgttttcgtcgtctcttcgcgttatccgcatggatgtcccggtccgacgccggcgcggtcaccgccgaattcgccagcgtactgccttccgtaatggtgatgatcgtcctgctggctgcgctcgcccgcggagtggtggtgtccatgacctgtcaggacgccgcatccgccgccgcccgcgccgtcgtctcctccggaggagatgcggattccgaggccgccgctcaggcggtcgccgggaaggacgtcgacgtcgacatcgatgtcgacgccgaagccgggaccgtcaccgtcatcacgcgttgcccggtgattcccgatccgatgggcgtattgccgtcactggcgtcgggcaaagcggtgggagtgctgacatgagtgacatgagcaagcaaaccgacaggcacctcggccgccaagggcgattcgaccgattcgccgccaccgcaaccgcatacgatgaaggcgccggcaccatactcggcatcatcatgatcaccgtcgccacggtcatgatcgtcgtggcggtgggcgtcggccagatactggttggccgttcccgtgcggcaacggccgcggatatgtcggcgctttccgcggccaacgccctgtggtccggcggtgtgccatgcgaggtggcagccagggccgccgaaggccagggtgcgcacctgatctcctgcgacgtcggcggtgacaccggcgaggacgtgctggttcaggtgggcgtggacgtcgggatgccgttcctgcccgatatgatccagtccgctcgggcagggccgacggtctgcgaatagactgctggcgcgtcagccggcttcccggttatcgtgttgcgtatgaccgagagccagaagcatacgaccgtcgccatggtcggcaaccccgtatccgacaagggtaggggtgccaggatcggagcgcaggtattcgacatgctgaccgaagccggccgacatcatggattcgatgtgatcgatctgaccggaaacagcttcgatgactcccttgccaaggtgcgcggtcgcatgaacgactacgaccatctggtcgtggtgggcggtgacggcatgatcgccctcggtgcgaatgctgtcggttccagcggcaagccgctgggcatcgtggcgaccggatcgggcaacgacttcgcccgcggtctctcgctgccggtcaacaagatccccacggcggtcgagggcatcgtcggagcgatcgtacgcggatcgtatatcgacgtcgacatgggtcgggtcacggcgttgccgggattcgtcgccgccgatcccaccaccggcaaggagcttgccgatggtgggatcaacggcgaccggtactacgcgggcatgttgtcctgtggattggacgcgagcatcaacgaccgggccaaccattcgcgattgccgggaggatcgctgcgatacttcgcggcggtgctcgtcgaggtggcgcatctcaaacggtacgggtaccacatcagagccacgcttgcggacggcacgatcgaggagcatgacctcatcacgccgatggtgaccgtagccaattcgcggcacatcggtggcgggctggaggtgtctccgtactcgcggttcgatgacgggctgctcgacctgatctggatcgatcacatgcccggtccgttggagatcgccgatgcgatctccaaggcctacaacggcaaactgctcgcctcccgcatcttcgggtggaaacgggtgcgcgccgtcgagatcacccgggccgcggtgggggacgagccgccggtgctgatggcggacggcgagtacatcggccgactgccggtggtcgtacgggcgtgcgatcgttcgctgcgcgtactggtgccgccggccgtggtcggctggcatgaacgggcgcgaggcgaacaggcggtgctggactccatacgccgcgacggacgcgatccgatcaccggtgcattcgtctgattcggctggtggttcggttcgacagtcactaggttcagccggccgtggccatcgacgatggacggaggtagtcggtcagatgcagcgtctgcgcgatcagcgacttcagcgtcgcatcggtgacgttcgcatgcgatcggatcagggagatcaacccgacgatgagcgtgaagaacgtctcgtgcacgttcgtgatcggcatgccgtgcaggagcgcgaaatcgcgcacgacggtgcgttccagcagatcggcgatgcgatcggcgatgcggtcgatgaaccggatgtacagctccgcattgccctcatggatcatgcgggccgagaacggcccctcgttcgcgatgagggcgcggatcagcagcaccatgtcgtcgagcgccttgtcgatgttgccggtctcgcgggatgcgttccacgcctcgagcttggagaggatctcgcccaccacgtcgtcgagcacggcgtcggcgaccgcgtccttatcggggaagtagtggtagaacaatgatctggtcatgtgcacccgcgaggcgatgtcgctcacggtgatcctggagaagcccttctccagacagatctctctcgctgcgcgcacgatcgccgcgcgcctggcgtctcctttgcccgtcgccgtcatcgtcgctgttgacgtcgtgtcaatactgctcatggcaacagtgtaggtgattgcggtggtgcgcacggcagtcgtgcgcgtttcgtcaacatccatcgccatcgatgggtagtcggtttgaggtaggttggaacatatggcacttgcactgtatcgacgttatcgcccggacacgttcgagggagtaatcgggcaggatcaggtcaccgtaccgctgatgcgggcgctggacgagggcaagctcactcacgcgtacctgttctccggcccgcgaggctgcggcaagaccagctccgcccgtattctcgcccgatgcgtgaactgcgagaagggaccgacctcgcatccgtgcggcgagtgcgagtcctgcaaggatctcgccaccggcggcccgggatcgatcgatgtggtcgagatcgacgcggcgtcgcacaacggcgtcgacgatgcgcgcgaactgcgtgaacgcgcgggattcgcccccgcacgcgaccgatacaagatcttcatcctcgacgaggctcatatggtcacgccgcagggattcaatgcgctgctcaagatcgtcgaggagccgcccgagcatgtgatgttcatcttcgccaccaccgaacccgacaaggtgatcggcaccatccgctcgcgcacccaccactatccgtttaggctcgttccggccgagatcatggggccgtaccttgagaagatctgcgatgaggagcacatcaagcccgaaccgggcgtgcttcggctcgcgatgcgcgccggcggcggatcggtgcgagacacactgtccgtattggatcagctgatggtcggctcggtcgacggcgtgatcacgcacgacgcctccgtggcactgctcggcttcacgcccgaggcgctcatcggcgaggcgatcgacgcggtgatcgacaggaacggcaaggacctgtacggcgtcatccagaaggtcgtggtcggcggcttcgatccgcgccgattcgtcgaggacctgctcgcccgcgtgcgggacctgctggtgctcacgttggcgggggatcgggcggaaagcgtgctgtccgacaccgccgaggccgaggagatgggcgacctgcaccgtcaggcggccgcgttgggactcggtgcgctcaccgccatggccgacatcatcaacgacacgctgggtgcgatgaccggtgcgatctcgccgcgcatgcgcctggagctgctggcggcgaggctgctcgccggagcggagaccggattcgcggctccggcccctgctgcggtcggcagcggcgcgggcaacggcatgggaggcgcgcaggctgcacccggtgccggggcctccggtggcttcgctggtgcggcgcgtaacgccgggggcgctcgcggaaacgccggtggcgtcggtgggttcgccggtgccgcgcgcaatcaacaggctgctgccggtgctgctgccggtgccggcaaagtcggtatctcgacagcggtggcctcgcatggcgacggctccgtgaatgctgcgacttccgtcgcgacctcggcctcggcctcgacctcaagtgtcgaggcgcccgtcaatgggcccgcgtcgacgacagccggcaataacacccctcaggccgctgccgccgcccctgcggcacccgacaatcgcactcccgatcagaagtgggatgctctggtcgcgtcgttgcccgacgacgtacgccgatacgtcacccgcgacaaggtgctgcgcatcagcctgcgtccgtacaagcagaccggccggatgaggctgtggctgaagttcgacaagcccctcagcaagtatgccttcgcactggccgtggcctccgaagaggtcgacggcagcaacaaggtcgtgtccatcctgcgctccgaagtgcgcaaggtgttcggcgagcagaccgagatcgccccgacccccaccaccgacgacggtcagaagacaccggccttcagcaaactgccgatgggtgagcagcagcgcatcaaggcgcagctgctgcaggagaacctcaaggcggccgccagtctgaccgccacggccgagtctgctgcttcgtcggggaacggcggtcaggagtcgagtcgtgagcacgccgctcagagcgcgcatacggccggcacctcgtcggacgatgatgaagctcaccgagctcggtccgccgcactgtcggcgttggatgacgacgacccgtgggcgcatccgacgctgacgaagcctgctgcatcaccgatcggctccccggccggagtcggtggtgacaagagttccagcggcaatggtccgagtgccagtgccggcgaatccaatgggagcgaacaccatcacaagcatgtggcggttcccgatctgagtgacggcatcgatccatgggcgcagcccgcagccatgcctaagcccggaaacgtcggagccgggcacggcgtcggtgatcgttcggtcatgcctggacagtctgaaaccgataccggcaacaatgctcggatggccggacgttcggctggcaccccggccgttccggccgctcagaatggtcagggcgatgatccgtggaaccgtaccatgcgtccgacaggagcgactggctctggatcgcagatgccggttccgaacgagccggacgacccatggaaggacgtgcctccgcccagcgaaccggacgatccgtggaatacgccctcggatgtttcacgtgaaacaccggcgaagcccactggcgccgcaggtgttggcggcggggcggccgttgatgcgggggctgatccttggaacgtcgcccggtcgcagtcgcccgcgtctgcagaaccgcaggtctccgcggacgaggatgaatactcgatggacgaccagtcgctcggcgaggccaccgcaatggatcggaacgagctgctgcggatgttcgaagtgaagaaggtcgaacagttcgccgccgacgatccgcacaacccgcgcaacgtccatccggcacccaagcatgacgacgagtgacggggctggcgcgaatggcacggaacggcactcgagcgcgcacatgaagacacggaatgaacacgtgacaaggaggaacgggcatggcattggcctatgacggtgcgatccaacggctcatcgacgcattcaacaaactgcccggcatcgggccgaaaggcgcacagcgcatcgcattctacctgctgagcgccgacgagcaggaggccgcggcgctcgccgacgccatcaccgaagtcaaggcgaaggtgcgcttctgcgacatatgcggcaacgtgtgcgagaccagcccgtgtccgatctgttccgatccgcgacgcgaccacacgctgatctgcgtcgtcgaggagccgaaggacgtgatgagcatcgagcgcacgcgtgaataccgcggtatgtaccacgtgctcggcggggccatcaacccgatggccaacgtcgggccgagcgatctgcacatcgcaggactgctcgaacggctcaaggacgacagtgtcaaggagatcatcctcgcgctcgacccgaacattgaaggcgaggcgaccaccacgtacctgagtcgcctgatcagcccgctcggcatcaaggtcacgcgccttgccagcggactgccggtcggttcagatcttgaatacgccgacgagatcacgctcggccgcgcgctcgccggccgccgcgaggcataggaggactcattcgccgttccctccgcgtgtctcccggatgtctccccgccgtccgcatgttgggtgagcggatggggttcgagcagcgaaatccttataatcgtgccgcttacgtagaataagcggacggaatatcgaggggcgcatgccccgaaacccccaagagagaaatggacagcagtggctctcatcgtacagaagtacggcggctcgtcggtcgccgatacggaatcgatcaaacgtgtggccaagcgcgtcgtcgagaccaagaagaaaggcaacaaggtcgccgtggtggtatccgcaatgggagacaccaccgatgatctcatcgatcaggcgctgagcatcgactcgaacccgcccgagcgcgagatggacatgctcatgaccgccggcgaacgcatctcgatgagtctgctcgccatggccattcatgcggaaggcagccgcgcccactccttcaccggacagcaggccggcttcttcaccgatgcccgctatggcgcggcccacatcaaggccgtcaagcccgaccgcgtgaagaacgcgctgtcgctgggagacgtcgcgatcgtcgccggattccagggcatcaacgcgaagggcgacgccaccacgctcggccgcggcggctccgatacctccgccgttgcgctcgccgttgcgctcggcgccgacatctgcgagatctacaccgacgtggatggcatcttcaccgccgacccgcgcatcgtgccgaccgcacgccgcatcccctacgtcggctacgacgcgatcctcgaaatggcatcctgcggttcgaaggtgctcgcgctgcgctgcgtcgaatacgcgcagcgattcaacatgcctctgcatgtgcgcagctccttctcccaccgtcccggcacgctggtcgttcccgagggagtcgacccgcgcacgctgccgaacatcgactgatcggtcgagatcacgtcgacggcatcgcaccgacggtattgacaacacgtttacgaagcaagacaaggcaagacaatgagcgacaacaacaacgaaaaatcgatgggcgatctgttcccggacctcggccccgaggctccggtcatctccggtgtggcgcatgaccgcagcgaggcgctggccaccgtgcgtggcgtgccgaacgagccgggcatggccgcgaaggtgttcaccgagctggcggccgccggcatcaacgtggacatgatcgtgcaggccggctcctccgcgggcctcgccgacatctccttcaccgtgccggagtcgtccgtcaaggcggtggagaacgccctgatcgataagcacgaggagctcggctaccgttccttcgatgtggataccaaggtcggcaaggttgccgtcgtcggcgtgggcatgaagacccactccggcctcgccgccaagttcttccaggcgctgagcgaccacggcatcaacgtgctgatgatctccacctccgagatccgcatcgccgcgctcgtgccgctcgaccagctcaacgacgccgtgcgcgccttgcacaccgcctacggtctcgacgccacgcaggtggaggccgtcgtctacggcggcaccggtcgctgagcgcagtgcgctgacgtatagtaacgatcccagtcgattgtcacgctgggcggtggccattccacgagtatctcgaagatgcttccagccggcgaccgtcacccagataacatgcgaagggccttttctccgcgatgttggtctccgcgaggtgagtctgacgatcttatgggctataatgggctttgctaattctcaataagagtggacgagttagccactttgattgctcaacggtctccagatcgtaggggcgggtgttacacccgccccgttttttatgaaggcgattcttagacagcttcagcctctcctgctggccatccgtgctctctgaagttcgcctcgcatgccagcggaatcaggtaatatggatggcactattgttctcggggaagaggaattcagatgagtgcaaagcgttatcgagtggggattgatgttggactgaactcggtgggattggccgccatcgaggttgatgacgccaatactccgatacgtattctcaatgcgcaatcagttattcatgacggcggggtcgatccgacgaggaacaaggacgcggctacgcgtaagagcgtttcaggtgagagccgacgcgcgcggcgaatgttgcgtcggcgtcgcaagcgtcttaaccagcttgatgagttgttgcagcgattgggctatccgatcattgaccctgagacgttggacactttcgacgagtggaaaatacgttctggcttggccgatgtgtttattgaggatgaagccacgcgcaaggaaaacatctccattgccatcagacatatcgcgcgccataggggatggcgcaacccatatcaccgcgtggaatcgctactggtggataatccgtattcggagcaataccgtgagctgaaaactcgagccgaggcgcagatcggacatgcattagatgaggatatgacatcggcgcagatcgttattgcagcgtggcctcataggacagtggataacgcccgcttgcgaaccagcagcaagcggggcgaaggcttgctgccttccaaactgatgcaggaggataacgccaatgagctcaagcgtatcttctctgtacaacgtgttccggaatcagagggtgatctcctattccacgcaatattccgcgcgaactctcccaagggatccgcggagaaacgagtggggcgtgacccatttgatgcagcacagcctcgtgccttgaaagcatcgttggtgttccaacgataccggatcgccaatgtgctgacgaatctccgtattcaggagaacaagcaggaacggcctttgacgattgaggagaagcagacgatttttgcgatgctcgtctctgatgattcgaaggacattacttggggagatgttgcatcgcatctcggatatgagcggagacagcttcggggcgttgggaaaaccaccgaagacggcgaggaccgtatttccagcaccccgcctcgactgacctctttccagaggatatgcgaagcggacaagaagatcgccaagcccttgcaggcatggtggcaaaacgcctcagggcaggcacaggagtctatgatcagactgctgtccaatacggtggatctggatggtgtccatggagacatctcatacgaggaggcgctcgacttcatcgatggccttgacgatgagggtttgagcagactggactccgttgatcttcctgcaggtcgagccgcatacggcgaagagacgctacggaagctgacggaacgcatgctgaccaccaacgatgacctgcacgccgcacgtaaggtgttgttccacgtttctgattactggagacctccggcagatcccatcggtgcgtcattgggcaatccctctgtagacagagtactgagaatcgtcagccgatggctgtcaaattgccgtaatcgctggggtacccctgtatcggtacagattgagcatgtgcgttccgcgttcgattcggtagctactgcacggcaatatgagcgacgaaccggcaacaggagcgtctatcggtcttcgctggcgaagcagcttcgtgagagcgaacatcttgaccgtgtacgtagtgaggatattcgtcgtatcgaggcgattcaacggcagaacggcgaatgtctctattgcggacggccgattgcgttcagaaactgcgaaatggaccatatcgtgcctcggaaaggtgcgggatcgactaatacgcggacgaatctggccgctgtttgcatcgaatgcaacaggcttaagtcgaacattccatttgcggtgtgggcggactccgaggcggcacatgctcgtggagtgaatttgaaggaatccttgcagcgggtcgatcacatgctctatgacaggaacgctgatacttcgcaaacttggagacggttcaagcaggatgtgaagatcagactgaagcagacctacagtgatgagccaatcgacaataggtccatcgaatcggtcgcatggatggccgacgaattgcatcgtcgtatcgattggtatttcaacgcggggcattatcttgaggagtgcgatgagctccgtcctcggattatggtggaggtccgtgtgttccaggggcgagttacagctcttgctcgtagagcgagtggtttggaaggcaggattcacttctttggtgctcgttacaagacccgtttggaccgccgtcatcatgcgatggatgcttctgtgatcgccataatgcgcccatccgtggcacagacacttgtggaacgcgattcattgcgtgagtcacagttgattgcaggacgactggccaacggtgagcggagctggaaggaatatccgtatgaaggctgtccgggatatgttccattccaacagtggcgcgcggctatggaatcgttgttggagctgctgaatgatgcccttgatcatgatcggatagttgtccgtcagccgatgaggttgcaactgggcaattcgatagcgcatgatgcgacggtcaagaagctactccgtgtgcggcttggtgatgccatggatgctgatctggttcgcagggcgtccacacctgcgttgtggtgtgctcttacgcgtttgcctgattttgatgccgcagtcggtctgcccgcgaatgattcgcggacgattgccgtgcacggcgtcacgtactccgccagtgacgaggtggagttcttcgacggacagtcggcgcaactcgctgtccgtggaggttcggctgatattggttcgtcgatccaccatgcgcgtgtctatcggtactggaaacagaacgccaaaggtgtgcgcaagtactggtacgggatgattcgcgtgttccaagtggatttgctgcgggcgcgtggcgctgatctgttctcggaaccgttgccgcctcagtcggtttcaatgcgatggggtgagcctcggaccgtacaggcggtgcaagccggtaatgccacgtatcttggctggatggttgtcggcgatgaacttcgtgtggagttccctcgggagaccgcgcttaatgggcagatcggtgagttcgtggattggtgcgatggctctgattcggcaagtaccgctcaatgttcatgggtgttggatggtttcttctcgaacaaacaactcaggctacatccgagactgctggcatccgaagggttgatgaaactcggcaaaaatcaggaaatacctgatggagttcagaaagtcgtagctaagacgggatggatatctaccgtagatgtctttggaggcttttccccaacggtgattcgccgtaacaccttgggcgaagcgcggtggcgttcgcagtccggtttgccatgttcatggcgatggtttgactaagagtgcatcatgcagagccagtggcgggtcgttgattgcacggagatgtccggcaatatctcgtatgtacggggctgtatgcgtgtacaacgggatgctgttgatgagccggtggatgttccgttatctcaggtggctgtcgtgctgcttgggctgcgaatatcatgctctgcctctgtattgcatgagatggcccgctacggggtatcggtcctgttgtgcgactggcgtggagtacctgatgcggcgcttcacgcttggacgaatctgccgactacggtcactcggcgtcaattggcgcaagtcgatatgacgttgcctcgtggaaagaatgcatggggtcgaatcgtccaggccaagatccgcggtcaagcggcatgcttggacgcgcttggaattgatgggggaggattgttgcgcggcatcgccgcgtcggtccgatccggagacccctcgaattgtgaagggcatgcggcgcgggagtattggaaacgggtgtttccagccgatgaggagttcaaacgaagcccaggtgacggccgaggtcgtaacgcgcagttggattatgcctatatggtgctgcgcggtttcgcggtcaaggcggtcatatcggctgggttgatcccctccttggggatgcaccatcgtaatcgaggcaattacttctgtctggcagacgacatgctggaaccgtatcgtccggcaatcgaccggagcgttgctgaattgcgggcggaagacgatctatcggataagagtataaagaagtatcttgttgaagctgttaaccagcaactcaacgggaccggattgacgattcccagttcgctgaatgacttcgcacaacaatatggcttgtactgtgaagggcgtgtcgaccgactcgcggtgcccgaatatgcgggcatcgtatgaaaagggatgaggacagtggcggcatgtggtgtttggtgatgtttgacctaccggtcaaaaccaagcaacagcgtcgtgctgctacagaattcaggaacatgctgttggatatgggctacagcatggtgcagtattcggtttacgccagatacactcccacgcaggcgggaaaccgttcgacggttcaggcgatcaaagcggctttaccggcacacggatatgtgcgcgtgttgcacatcagcgatcaccagtggtcttcggcactacgattctccaactccgaacaggacctggaagaggagactccgcagctgttcacgcttttctgaatgaagaaagtgctacaaaccgcagaaaatggcccttcttgagaggctatcaagtctatcaagaagggtgaatgctaattcccaaccatcaaatcaatccccgatgtgatgcaacaagtctatcaagaagggtgaatgctaattcccaaccgagtatcaccggatgctccgggcgatgcaagtctatcaagaagggtgaatgctaattcccaaccggtccgggttcctcatggtgggccgctcaagtctatcaagaagggtgaatgctaattcccaacgaaacgagcgtggtgtcgtggcccgcgtcaagtctatcaagaagggtgaatgctaattcccaacctttcacacagcaagccggactccgcgtccaagtctatcaagaagggtgaatgctaattcccaacctcgtggagcggtggacctaccggcaggcaagtctatcaagaagggtgaatgctaattcccaactcaacgcccacgtggtcttatgaccaatacaagtctatcaagaagggtgaatgctaattcccaactcgtgcgtcgccgggacttgcacccggccaagtctatcaagaagggtgaatgctaattcccaacaggtggtcgagtaggtggtcggtgaagtcaagtctatcaagaagggtgaatgctaattcccaacccgacgaggcgcaaacgttcggcggcatcaagtctatcaagaagggtgaatgctaattcccaacgaagcactcgggtactgttcgtgacgtttcaagtctatcaagaagggtgaatgctaattcccaacgagtcccgaggatattcgcgaggatacgcaagtctatcaagaagggtgaatgctaattcccaacgcgtgtttgtgtgtatcgcgcgtaggtacaagtctatcaagaagggtgaacgctaatttccaacccgtatcctgcgtgaattcattgctgaattgactgtctcttagacccgtttcgtggccggctgtattgcgattatggacgcgctgcgtgcgcgtcatgccggcccgcctgtcggcttgcacgttgcctacaagcagctccgccgcttgcttcacggcaacgccccgacaagaggaaccctgacaagaggagtcaggatgagaccaacgaattttccggcgcgagatgttagacgctcggccgcgccatcatgaaccgactcaattgcgccgctctcccgcaccacttcagccatgccgcccggttgcgcccctgtctgtgcccccggcggtgccgctcaacgcaattttcgtcgattttggcgttgagcggcacgacgatacgtcgttactgcctcgccgtcgttttgacatgttgtcaaaacggctattttccaacgattctgcaatagccagtattccaaaaactgcctctgccgccgccttgtctgccgttcaacgtaaaaaatcgccgaaattgcgttgagcggcacggttttctgccactcaacgaacatcaaccgattgacatgcgctgagtggcaaactcatcgcgcatctcgctccgatccggcccgcgaagcgggtctggggggcagtcaattcaacaatgaattcgcaccgtaggatactgccggggcaagcaagccagtcggcgacaaatctattgccgattcaatgtgtggtatgaaaactatgtggtatgaaaaaccgggtatcgcggaaccgtgtgggaaacgcgatacccggctggggctagtgctgatcagctgctacttcttggtgatgtagccgagcgccttgagcatctcggcgcattcgagggcgccgccggcggcgccgcgcagcgtgttgtgggcgagtccgacgaacttccagtcgaagatcgaatcctcacgcagacggccgatcgacacgcccatgccaccctcgtagtcgacgtccagcttgacctgcgggcggtcgtcctcggtcaggtactggatgaagtgcttcggcgcatgcggcagtcccagttccgcggcgcgagaggtgtagttgaccagacggtcgatcagctcctccttcgtcgccttcttgccgaagttgatgaacacggtggcggtgtggccgtcgagcacgggcacgcggatgcactgcgaggtgatgcgaagcggtccgtcgaacggcacgatctcgcccttctcgtcatccacgtgaccgaagaccttgagcggctccttctcgctcttggcctcctcgccggagatgaacgggatgatgttgcccaccatctcgggccagtccttgaacgtcttgccggcgccggagatcgcctgataggtgctcacgaccacctcgtgcggctcgaactccttccacgcggccagtgccggcgtgtacgcctggatcgagcagttcggcttgactgcgatgaagccgcgcgtggtgccgaggcgcttgcgctgatgctcgatcacggcgaaatgctccgggttgatctccggaacgaccatcggcacgtccggggtccagcggtgggcgctgttgttcgagacgaccggggtctcggtcttcgcgtagcgttcctcgatcgcgcggatctgatccttcggcatgttcacggcggagaacatgaagtccactccggcggcgaccttctcggcgtcatcgccgtcgaccaccggcatatgcttgacgtactcgggcatcggcgcttccatcttccaacggtcgccgaccgcctcctcgtacgtcttgccggcgctgtgcgcggatgcggcgagcgtggtcacctcgaaccacgggtggttctcaagcagcgtgatgaagcgctggccgaccataccggtggcgccgaggacgccgaccttgagtttttcggacataacaacctcttggaatagatgggtggatacaacctgacgtaaccgtcaattctacggaacacatcatggctccgggccgtttgcccgcatggtgactggttcgccggttcccggcacggcggtaggctgtaagcatgtcgattgcatcggaagaagcgaagaaccaactcgatcgaatcgtagcgttgggatacccggatgtggcggatatgagcgcggcggcgttccgttccctcgcgcgcccgctgatcgaggcgctcgagcagtccgatctcggcgcggacatcctgctggtgccgacgcgtgagctggtctcgcccgaatcgttgatcgcccgaacctcgatcaaccgcatggccggattcacgacgatgccgccgcgcgacatcgccagcttcctgccgcaggacggtttcgagccgccggagggaccgttctacctcgtcgtcgaaccgcataccggcacctgctacatcaaccgtgagccggacgtggcgcgtaagctcatcgactccgacgagcgtatgccgctcacgctcgaggaggggctggcgatcgccacgcagcatcctgaatggctgctggagaagaacggcttcaacctgctcggatcgcgttcggccgacggacgcgtgccgagcatctggatgagccagaacgcgccgaggctcggcgccgtatggccgaactcgcgtcacacatggctcggcaacgcctactgcatcgcccgccgaggagtgagcctgtttcggtagggggagccgaacgcggtaggctagtcggggagacatcatcgagaaccatgagagagaaggtcgaagatgttctgtaccgcttgtggcgccgccaatgacgacgatggcaggttctgcacatcctgcggatcgccgttggaccatccggaaccgacgggggcgtcagaaccgtccggcccgacagctcacgagccgtcgtcgtcggggatcccgccggtcggaccgggtggtccggtcggcccggtaggcggcgggcccgcagccggtgcggcccgcaaccgtctgccgctgatcatcgccatcgtcgcggcggtcgtggtcgtcgccggcgcgatcgccgcgttcctcacctaccgtgcggaactgtggggcggcaaggcgctacccgatcccgcatcgatcacctcgcaggtctcctcgaaacagaacggcaaatcttcggtcacggccaaagccatcgcggatgccctgcacgcgaaaggcctcgcaaccacaaccgtgcgtgaattctccggcgaaagtcgcggcgcattcctcggctacgtgggcgcgaaacccggcgagcgcgtccgcgccgacgtcaccgtgaccatccgcgaatcagccggaccgggcgtccccagaaacgtgatcggcaagcgcgcggagcagaccgtctcgacgctgaacggcatgggcgtgccggtccactacaagcagatcatcgtcaacgatacgaagaagatgccggaggggacgatcatcgcggcgtatcccaccgcaggacaggcggtgtccgaagatggcaaggatgacggcatctacgtcggagtcgccacgaaggggaacggcatcggagccgatatcgtcggcggcgatcgggatgccgtgcgatcccagctcgaatcgaagggctataaggtgacgctggtgccgcgattcgcgtccaaggatcgcatcggcaagatcaccggatcgaaccccgcacccggatcgccggtctcctcgggcgccgcggtcaccctgtactacggcatcgacgcgagcggcgtgaaggaggcgtacacgatccacaactcgccggagaccggtgccgccagcaacatgctcggcacgtcggcggtggcggccggaacgtggtgccgcaacgacggtgactgcatcacgttcgacgccggagccgagaccgacagcgcatacgacaagggcagcatcacgtaccagaagggacgcgacggacaggactacggcgaatacggcggactcgtgtcctgcgacgcgatccagcagccgtactgcagcaacgacagggccgactacctgatcacgcagaactacggcgcgttcgaactgatgccgcgcgagagcctgaccgactactggtgcggcgaacggcgcgtggacacgaacggggccggtatgggcgcgtgcgtgaacgggacgctcgaccagaacagcatgtcgtcgacgtactccggcgccacataccgcatgcaggactacttcgtagtcgtaccggtcggatccgaccttgaggggctggaaggcacgggattcttcgacaaggatgcgctcgccgatgcgaagaagggcaaggccgtggacacggatcggccgttcctcctgtaccgcgatccgaagctgtattccaagaccagcgtgccgatgaccgacacgatggcgcagaacccgttcctgccgttcaacggatacagcggcagcagggatgcggtcatgaagatgaagcccgcaccgagcgactcgagtgtctactatctggtcgagcagggtggcgactacgactggcagtcgctcgccgatgccacggtgaagggtgccaagacgaccgaggatgccgattcctcgtcgacgggatccaagcagtccgaggaatccgccgaatccgccaggaagacgtacaccaatgatgagatcatcagcgcggccgacaagggcgatttcactcctatcgccggaacctattgcctgaagtcgggcaagagctgcgtcaccttggacaagaccggtgcgctctcgctgaagagcggtgacaagccgctcctgtacgagcatccgacgaaactgcggtatcgacccgacggttggagcgcgtataccggtggtacgacgcggtttctggatctgaccgctccggatgacgactatcagtgcaccaccaaggacggggccacccattcgggtgcgttctgcgctagcgacgcctatttcagccaaggcggcgatgaggccaacatctcgcagcgtccggtgaatccgctgtacatcttcaagggctcatcatgcgacatcgccaacggtgatacgccgttcgatcccggacagggcgtgatgacgttcagcgcggacaggccgtgcctgtacttcatggggtaccacatgaacaccgcacctaccgagcagaccgcgtattacctgcaggagtgatcaagagtgatgaagtaatgagaagggtcttaagggggttgagacccttctcagacccttctcagcgacgccgtaggaggtgacgcagggggagggtgacggcgtagagcagggcgccggcgagggccgcggtggtggcgaagacggcggggcggcgcagctggtcgcgggcgctgacgccgtcggtgatgcagtggtcctcgaaccagacgcgcagttcgttgtgcgaatagcggccgaccagttcgccccacgtgagcatgcgcgtggtgtacgtggacgggtgatcctcgtggaactcgaacaggcggatgccgcgcagtcgcgacttcgggccgtagcattcgaatccgcaggtgggcgcgtatcccagatcgatgccgtcgtcgtgtccgacgaacgagttcttgtgatcatggccgcagaagagggcgaagtagccgccggcatcgcgcatcgcgtcgacctcgcccacgttctcgtcggcgcatccgatgccctcgccaaggcgggagcccggacggcactttgattcatcaagcacgaagcaccgtccggagaaggtgcgcgatccctccacggcgttcggcgtccacgccggaacctccttcagcacgtcgtagaactcctgcggcggaatgtgctggaaggcgatcgcgggcaccggcttgccgtcgccgttgcgcgcggccagttcgtgctgcacgtccgccagccaggcgatcgcctcgggggagggcgtgccgtagccgtcggagtcggccagatcgaggccgcgggggttcgtcgcgtacagcggatactgcgcgtcgcgctcggcgggggtgtccttgtccgcgtaatcgcccgaattgaccatcatcacgctcatcgcgatatggccggaaccgtcggaggattcgaccggcatcgcgaacgtgcccggctcgaatgcgagcggatcggggcgcggcgcgtcgggctcgtcggaggcgggcgccggcgggttgaggcagccggggaattcgcggtagatgtcgtcctgctcctcggcgaggatgccgcactggaagtcgtggttgccgtaggtcgcggcgaacggcacgccggcgtcgacgaccggtccgaggaacgcggcgaacgtgcggcgcaccttggcgcgcgtctcgtccatcagatcggcgggcgtgatgacgtcgtcgacgggcggcacgtcggggttgtggcgttcggcgatgcggcgcttgacgccctgcagcttcgcctcgatctcggtgatgacgcgcacgcgcgcgcccggctgctcgccgcggcggcgcaggaacgtgtcgatgtatgcggggtcgtagccgcggatctggtcgccggtcagcaccaccagatcgggatccgccttgcggatcgcctcgcggatcagacggatcgtgtcgggatcgacctcgggcttgtcctggatatcggccatctgcagcacacggaaggtgccgtcctcgcggaatcgcagtgtcatgactccaatgtagcgcgaggtgtggcgcgtgatggcggctgcggcggggcggggcgcggcgcacgcacggtggagtcgcgcggtgtgatatgcgagacattaccgggggaaaaccgacgaatcgcgcaacattgtggacccggcgaggcgttggggcgcgcggtaggtaggatgggggattgcgcatgttacgtatgcgtaaacgaaccacagacgtctgatcactgtcatatggccggcagagacggccatgcaccaaacgccgtgtaccaagcaaaggaggaacgatgggtcaggatcaatcatcggtattcgatctcgccgcggtcgccgcggcatccaacggagggaacaacgacccgctgctgcctcccgcacgattcatcggcgacccgcagaagccgagcaagatgccgtacaccaagtacgtcgcctacgacaagcaggtgccgttcgactacccgcagcgcacgtggccgggcaagaagctgcagcgcgcgccgcgctggtgctccgtcgatctgcgtgacggcaaccaggcgctcgtcaacccgatggactccgagcgcaagctgcgcttctggaacctcctggtctccatgggcttcaaggagatcgaggtgggcttcccgtccgcttcggagaccgatttcgacttcatccgcatgctcatcgaacgtgagctcattccggacgacgtgaccatcgtcgtgctcacccagtgccgtgagcacctgatccgccgcacctacgaggcgctcaagggcgccaagcgcgcgatcgtgcacttctacaactccgtctccgtgctgcagcgcgaggtcgtgttccgtaagaacaaggaggagatcaagaagctcgccaccgacgccgccgaactgtgcaagcatctggaaggcgaggccgagggcatcgacctgtactacgagtactcgccggagtccttcaccggcaccgagccggagtacgccgtcgaggtgtgcaacgcggtgatcggcgtcatcaagccgacccccgagcacccgatgatcatcaacctgccggccacggtcgagatgaccacgccgaacgtgttcgccgacgaggtggagtacgtctccaacaacctcgacgaccgcgactccgtggtgctctccctgcacccgcacaacgacgagggcatgggcgtggccgccaccgagctggccgtactggccggcgccgaccgcgtcgagggctgcctgctcggcaacggcgagcgcaccggcaacgtcgacctcgtc

SEQ ID NO: 566 - DNA, 23411 bp, synthetic construct
  misc_feature 1..23411: note = Synthetic
  source 1..23411: mol_type = other DNA
ttcggcggcattctggtgatcagctggttcgaggtgcagatgaaccgcatcgggcatggcaaacgccccgatccgcgcatcggcggcctgcgcgcgctcctgttcgccgtcgggcagcacggtcccgccgcgctcgccccgcgccgccgcaagggccgtcagtgaatcagcaaccacatcggaagccacacgaatcgaaggagccgtcgaatgaacgggattcaaaccagaaccatcgccatagtcaccggtgcgtcgtcgggcctcggcgcggcgttcctcgaggcgatcgtcgcgcgttaccgcaatctcgatgagatatggatcgtcgcccggcgcgagcggcggctgcgtgcgctcgctgggaagtacggcaactcgcatacgcgcatccgcaccattccgctggatctgaccggtcctgacgcatatgggacgctgacgggcatgctggaggacgaacggccgaacatccgagtgctgatcaacaacgccggatacgagcgcgagggcgtgctgcgagacatgagccccgcagacatccgcgccatgatcgatctcaacgtgacggccatgacgatggtcagccgcgtctgcctgccgtacatgggcaggggaagcttcgcggtgatcaccggatcggtgtcgcccttcgctccgatcccttggcaggccgtgtacgccgcaagcaaggcgtacgtgcggttcctctcccgcgcgctgcatgaggaggagcgcgagcggggtgtaaacgtgctgctgttcagccccggcaatatggacaccgagatgaacgtgcgcggcgccgtgtccggcaagcttgcccgtctgccgtatctcgatctgaggagggaggccgtgcggacgctggcccgtgcggaacgcggatgcgccacgtatacgccgctggccttctaccgactgtaccggatattcgccaaattggcgccctccgcgcttgccgtccgcgtgaccagtctgaagtcgggcggagccgcggctccgcctcggaacggcgccgtcaccgcggcatccacagcgcaagcatgaccacgccggcgatgaagtccacgacgctggctgcggcgaacgagacgagcacgatcatgcggccatggtccttccgcatgtatgcgtgggacggctcgaacgggtcgtacaggacggtcgccttgtcgcccacgtggaatttgctcgggtgcgaccaaatgcccgacttcagctcgtagttatgacccccgaccgtgtaggaaaacacgggcgaccacaacgtgccgtcgttgtcgtggcgttcgcgcagttcgctcacggtgccggtcgtttcggccgtgcagcgctgtcgggaatccctcgtcttgcgtatgagccgcaggcagacgccgaagacgacgagcgagacggcgatcatgacgagcgacacgatgagcaccggtgtttcgtgccacgaaccggtggaggtgctttcgactgcctcgatcataagttcgattatccccgcgccgcccgtgtgccgtgcgcggcgaacatgaactcggcgtgaattatcccttcgttccttccagccaatcctccagacggtcggcgtcggcgcggcggatggcgtggaaattgagggcgttggtgccgttgagcacgaacaggggcatgtcgacgcgctccacgccgtgcggttcgcgccacagcgtggtcgcgcgcgcgaagctctgcacgcggggccggcgggtgacgagcgtgatgagggtgagccgttcggcgcaggtggacacgatgcggtggggaagcgcctcgggagcgtccccagggatcgcgaaaccgtcgacgcgccatttcagcgcccgtgtggccagccaccacagcatggcggccggcaccgcgacggccatgagcatcacgggcagcggcatgcgcggggcggaccggaaccatgcgaacgccgccgccgtaagtgcgcccgaggcgaggaacgctacggtcggaaccatcagatagtagcggcccagcccgcgcccggtcctgcgcgtgctgaccggggccagtccccattccggcaggatccgcgccatgacgccgtacacctgcgccgcgcccaccaccggcagcagcgtcgaggcggattggtcgtcgtcgcggtcgtcgtcatccccgtttccgccgaccgtgccggacgcgctcaaccccacgcgcaccgagcgcaggcccagcagccgtcgcagcacgttgcggcgtatctccacgctctggatgcggctgaccggcagcgtggtcacccgacgcgtgaccagtccgcgcgaaatgaccagatcgtcgccgcgacgccagatcgcaaaaccgtggaagcgcaggaacgcgctcacgaccgacaccatgagcagcacgatcacgacgaacagcgcggccagcgcgatcgccagcgcgccgcgggtcatgacgcccatgacggagccggcggtcgcccgcgccacgcgttcgggcagcacgtcgctgatcttctgccagaagccccacagcaccagcgcggaggcgaggagcgtcacgtcgctcagcgcatagagcaggatgtcccgcccggtggcgcggaagaccggctcgcagtccggcactgcgtcgggcttggagggtgccttcatctccggctgccccgcgtgtcgaacatgttcggcaccgttgttgcgcccgctgccggcattgttctcgaacatgttcgattccgtgcccgcgttggcttccgcatcctcccggaacgccgcagccctgagccgctccaattcgagctgcacgttctcgcccacggcgtccagcgtgatgtccgcctcaccgccgcccgcggacaccgtgaccgtcaccacgtggaacggctgcaaataccacggtgacgcgctgccgatcgcgtggatgcggtcgtaggcaagcgaccggcgcctgcggaagaacagtccgctcgtccacgcgagctcccgcgcgcccagcgcataccgcgtggtcatccatcgcatgaccggcggccccagcgcgatcgcgcagccaatgcccaccgcggcggcgatcaggatcacggtcccggaggacattccggcgagtgcgtcggcatccgagtcggtgtgcgacagcccgcgcgccgcgatgatcacgaccgtggcgatcacgcccacgcacgccttggccgaccgcgccaaagcgaccacgagccccgcgggatgcagtcgacgccaccggggctcctcgcgcccatccgccgccgacattacaggtcctcccgcgaacgcgccacgcgattggtgatgagatccgtcacgcgctccgcctcggcggtttccagcgcctcgatcgtgtgcgcatccaccgccgtgtgcacggtgacggccgtcagcccgtaatgccgcagcaccgggttctgcctggcgtccacgtgttggatgcggttgaacggcacgacggtggtggagcggaacagccatcctttgcggatgcgcaggtcgcgctctccgatcgaaaaccggctgaacgcgtacgcgtaacggttctgcagcggctgcgcggccaatcccgccacaccgtacgccaccaccagccccaacgcgaccgccggccacggccacacgccccaccagtcgtacgccatgccgatcgcggcgaccgccccgcacacggcccagacgatcagggactcaatgacggcgttgaccgtccacacccgcgtgacccgatgcggcaatgcatgccacgcggcgtccccgtgccgcccgccgccgtcgcgttccgttgtcgtcgtcgccgttgctgctatcccgcccgcatccgcggcggacggtccatattcgttgcccatgcctcccaccataccggcggtgccatgcccctccgcccatcggtacacgcccgtggacagaccgggcgcaatactggacgcggggcgcaaagcacggttgcatgggaatcgacggcaacctgatcggaagcgacctgcgaaggagcgatcatgaacaatcccaatcccaacccatacgtggcgtacagccccgacgatccgcggtcgacggagggcggcgcgcccgcgttggacgacccgtactacggcatcgggttcggcgcggcggtggcgcggttctggcgcaagaccttcgtgtaccgcggccgggcgtcgcgcggcgaatactggtggggcgtgctgttctgcttcgcgacgacgctcatatgcagcgtggtggcggccgcggcggacacgctggtgctgaacgtgcccctcgacgacgaggggccgatccattcgtgggccacgctgatcctcaccgttgcgctgttcgtgccgttcctggcggcgtccgtgcgccggctgcacgacgagaacctgcgcggctggtgggtgctgctgccgctggcgcttgagatcgggtacctcggcgcggcggggacgaccatgttcgccgccagcgcgtccggtgcggcgatgggcacgctcaccaccgtgctgctggtcgtggcgtatctgctgagccaggtggcgctgttcatcctgccgccgaacccggccggcgctcggttcgatgccccgcgcacgcccggcaggtgaacgggatgggcggaacggacgagatgggcggaacgggcggcgcgcccccgcgatggcgtcgctggtggcgcgaaccgcatttcctcgaacgcacgcgcatgctgggcgtggcgctgtgggtgtgcgcgctgctggtcgtccagccgcattccgcgttggacgccgcggctgtgctggtcatgctcgcggtgatcgtgctgctgcccgccgcgccgcgcgtgatggcgccggtggggctggcggccgcgctggcggcgtgcttcgcgccgggcggcggaacgacgttggcggtgacgatcgccctgttcgccgtgttcctcacggccggatacgtttgctcggcccgcgcctgcgtgcccatggtggccggatacgccgtggccgaggtgacgtgcggcgtgctgtggggcgcgtcgagtgcggcggtcgaggggctgaccgggttcgtggacgggttcgccgcggagacgggcggctcgttcgccggcgcgggcggcgtttcgccgtggcttgtctggccgttcgccgtcgcgctgtcctgtctggtgagcggctttctggcgttgttcgggcactcgttccggcgcaacgccgtggcgggggagcggctcgcccgcagcgaggccatggtcggccggctcacgcgcgagcagcagttggcgcacctgatccacgattcggtggccaatgacatgtccgtcatcgccatgctcgcttggcgcgccaagacggggccgggcatgggaggcgggaacgacgcgtccgcggccgatggggacgccggctcgggtgcggatctggacgccgcgctggacgcgatctacgaacgctcccaccatgtgctcgaccgcgtgcacgaggtgatcgacgtgctggatggcaagcgcgcgctcgccgatctggacggctccgacggttccggcggttccgacgccggcatgcaggccgaaaacgggtcgaccgaagtctcagagccggtcgggctggccgggttcgtcgccgaactcgaacggtacttagaggaccaggatcgcgtcatggccatggtcggcatgtccggcgtctcgcgcgtgacggtcgaaggcgacggccccgaccgcccggtcccgcccccgcaggtgcgccgggccgtcctcgggttcgtggaggaggtctatgccaacgtggtgcgtcatgcggcgtgggaggacgcgccagacgggcgtgacggcggctcggggaacacctacagtctgttcgtcaccgtggagccgcatcgcgtccgcatcgccgaggtcaacgcgatcggcgacggcgcgtcggccgccgtccgcggcacccggcacggcaggggactggcgttgcagcgcgaaacgatcgcatcgctcggcggcacgctcaacgccgccgcgcaggacggtacgtggaccgtcgccgcggagatcccgatccgctgatcccattcccgcaccgccgttcctctcccattcgatccaacctacgccccacacggcgcacgttggaccgatcacgcaataatccgcctccgatcggcccgttttttcgcatgatcggtccaagctgcactttccgagatgcaggttggaccgaatgggacaagtcgcacgctaatagtcagcggattctgggcacgccagcacgatcgagcttgaaccgcaccgtggccggttctcgctcgcattcgagaaaggtggtccgcacgaatctgatgccgtcgtggagtctaatgttgtcctcgcgctccttttccgccagcagcgcgtccacgccgtccccatcgccgagcatgaccggattggcgtatttttcacgtccgtccaattcaagcacgatcatgtcgccgttcggcagaatccaaaggaaatctacccggtagcgtctgccccggaccggatcggtaatccactgctgcaataggggaaccgcatagccccactcgatcagcagtgcgcgcacgatcgattcgccgccgttgtcactgcgcgcgtccatgtagcgggcgacctttcgcgcgttcgtgatgcctttgaacccacggtgatcgtcaaggaaggaaccgaactcgtcgtcggtaagccggtgcaatcgcattgccgcgtcgcctatcgccagcgcctgcgggaaagacatcatgcgagcgcagtcgaacacggtctgcacaagcgtcgtgatccgaagtccgtcgcggaccgcaacggtcagcccaggcacatgatggaacgtgaagtagccgtgatcgcggctgtggctgcgcagatcggtcgcgaaatggacccggtcgtgcaaccggtacgtctcgctcagtccccagaccgccgccgcgctgacttgcgccaagacacgatcaggatgggcggcggccaccgtgcgcaggatgtgcaaaatccgttccgcgtacggcaaggcggaccaatatgctggtcgggcgaacaaatccggtctcacagcgatcaattggcggcgttcggcacgatatcgcagcacgcgcctgccgtcggcgttgcgcgcccgcaggcacatgccggcgcgctcggcctgttccagaagttcgttcagtcgttggtcgtggttcatgcggaaacggtaggcatgccggcactgttttgtgaagccggatcggggcatgtgcgcgaacgtgacccccgcttcgcgcattctcgcgtgtcgcgcccgccccctgtgcataagtctgtgtatccgttcgtgtacccgtctgcccgcgcatcttttctaccctcggttttgctcatacggtccaatctgcatcctgctcgaagcgaattggaccgatcgtgcgaaaaaccggacagatcaggggcggattatcgcgcaatcggtccaagctgtgatttccggtgtacaggttggaccgaacggggaaccggaggacgggaagacgggaagaacgggagaacggcgcgggttcagcggctcaggtagatggcgatggcgtgggcgagcgacttggcgccgagcttgtccacggcgcggtgggcatgcgtgcgcacggtggccggcgcgatgccccaccgcgcggcgatctgctcgtagctcaggccttgcgcgagcagccgcagtgtctcggtctccttggcccccagcttcacccgcccgccgcccgcatcggaggagagtcccgcggcggcgtcctccaaccgccgatgcgccggcccggcggtctcgaacggagctgccatgccggtcggcgcgaacgttccgcccgccgtcaccgcgcgcatcgccgcggccatcgccggcacgtccgccttggagacgatgccctgcgcgccggcctccgccgcccggtccgcgtacgtgtccacggaaaacgcggtgacggcgagcaggagcacccggtccgtgcggcggcggatccgacggcacacgcccacgcccgtgccgtcgtccagcgacatgtccaccagcagcagccgcggacgcgtgtccggggcgagggccagccgcacggcctcgccggcctccgacgcgccccacagccatcgcgcgcccggcagcagctgcggcaggatcccgcgcatcgccatcagcgccatccggtcgttgtccagcgcggccaccggaaccgccgtcgtatgcccgttcacttgcgacggctcacttgtggtacaggctcacgcgctcgtacttcggctcgcagcacacgttgatgccgagcctgcggtacagcgcctcgtcggccgcggagatgatcaccgagaagaacgcgtcgcacccgcgcagccgttcgagcccgccgatcacacgcgcggccgtcgggtcggtggcggagctgatggacagcgcgatcagcgtctcgtcggagtgcaggcggcggttcgcgctgttgagatgctcggtcttcagccggcagatcggctcgatggccgcgtcgtcgatcaccgtgagcgcgtcgtccacgccggtgacggccttgagcgcgttcatgagcagagcgctcgccgcacccagcagcttgccggtcttgccggtgaccacgcgcccgtcgggcagcaccatcgcgcccgcggggccgccggtcgcctcctccttgcgcagggccgcggcccgggcgggggagaggtcctcgtccacgccggccttgcgcatgatcgagcgcagacgctccagctggtcctcgtcggccccggtgcggcggaagcggaccgccgcggtgaagaagcggcgcacgatctccatgcgcgcggcctcgcggcacgcctcgtcgtccgtgatcgcgaagcccaccatgttcacgcccatgtccgtggggctctggtaggggctctcgcccatgatccgctccatcatggccttgagcacggggaacgcctcgacgtcgcggttgtagttgaccgtcgtctcgccgtgcgcctccaagtggaacgggtcgatgatgttcgcgtcgtccaggtccgcggtggcggcctcgtaggcgatgttcaccggatggttgagcggcaggttccacacggggaacgtctcgtacttggcgtatccggcctcgacgccgcggcggtgctcgtggtagagctgcgacaggcacgtggcgagcttgccggagccggggcccggggccgtgaccaccacgagcgggcgcgtggtcttgatgtagtcgttgcgcccgtagccctcgtccgagacgatgcgcgcgatgtcgtgcggatagccggcgatggggtagtgcagatagcaggtgatgcccagctgcttcaggcgcctgcgataggcgtccgcggccggctgggccgcgtactgggtgagcacgaccgatccgacgaggaacccgtgcgcgcggaacacgtcgatcagccgcagcgcgtcctcgtcgtacgtgatgcccagatcgccgcgcatcttggccttctcgatgtggttcgcgttgatcgccaccacgatctccacgtcgtccgcgaggctctgcagcatgcggaacttggcgtccggcgcgaagccgggcagcacgcgcgaggcgtggtggtcgtcgaacagcttgccgccgaactccaaatacagcttgccgccgaaccgcgcgatgcgctcgcggatcctggcggcctgcagctcgatgtacctgtcgttgtcgaatccctgtcgcatgcggtggcgatcccctttcaagcgcgatgtcgtcgtggcgtgacgattgtgacgattataacggagcgggccgggggcggggcaatggacaaccgcggtgtcctagaaaaggatcagacgacggacgatttcgtaccttatcgcatacatagctcgtatggcgtgtctgagaggcgtgacgcatataatgaaaatgctaattctcaataagagcggacaagttagccgctttgattgctagcagttttctgcagggacgggttttcccgtcccgttttttgtaacgatgtatacttaatggcatatcggggagaatcttcgaggaagaggatatacatgtccgcgaagcggtatcgcattggcatcgatgtgggattgaattcggttggtcttgcggcggtggaagtcgattcagacggcatgccgactcggcttttgaacgcgcagtccgtcatccacgatgggggagtggacccaacaaaaaacaaagaagcgatcacgcgtaagaatctatccggcattggccggcgcgctcgtcgtatggtgagacgcaagcgtcggcggctcgcggatctggatgcgcttctgcagcggcagaaatatcccattgttgatccgggcgaattctcgtcttcgatcgagccgtgggtggcgcgcgccgatctcgcggaccatttcgtcattgacaatacagagagaaaacggaagctctccattgctctgcgccacatcgccagacatcgcggatggcgcaatccctatcatcgcgtcgattctttgttgatcgacaatgagtattccgaccaatacgaggaattgcgctctcgtgtggaaaagcatgtacagcggacggtaccagacggtttgactccggctcagttggtgatgcgggcggttgcgctgggcggagcaacacagcgtctgcgaacgagcaccacaagaggggtgggaatactgcccgaaaaactcatgcaggaggacaacgccaatgaactaaagcggatttttacgatgcagaggattccccgagaacaatgggagccgctgttccggttggtgttcgcagccgtttccccgagaggctctgcggaggaacgagtggggaaagaccctcttgatcccacgcagcagcgggcgttgaaagcctcgttggcgttccagcggtatcgcatcgtcaacatgatcacgaacctgcgtatcgccgaaaatgatcgacagcgaccgctgaccatcgccgagaagaatgatgtgttcgacatgctgtccgccgattccatgcaagacctcaactgggtggacgtggcggatctgctgggtgttcgaagaagccagctccggggcgttggctccatgacggaggatggggaggagcgagtgacgaacacgcctccgcgtttggtgtcggtgcagcgtcttcacgaggcggatcggaaaattgccaaaccgctgattgcatggtggcgatccgcatcggacgatgccaaggaggcaatgatccggttgctgtcgaatacggtggacgtggacaaggtcagcgaggatccccgttatatggaagtgatcgcgttcttcgacaccctcgacgaggacggcttggccaagcttgattcggttgatcttccttccggacgtgcggcttacagtgtgaaaacactagagtgcctgacccgtcgcatgctgaccaccgacgatgatctgcatgcagcccgaaaagcgatcttccacgtatcagattactggcatcctccagtcgatcccattgccgcgccgttgggtaacccctcagttgacagagtcgccaagatcgttggtcgatggttgaagaattgcgaggaccgctggggcatgccaaagagcgtgcaaatcgagcatgtacgttccggttttgattccgtggcaactgctcggcagtatgagcgccgaaccggaagccgtagtgagtaccgtcgcgctgcagctgatcgtttgcacaacgaggaacatttggatcgaatccgcgattccgacatccgtcgtttggaggccattcaacgtcagaatggggaatgcctctactgtggcagagcaatcgcatttcgcgcgtgcgaaatggaccatatcgtgcccaggaaaggcgtgggatccaccaatacgcggacgaatctcgccgcggtgtgcatcacctgtaatcgggcgaaatccaagttgccgtttgcggtgtgggccgcaaccgatgcagcgcaagcactgggagtgtccatgaaggacacattggagagagtccgctatttcaaccgggatgcgaggctgtatgatgcctccagctggcgaggattcaagcaagccgtgataaccagactgaagcagaccgaagaggatgaccccatcgacagtcgttccattgaatccgtggcatggatggccgatgagcttcatcagcgcatcgactggcattacaacgcgacacggtatcaatcggatgaccggaatctacccgccgacaggaaagtcagcgtttgcgtctttcggggacgtgtgacggccgccgcccgtagggcgagtggcattgagggagcagtccggttctttggccctcacatgaagacacgtctggatcgccgacatcatgccgtggatgccgcggtgattgcgatgatgcagaccggagtggcgcaaatcctgatggagcgagaatcactgcgcgagtcccagcgtctcatcggcaggctcgctcccgacgaacgtccatggcgtgagtatccctatgagaagacggcgtcgtatgacacattcatgcattggcatgacatcatggtgagattgctggatctgctcaacgacgcactcgatcatgatcgtattgtggtgcggcagcccatgcggctttccttgggtaattccattgcccatgatgcgacggtaaagtccttggtcaaagtacgtgtaggcaatgccttggacgcagatgtgatccgtcgcgcatccacgccagcattgtggtgtgcactaacgcgtcttcctgattacgatgaaaagacgggtctcccggaagacgatgcacgtgtcatcatggtgcatggcataagatatggatccaatgacgagatcgaggtcttcgccggccaatccgctcagatagccgttcgcggcgggtcctccgacattggctcggccatgcaccatgcccgtatatacaggtgctggaaggcgaatgccaagggtgaacgcaagtattggtacggcatgatacgcgtgttccagactgatcttctacgtgcgcggtatgacgatctgttcacggtgccgttgcctcctcaatcgatttccatgcgctatggcgagcctcgaacggtggctgcggtccagtcaggcaaggccgaatatctgggatggctgtgcgtcggcgacgaaatacgtattgatgtcggtagagtgccgggtaagggccagatcggagagttcgccaaatggtgcgccgggttggatcagcgtaatgcagccgtggaatcgtgggtggttgacggactgtttgcgccggccaagctccgactgcatcctcgtattattgctgcggagggcttgtcaaagattgaggacataagtgctgttcctgatggagcgggaaaagttatcggaggtgcgggatggctgccttccatcgattcgcttgctggcactcatcctgtggtcattcgacgcaataccataggcgaacagcggtggcattcgaagtctggattgccgtgttcatggcgttggacgaactgagggatcgatcatgcagagtcagtggcgtgtcatcgattgcacggaactggaaggcagtatctcctacatacgcggcactatgcgcgtgaagcgcgatgctgactccagcgcgactgatgtgccactggctcagacggccgtggtcttgattggcctgcgtgcgcgctgctctgctgcggtgctgcatgaaatggcgcggtacggcgtgtccgtcatgctgtgtgattggcggggcgttcccgatgcggctctccatgcttggaccgaccaacccacgacggtggccgcgcggcaattggcgcaggctgatttgtcattgcctcgacgaaagaacgcctggggacgaattgttcaggcaaagatccgtggacaggcggcctgccttgacgcattgggacttgacggagggggcattctgcgcggcattgcagccatggtgcgatcgggggatccggcgaatcgcgagggatacgctgcttgtgaatattggaggaggatctttcctaatgacccggagttcagacgagttcccggtagtggcgccggacggaatgcgcagttggattacagctataccgtgctgcgcgggttcaccatcaaggcagtaatctccgccggcttgattccgtctttgggcgtccaccatcgtcaccgtgggaactatttctgtcttgcggacgatttgctggaaccatatcgtccggccattgatcgtcaggtggccaaactgaaagcgtccgactcccttgaagatcgttcggtaaagcggcgattggttgaggcagtcaaccagcagttcaatgaagacggtctgaccatccccagttcactcaatgacttcacaagacaatatggtctctactgcgaaggcaaaatcgaccgtcttcccgtaccggagtatgcggggacattatgaaaacggacgaggacagtggcggcatgtggtgcttggtgatgttcgatttgccggttaagacgaaaaagcagcgtcaccgtgccacggaattccgcaatctgctgatcgatatgggatatgccatggtgcagtattccgtatacgtgagatacacgcctacgcaagcgggcaatcgttccactgttcagaccatcaaggagcaccttcctccggatggtcttgttcgcgtggtgcatttgagtgaccatcagtggtcgtcgtcactgcgtttttccagtttgaaacaagagagtgaaagcgaaactccggaactgttcacgcttttctgaatgtggaatcagctagaaacggcgaaaaatagcccctcttgaggagataacaagcttatcaagaggggaagatgctaattctcaacgacgagtcggtcacgtcggatgacacggcaagcttatcaagagggggagatgctaattctcaactgcttggcgaaaccctgatacgcccattcaagcttatcaagagggggagatgctaattctcaaccatgtgggcgtgggaaatgcgcgaatggcaagcttatcaagagggggagatgctaattctcaacggtgccgcgggcggccggcgtcgcgccgcaagcttatcaagagggggagatgctaattctcaactacgcgcatggtctcatatcgtgcgaggcaagcttatcaagagggggagatgctaattctcaaccgcattcctcgcacacgatgacgtgtcccaagcttatcaagagggggagatgctaattctcaacgaaatccgcgacatccgccacggtcttccaagcttatcaagaggggaagatgctaattctcaaccctcattttccttgtgaggcgtactaaaattcaccatgcctcagaatttggtttgatcacttacttttgaagcacgcggctaggtgttggtagtgcctagccgcattcttttaatcggggtatccgtccgtcagatccgacggatggcaattaagtatgcgggacaatctcaatgccgtggtaagcgtcatgttgccgacatctctacggccggtttcataggcgcttatttcggtttgggacatgcccgcccgcttggctaactggacttgggttagtccagtggccttgcgtagttccttaagtcccattggctcacctactttcggtttaggtgagtccgataatactagcgaattgtaatattcgcatgtatggggatgcactctgaagttctcaaactgcgattgtcgttgcccgatcgggcttgatgattattagcatacgctaatatccgtgggtaatcaaatcggcgtgtcgaaaaccggcacgccgattaaatgccagcaaggcataaagtttacttatcgtcagccaacgcagcatatcgggcaaccagaagatttatctccgtatccagagacgttccggcacgccgcgcaccctttcgagctttacgccacagcagacgctcggcataccccttagcgtcccaactcccttcgggaatccagaacggggtaggcttccacacataatccgtcacaatacaccgccttccttagcaacaaaagccatagtcaagccgccaccatgtccgaacgcacacgctcgggcgctatatcaatatcacccggccacgtgggcacaccaaacacaagacgaaccatattgaaccgctcaggcgtattaacctcacgaaacatgccacgcgtcacatacttggacatgtcaaacacgccacggctcccgtccgagcacgccacacgaagcctaaaccccggcaacggctcacactcggtaaccttaaccatgtaatcaaccatcatgcacccccttgtattatcgcaacggatcgatcctaaacggacgctcaagattaacggcaagctcccaatcagcctccaattcgtccacgtgcaactctatccaagcctgcacaagacgtctttgcttccgcgggaaatcaccgtccaacacctcgccgtcaaacgtaaacgcagcctcgtgaccttgataccgcacatgaatatgtggcggcacatgatcctcggggttcatcgtgacgacgataccgaaaaacatactaattgccggcattgcaccacctttcgctagtagttcccagcatatcccgtctaccttgggatacgctatagtgccttgctacggccatgaagaccgatggcaagaccgactgtgattctgtctttcgccgctcacagtcaagcgcgacgtaagccctctgtcttacgatttatcgttctcgggatcatccaacagtttgcgagggttagccacgcgcaacgcgtcacacaacttaagcgccgtatttagcgaaatttcgcctatgtcacgttgcccagtctcccaatcagctacacgcgattgagtcaggccgggtattcgctccgctagacgctgttgggttaaccctcgcttctgccgtagttcccttagacccattggactcaccgcctatagttagtagtgagtccgattgtatcaatccaccaaggggagcggccggaacccgctagggcccggccttgcgactcaaccgatatgcaagcggggcacgccgtcgaggaatacgacgacatgccaaccgtgatacaatcgcgccgtgagttcatgtatctgaccacatgaaccacggaaccggagagtcgccaacactaacgaatttcgtttcatgttgtattctcccttaaggtggtttggccccgtgcttatgcgtggggccttttacattccagtccgcaaaccgtggtttctgatgccatcgcgccgccgaaacggcccacggctcactagcggggacaattccatgccgacgatcgatacaatgggacctacctccatatgggaagtaggtctaactatgacgctgagaaaactcaggcagaagcgcgggctaacccagcaagagttagccgaacgtgtgcacggtgtcaaccagtctcgcgtcgccggctatgaaaatggccggtatgacgtgcgtaacatgacgctgggcacgctgcttgaagtgcttgacgcggttgggcaaaaggctctagcgcgtaagctccgtacgcttctgcttgaagattccacgttcggcgcggtgtccgataaataacccgagggctttgccgttggtcttcatggccgtagcaaggcactaggcgcgcccgttggttgcgccgtgggacgtactaaaagggcccgcaagcgttagcggcgcttgcgggcccaaggtacggcgcgaacaaaagttcgcgtagctcccagccaagggatactactcatgctaattccacatggttcagtaagcaagttcgttccgcacgcctcttgcgggcggatgcatgaggtgtcgaccgagtggggctggctatggttcaccgtttgtcttgacggtgaacgcgtaatcagcgttcacatggtctgatatgtgagtttgcggtcggaatggtgttccagctctctttgggtggaattcatacataatgagtcgctgtttgacgaccccacgcccggcgcggtagtcggtaataaatcatgcgtgggctgtcatcggtcttcatggccaccggctaatggccatgtgccacggcgggtgctgcgacgcgcaatgcaatgtcgtaggaacaaatatgccaagcgagaataggatgaccgaatatgagcaagctgactatggaacggcgggcgcgcaaaatcgccgccgcccggttacgggtccgaaagctcgccgaaggaatccgcgtcgtcgggtatgacgagcacgggccggtactggacattccgcaggcattcgtgcaccggccgaagcgatccacgtccggcgcgctgattctgcccgaggagtgggcggactgacattcgccgcggacgtttcaggatcgtcggtgtcgcgtgcgccccgccgggaaacatgccgcggctatcatcgggcagcagtttcggccatgcggcgcaatggcgcatggccggccccggcgcaaggaatccgggagcccggaaattcagggaggaaccgcatgcccgcagtgtcgcttcgcgcccgtcaggcgctgtacccgtccgtccgcgaaatgttcgaacgcgcagcccgcgtgccggacgccgtctccttcgcgatcggcgaacccgggttcgacaccccgcgggccatgatcgacgcggcgtaccgtgcggcgctcgccggggacacgcactacacgcccaaccgcggcgccgaagccctgcggcgcgcgtggtgcgaccaccgcaaccgggcggacggcacggactacgacccggagcgcgagatcatcgtcaccgcgggcggcatggagggcgtgctgctcgccatgatcgccgccatggaccccggcgacaacatcctcatcccggaccccggctacgcgaactacttcggccaggcgcagatggcgcaggtgggcgtggtgcccgtgccgttgcacgaggagcacggctggcgcatgcgggccgaggacctcgaggccgcggtcacgccgcgctcgcgggcgctgctgctcaactcgccgtccaacccgaccggcgcgatcatcgatccgggggagatggagcggatcgcgcgcgtggcccgcgagcacgacctgtgggtgatcagcgacgaggtgtaccgcgcgttcgtgtacgacgacggcaagccgtgcccgtccatcgcgcagatgcccggcatgaaggggcgcacgctcgtggtggacagcttctccaaaacatatgcgatgaccggctggcgcatcggctgcgtgttcgggccggagcaggccgtggaccagatgaccgtgatgcaggagaacgtcgtctcgtgcgtgcccggcgccctgcaggccggcgcggtcgcggcgctcgaaggctcggcggacatcctcgcgaccatgaaggccgcgtaccgggccaaccgcgacatggtggtggacgccgtcgcgcgcatgccgctcgtgacctgcaacgtgcccgacggcgcgttctacgtgctcatcaacgtgaaggccacggggctggacgaccgggagttcgcctatcggctgctcgacgaggcgcgtgtggtggtcacgcccgcctccggattcggctcgcgcggcgcaggctacgtgcgcctgagctacgtgggtacgggcgaggcgaccgccgaggggctgcggcgcatgcgcgcgtggcttgacggcatgaacagggcgtgacgccggcgggtgctaggattttcgcgtccaccatagcgggctggcatatggacgtacgtacgtacaccatggcgtgatggcatgcggtgcgggacggaacgagcgacacaggacgagtaaccgggagcggcgtgtgaacacggtgagggaactgctgcggcatctgggcgaattcaggcgggacaccgcgctgacgcccgtgtggatggtcggggaggtggtgtgcgagatgatcatcccgttgctcatggccacgctcatcgaccagggcgtggagcgcggcgacatgggcgtgatcgggcgcaccgccgcgatcatggtcgccgtggccctgtgcggcctcacgttcggctgcctcggctcggtgttcggctcgcgcgcctgcaccggattcgcccggaacctgaggcaggaccagtacgacaacatccagacgttctcgttctccaacatcgaccgcttctccacgccgagccttgtgacgaggctcaccaccgacgtgatgaacatccagaacgccaccatgatgatcctgcggatggtgccgcgcgccttctccagcctcatcatcgccatgtgcatggcgttcgtggtctccggcaccatggcgctcatctatttgggcgcggtcgtggtgctcggcgtggtgctcggcatcctcatgtccatcgccgcgaagtacttccgccgcgcgttccccgaatacgacgcgatgaacgaatccgtggaggagaacgtgaccgccatgcgcgcggtgaaggcgttcgcccgcgagggcatgcagacccgcgtgttcaaagccacgtccaagcgcatctacgacatcttcctcaaggccgagctcgtgctcgccgccgtggacccgatcatccaggcgaccatatggggatgcctgctgctcatcagctgggtgggctcgcacctcatcgtgcaggaccagctcaccaccggcgacctgacgagcctcttaatgtactgcatgaacatcctcatgagcctcgtcatgctctcgatgaccatcgtgatgatcaccatgtcctccgcgtccgcgcgccgtatcgtcgaggtgctccgcgaaagggacgacatgccgtccgccgcgcacccggtgaccgaggtgcgcgacgggtcggtcgtcttcgaccacgtggacttcgcctatccggccgtgaagccctccgagcacgaccccgccgcccgacgccgggccgaggccgccgcgcggttcgatggcaggcgcgacaaggctcgcaacgccctgacggacgtcaacctctccattccctccggcgcggtcgtcggcgtgatcggcggcaccggatcgtccaagaccacgctcgtcaacctcatcccgcgcctgtacgacgtgaccggcggcagcctcaaggtcgggggcgtggacgtgcgcgactacgaccggaacgcgctgcgagacaaggtcgccgtggtcctgcagaacaacgtgctgttctccggcaccatcgcggcgaacctccgttggggcaatccggacgccacgatcgacgactgccggcgcgcctgccgcatcgcgtgcgccgacgagttcgtcgaccggctgcccgacggctacgaggccagggtggagcagggcggccagaacttctccggcggccagaagcagcgcctgtgcatcgcccgcgccctgctcaaggacccgaaggtgctcatcctcgacgactccacgtccgccgtggacaccggcaccgacgcccgcatccgccgcgcgttcgccaacgacatgcccggcgtcaccaagatcatcatcgcccagcgcatctccagcgtggaggacgcggacatgatcgtcgtgctcgacgacgggcggatcgacggcgtcggcacgcacgccgagctcatggcgtccaacgagatctaccgcagcatccacgacctgcagacgcagggcggcggcgacttcgacgaggcggcgttcgacggcgtcgcggaggccggtgtcgcggaggacaaccaagacggcaaggacgattccgacgaagaggaggtgcgctgatgcccgctcccggatcccgcaacaacgccggacgcgcggcggccggagccaaggccgcccgcgagctcgaccacccgttccgcacgttcatgcgcctgatcggcttcgtgctcaggctgtacggctggcagtactgcgcggtgatcgccctgatcgtcgtcaccatcgtcgcgcaggtgcgcggcaacctgttcttccagacgctcatcgacgactacatcacgcccatgctcgcctccggcggccgcgacttcggccccctgctcgcggccatcggatcgctcgccgccatctacgcgctcggcgtcgcggcgaacgcggccagcgcggtgctcaaggcattcgtcacgcagggcttcctgatgaagctgcgcaaccgcatgttctcgcacatgcagaagctgccgctcggctacttcgacacgaacacgcgcggcgacgtgatgagcctgtacaccaacgacatcgacaccctgcgccagatggtctcgcagtcggtgccgcagatcttcaactcgctgctcaccatcgtcatggtgctggcgagcatggtctacctgtccgtgccgctcacgctggtggtgctcgtcgtctccggcgtcatggtgtggaccacgaaggtgctcaccggcaagtcaggcacgtacttctcgcgccagcagaagtcggtcggcgcgctcaacggctacgtcgaggagatgatgaccgggcagagggtcgtcaaggcgttcacgcacgaggaggccgccaaggcgaggttccgcgagctcaacgggaagctgtacgaggcgtccaacaacgcgaacaagttctccggattcctcgggcccatcaacaaccagctcggctacgtggcctacgtgctgagcgccctcgtcggcggcgcgctcgccgtgaccgggaccaccgggctcacgctcggcgcgctggtgagcttcctcacgttcgtcaagtcgttcaccatgccgatcagccaggtcagccagcagctcaactccatcgtcatgggcctcgccggcgcggaccgcatcttcaagctgcttgacctcccggaggagaccgacgccggcgaggtgacgctggtctccgtgcgcgaggacccgtccacgggcgcattgcgcgagacggacgagcgcaccgaccggtggggctggaaggacctcgcgagcggccgcatcacgcccatgcgcggcgacatccgcctgaacgacgtgaccttcggctacgtgaagggcaagaccgtgctgcacgacatgaccatgttcgccaagcccggccagaagatcgcgctcgtcggctccaccggcgccggaaagaccacgatcaccaacctcatcacccgcttctacgacatcgactccggctccatcgcctacgacggcatcgacgtgacgcgcatccgcaaggccgacttgcgccgctcgctcggcatggtcctgcaggacacgcacctgttctccggctcgatcatggagaacatccgcttcggacggctcgacgccaccgacgatgaggtgatcgccgccgcgaagctcgccaacgcgcacacgttcatcgagaagctgcccgccggctacgacacgcagctcaccggcgacggcgcctccctgagccagggccaacgccagatgctcgccatcgcccgcgccgccgtggccgacccgccggcgttgattttggacgaggccacttcgtccatcgacacccgcaccgaggcgctcgtgcaggccggcatggacgggctcatgaagggccgcaccacgttcgtgatcgcccaccgcctctccaccatccgcaacgccgactgcatcatggtgatcgaggccgg

SEQ ID NO: 567 - DNA, 23408 bp, synthetic construct
  misc_feature 1..23408: note = Synthetic
  source 1..23408: mol_type = other DNA
gattgctcgtgcagcagtcgccgatccgccagctctgatcctcgatgaggcaacgagctcgatcgatacgcgcaccgaggctgtggtccagcagggtatggataacctgatgaagggccgcaccgtgttcgttattgctcaccgtctgtcgaccgtgcgcaactcggacgtcatcatggtgctcgatcacggcaacatcattgagcgcggctcgcacgacgaactgctcgcgctcaagggcgagtactaccagctctacacgggttctgtggaacttgagtagtagcatgcgctgaattcaaaactgcgttccaagagctgcgatcttcgtcgataggcagttcgaatgacgggttttgcaccgattggcattgtgctgattggtatccctgccagttcgcagttgttgattcagtctgagccttctaactgctccgcgacgtgacttacaaaaggtcacctcgcggagcatttttatatgctttgtcgctgtattttgtcgtcttatcggttcattgctgagctatttcgttggacggctgtttaattgtttaattgtttaattgttcaactgtttaattgtttatttgcacagctgttttgctgtttatctgtctagctgtttaattgcataattgttttactgctctgcggtttgattgtttagttgcttagaagtttctctgcttttctgttgttttgattttctgttgatctatttatttgtttttcctgtgctctgtttggctgagcttccgcttatggctgcggggtttaggctggttggttttctctttatttctgttgatgctacgtagcgttccagtggccagattctcggtattctcggaatactctcagaatgcaataaggttcagagcctctaatggaatcaacaaacaaaggaaagaggctcacgatggtggatctgaacaaggaaaagttcgaagagatggaacagcgcattgctgagaagcgtgattcgttccaggctgcaggcgaggatttgatgaacaaggttaaggatgcaaaggaaggctgggagtccgctcgtgcagagcgcgatgacaagcacgaaattgctgaagctgaagagactggccgcaaccactgatcgagcctcatctgattcgctacaatttgtgaatcagtacttttcacctacgaactcatctagtcaaagtattgactgggtgagttcctttgaaattaccagcaaaacggttgatcaaagcatctgatagcggacgaagttccgtttcagtttgaaaaggagcgtgtgctatgccaatggaagatttggaagccattgacccacagaaggtcaaggacatggagcacatcgtacaagaaaccgaagtaaacgattctgctgagcacaagccatcaaagtcacaagaacagctcgacgacaagctcgccgaagcacaagcacttgatgaaacttggacagacgacgccagcaccctgcgataataaacatatgaaattcagcaaccaacattctgatgccagcgaccaattcgctggcatcaaccatgctcagtaccgtgaagtctccaagaagctggaactcacgagtattaagaactgccgagatttaggcggtattaccacgacagacggtcacatcgttaagtccggtatgctgctgcgttctgcaaacctgcatcacgctagcgatgaggatctcgttaccttaaagacgattggcgtgcagaacattattgatttgcgtacacgtcaagagcgtgaagcagaacgcgatcgtctgctctcaacgtgggacctttacgagatcccaggattcaccgagcgacgtgaactcattgcccagctgcgcggcgttattttcaagccgggctcattcatctgcagtttgtacgaacagctgctgaactcggaagaaagccaaacttgctggactgagattatgaacctgctcgtcaataaaccgggttcttatctgttccattgcacgcagggtaaggatcgtacgggtattgcagcagcattgattctggctgcactcggcgttgatgatcaaacgattcgcgatgattatctgcagacgaacctctatatggatcgtcaaacgccagtaatgcttgaacgtgcacagaagtatctgccaaagcatattcatattgatattgaacagttcttggttgccgcaccggtgtacttcgacacgatgatgcaaaccgcagaaccatacggcggactgctcggttacctgcaaggtccaatcggcttaaccgacgacgacatcgcaacgctacgtaagacctatttggagtagtgcaacgctacacaaggcttatgtggagtagccaataccgcataagacctactcggagtagaccaacactgcgtagaacctacttaggctagaccaacacagtcagttcgaaaccgtgtcacaaacctagccaagagtaatgctgcaataccgaaccacatcagtattgcagcattattcgtagtcactccataaacgaaacagattctgtgcggtggggttatctggtgatagactagccgcgcacaatagcgatgatccgccatcaacggggagctatcggaagaacagtgcaaacaacgtgctgcaagctcatactccaacgagtatgcaaacgagtatgcaaacgagcaactcagcacgtaccgcaagcacttagtagaaccgacgggtaggcccgaaacagcccaacgcaagcggtcgaatagcacgaatcgtactattcggcaaacgaggtggtaccgcggtggtcactgcgcacaatgcaggatcgtcgtcctcgtggtggtgaagtccctactacacgaggagccatggtgagcgaatcacagccatcacagcaggctgcaacgcctgaaagcgccaacaactcccagcacatctacccaaaggcagccattggtgaacaaggtgccaacattgcaccaaacccaagcttcccagatcttgaacaagacgtgctggcctactggcaaaagaacaaaaccttccagcgctcgctggataagaaccctgccggtaagaacggcagcaacgaattcgtcttcttcgacggtcctccatttgcaaacggcctgcctcattacggccacttgctgactggttacgctaaggatgttattcctcgtttccagacgatgaagggccatctcgtcaaccgtgtattcggttgggatacgcacggtcttcctgcagagctcgaggctcagaaggaactgggcattgattccgttgatcagatcgaagctatgggcatcgataagttcaacgaggcaagccgcaagtccgtgcttaagtacgtcaacgaatggcacgactacgttgatcgtcagggccgttgggttgatttcgatcacggctacaagacgcttgatctgccttacatggaatcggttatgtgggcattcaagcagctctacaacaagggccttgcataccaaggtttccgcgtgctgccttactgcccaaaggatcagactcctctgagtgcacacgagctgcgcatggatgccgacgtctaccaggatcgtcaggatacgaccgtctccgtggcagtcaagttgcaggatgaggctgacgcttatgccgtgttctggacgacgactccatggacgattccaacgaacttcgcactcgttgttggtgaagacatcgactatgttgaggtcgctccaactgagggtaagttcgcaggtaagcgcttctacttggcgaaggctctgctcggttcctacacgaaggaactcggcgagaactacgaagtcgtgcgcgagctcaagggccgcgatatggtcggctggcgctactacccagtcttcccgtacttcaataacgacgaagcgcgcgctgaaggtggcgtgcctggtcctaacgcctaccagatcttcacggctgactacgttgatacggccgagggtacgggcatcgttcaccaggctccatacggcgaagacgatatgaatacgttgacggctcacgagatcaagagctgcgacgtgctcgatgccggctgccgcttcacgagccaagtcccagattacgagggcatgagcgtcttcgatgctaacctgccaattctgcgtaacctgcgtgctggcgatggtccactggcttcgattcctgaggaacagcgtgctgtgctgttccaggagaagagctacgtgcactcctacccacactgctggcgctgcggtacccctctgatctacaagcctgtgtcgagttggtttgtgtcagtcacaaaaatcaagcctcgtctgctggaactgaaccagcagattaactggattcctgacaacgttaaggatggccagttcggcaagtggctcgctaacgcacgtgactggtcgatctctcgtaaccgtttctggggaagcccaattccagtgtgggtttcggacgatcctaactacccacgagtcgacgtctacggttcgctcgacgaactgaaggctgacttcggcgattaccctcgcgatcacgacggcaacatcaacatgcaccgtccatatatcgacgagctgacgcgtccaaacccagatgatccaacgggtaagtcgacgatgcaccgcatcaccgacgtgcttgattgctggttcgagtcaggctcgatgccattcgcacagttccattacccattcgagaacaaggagtacttcgaggagcacttcccaagtgacttcgtcgttgagtacatcggccagacgcgtggctggttctacctgctgcacgttatggcaacggctctgttcgacaagcctgcgttcaagaacgtcatctgccacggcattgtgctcggcaacgacggtcagaagatgagtaagcacctgcgtaactatccagatgtcaacggcgtcttcgataaatacggttccgacgctatgcgctggttcctgatgagctcgccaattctgcacggcggtaacttgattgtcaccgaagagggcatccgcgacaccgtccgttcgattatgctgccggtttggagcacgtactacttcttcacgctctacgccaacgcagcaaacggcggtcgcggttacgacgctcgtctgctgtctgctgacgaagttccaggtctccctcagatggaccgctatctgttggcgcgtactcgccagatggtttctggaatttctgcagatctcgacgaattcgctatcgccgatgcatgtgccaaagcagccgacttcatcgatgtgctgacgaattggtacatccgtaactcgcgtgaacgcttctggaacgaggatgagaacgcattcaatacgctgtacaccgtgcttgagtgcttcatgcgcgtgcttgctccattgactccaatggaagctgaagctgtgtggcgtggcctgacgggcgaagagtccgtgcacttgggtgattggccatacttggttgatccaaagtcgggcgaagacaccgaacttggcaagattcttgttgaggatggcgctcttgtggctgcaatggataaggtgcgcgagattgtgtctacggcactgtcgctgcgtaagtcggctaagatgcgcgtgcgtcagccactggctaacatgactgtggttgccgatgacatttctgcaattctcggctacatcccactgctggaaggcgagctcaacgttaagaatattgagatgctgacgctcgacgaagcagcttcgcatggtctgaagattattgacgagctcaaggttaacgctcgcgctgctggtcctcgtttgggcaagcaggtgcagttcgtcattaaggcttcgaagactggttcgtggcacaccgatgccgagactggtgctccaattatggatacgccaaatggtcctattgcactcgagccaaacgagtacgacctttcgaagcgtattgaagaagctgactcggctaagagcgctgagacggtttcctcgattctgccaacgggcggttttgtggtgctcgatctggcacttaacgatgatctgctcgctgagggttatgctcgcgacgtcatccgcgccgtgcaggatgctcgtaaagcagcagaccttgacgtctctgatcacattgcactgaagctgaccgtgccagcaaccgacgttgctaaggtcgagcagttccgcgatctgatcagcgcagagacgctggcagactccatggaagttgcgccaggcgaagagcttggtgttgcagtggagaagtgctgaactattagcgcttgctagcaaataattaacaacggtagggcttgtatgtattgcatacaagccctattgcttttcctaatgagtgacgcatcattgtgattactctggtgatgtttttattgttgccattctgttagtttgagcatgagtaatttcgatagtgcatacgatttttctgtggcgaagttgatttctagctatatgctgttctaatttcaattggcagaaattctgcatgaaataagaatcgcgcagccaaacaattagtaagaagagactactatgtattttggttgtaataaataagagaacatcaacgaagatgtgatcttgttattgacctgagttgtattacatctcacgcacgaaggagtgcaaatggtcgagcgaaatattagccagaaatggcttaatgagcccccgattcatgcagttcatccgtatgccgatccggtatcggactgggaacaacaagataactatgacataacgcaagatagatatgttgtggttataggtggcatgaatatggatatctgcggacgtccaggcctcaaaatcgtgtcacgagactcgaatccaggcatggttacgctctcgcctggcggagtagggcagaatattgcgcagaatctcgcccatcttggagtcccagtgtcactggtgactgtgtatggcggcgatgaaaatggtgcagcacttgctgctgcatgtgcagtgaatcatattgatttgagtcatgccgaatgcattaatgatcgtcgtacttcgacttatctgtttatcacagatgagacaggggatatgcagatagccgtaaacgatatgggtatttgcgaagaaatgacgccagagtttctgcagaggagaattgactttatcaataatgctgcactctgcgttgttgaagctaatctctcagaagacacgttgacttggcttggcgaccatgtaactgtgccgctactaggagacaccgtttccacttttaaagcgcatcatttcgaccatgtactggcacatatgggtgtgctcaagcctaaccacctcgaggctcaagagctcactggcattgctgtgcaagacgaggaatcagcacaagcggcagcaactgcattactggaccgaggcgtagcaactgtttgtatttccatgggcatacgtggcatgctttgcgcaagaagagtgcagaacgaatcatctgtaacagatgaatttgttatagtgccgccattcccaaccaaaattgctacagcaaacggtgctggagatgcaggtatggctgctattgcatggagctatttcgataatcctgcacgagatctggaagaacttggtcgcatatctcaggcagcatcaagcgttgcactcgaatgcactaaagcggtcccagatttaactgtggatcggcttcgtatgaagctagcactgcttgcctagcagtagcgcagaatttacccccatttttacccatcaatgttctcattgcaaagaaggaagaagaactatgaaggttatgaagcaaatctactcgctgattcagtacgacgaagctgtacagaccatggatgctggcgctgatcatattggacttgtaccaatgcagaatggcggcgttcctgcacatcgcgtgccactggaacgcgtacatcgcatctttgatgaatgcgctcgccgcggtgtgaagtcagtagccatcatgttgaccaacgacccagaggagatgctggagttagccgaagaaatacaaccagatattctgcatattgcaggcgatggttatgcagccgatgaggattttgctcagcgactgcgtgaagtagcaccacatacacagctcatgcaggcagtacttgtagataacgagtccgctgtagatcgtgccaaggaatacgccaagtattgcgatttcattctgactgattctggtctagctcctgacacgggtattggcgcaagtggtcaaacgcatgattgggctattgataagcgcattgttgaagaatgcggcaagccagtcattatggctggcggcctcggcccagataacgttgcagcagctattacgcagtgccacccttatggcgtcgactcattaaccaagacgagtatcaagtacgacggcggatacatggaaaaggacattgagaaggttcgcgaattctgccaaaacgctgatgctgcagcagctgctattggcgaataatcaatcgattgtcttattgataaaagagttctaagggaagctgtatggatatcaaattattgcagcctgttaaagtcgtgtgcaccagcgatctcagtacaacactgaccgagattctgagcacagcagagtatacaaggccacttattgttaccgatgcgtttgttataaccatgccgctcgtaacacaggtaattgcagcattacgtgatgctggtacagatgtagcagttttcgaccaagtacaatcagatccacttgcctcaaccattagtgcgggcgtcgatgcatttcgtgagcatgaggctgactgcattattgcaataggcggaggtagctcaattgatgtggcccgcggcatcaatattgtgcgcgttaatggcggtaatatcctcgattacaccaatccacaacagcctatgcgtacatgcccaggcctgattgcagtaccaacaacatcgggtactggtagtgagctatcgaatgcgctgattgtgacgagcgatgaccagaagcttgctgtactcgcagaccctgcagtcagcgaatacgcagtgctgtgcccggaactgactctgaccttgccacaaaagcaaactattgcctgtggccttgatgcattctgccatgctgcagaaggatacctttctgtacttgcaagtcccgtgacggatgcaatttgcgaaaagattatgttcctacttgccaaatatcttccaactgctgtgcacaacggacaagaccgatatgcacgtgaacgagtgcaagtagcttcagcgctcgcaggatggatgctcaataattgcggcaccatcgcagggcattccattgcacatgtgttgggatcgaaataccacattgtgcacggcgaagctgtcggctatgcattacctgcagtgatgaagttcgttgcaccagttcgtctgcaaaaggttcgcgaaatcggccagatttttggagcagagtatccggagcagagcactgacgaacaaattgctgaaattgcatgcagcacagttcagaaattccgtgatgagactttaggccttcacccattctctgattacggcatttcgcaagacgagctgctctcgaatattgatgcagtagtgcatgagcgatttgctggcaatacaccgcgtcttattgatgtaacggcagcccgagaaatactgctcggttttggtacgcgtagctaacgcaaatttgcgataggatgatgtgctcaaatgtacctaaataacagtgcagttgatgcttcctatgcagtacgaacgtaattccacaagatgtttcacgatgtaatttgaaattagggggtaatactggtatattgaatcttgctaattcccagtaaggatgacctcgttagtcatcttgaatgctaagcgaattatttcgcaggggagggttcatccctccccgttttttattttgagattgaatctgtaatgaggcagctgaaaattcaacgttcttttataaaaataaagtcgttttgctaaaaatttattctcttcttcctatgccccctaaatggtggtgtacactatgtaaagtattaagacgacgaagtcaaagagggagttagcgatgaaaaatcttcgatatcgagttggtattgatgtcggtttaaattctgtaggactcgctgcaattgaagttgattcagacgataatcctctgcgtattttaaatgcacaaagcgttatccatgatggtggtgtggatccacagtcgcagaaaactgcagatagtagaaggcaacaagctggtattgcaaggcgtacacgtcgtatgcgccgaaaccgtgttaagcgtttgaaagccttagacaattggctcatcagccacaactatccagtttatgaagccgacgaattggattggttcgaggcttggaaagtccgtgaccaggcagcaactgcgtatatcgaagatgatgaagatcgtcaggatgctatttcaattgcaatgcgccatattgctaatcaccgcggttggcgtaatccgtatatggcgattgaaaatctgctggatgtacagttaccagagtctaaccagtattttgaattgcgtgaagcagctgagcaacagtgtggcggtcaggaattgcctgaagatgcaactcctgctcagctgatttgtgctgtactcgactataacgatggacgcccaatccgtgtaaggacttcaactggatctaagaaaatcggcgaccgtgaaggccttattcatcagcgcttaatgcagactgataatgcctatgaagtgcgtaaaattctctctacgcagcgtattccagaagaccaaattcgagaacttattcggcttgtttttgctgctaagtcgcctaagggttcagcaacagaacgcgttggctctgatccacttgacccatcgcagaaacgtgctctgaaggcatcacttgcattccagcgctaccgcattctcaatatgctgacgaatattaggattgcagaaaatggtgctgagcgacctctgacggttgaagaaaagcagcatgtctatgaattcttaatgcagcaaacttcagataaggtcacttggggtgacgttgcagaacagctccaaattactcggcataatcttaagggcgttggcaagcagaccgaagatggtgaagaccgagtatcatcccgacctccagtcgttgtaacaacgcagcgtattgctgctcttaaagactcaaagctacgcaagagtcttcagcagtggtgggatacgaataatgatgatgctcgcgaagccatgattgagctgctttctaattccgtggatattgacaaggttcgtgatgaactacgctatgcagaggctattgatttcattgagcagcttgacgacgatactttggcaaagctagataccgtggatcttccagctggtcgtgctgcatattcagcaaaaacattgaaagcgcttaccgagcgaatgctgactactgcagatgatttgcatgaggcgaggaaggtcctatttaatatttctgatgattggcgtcctgctcaacctgcaattggtgcgccaattggtaatcctgctgttgatcgtgtactgaagatcgtaaaccgctatctgatgaatattgaacaacgatggggcaagccagcatcgattcagattgaacatgtgcgcggaggctttaattctacgaagactgcacgcgatatgaagaacaaatatgagcgttcgattgctgaccgaacgaagtatcgtgatgaaattaagcagcagcttgcttctcttggtgtagatacagttcgtgaatatgatgttcgacggctcgaagccattactcgtcagaatgggaagtgtctctattgcggccgaactattacgttcttcgattgcgagatggatcatattgttccacgacgcggaactggctccacgaatacacgcaataattttgcagctgtatgtgagtactgtaaccgtgcaaagagcaatacgccatttgccgtatggtgcacaacggatagtgcaaaagaacgcggtgtatcactgaaagatgccatcaatcgtgtcaagatgttcaacattaatccgcttgaatatcgtgggcgcgaagctacgaatttcaaacagtcaattatctcgcgattaaagcaaactgagctagatgatcctattgataataggtcaattgaatctgttgcatggatggctgacgaattacaccgacgcattgactggcatttcaaccggagtaacgatgcacaaccagatgcaacaaaggtaggtgtattcagaggaagcattaccgcgtctgctcgaaaagcttcgggcattgaaggacgaattcacttcattcatagtcatacgaagacgcgtcttgatcgacgtcatcatgccattgatgcagcagttatcgccatgatgaggccaggagttgctcagattcttactgaacgagataacttaaggcgttcgcagatgattacgaatactccagacgtcgtgtttggagattggcgtaattatcctacagaatccgcgcgtggataccacttgttccaagcatggctgggctcaatgaattcgcttgttaatttattaaatgatgcgttagatgctgatcgagtacatgtgctgtatccgcagcgtcttgcgcttggtaattcgattgcgcacgatgcaacgattcacgcattgaagaagattcctctaggagatgctattgatgcggaaactattcgacgttcagcgacgcctgcacaatactgcgctctaacacgtctgcctgattacgatgagaaagaaggcctgccagaaaaccttgatcgtactattcaagtaaatggtcatcaccttgggccggctgataatgttgaattcttcgcaggtccagctgcccaaattgcagtgcagcaaggttcagcagatatcggatctgcaattcaccacgcccgcgtttaccgctgctggaaaacccagaagaacggtaagaggaaggaattcttcggcatgattcgagtattccaaacagaccttctcaagtaccgccatgatgatttgttcacgtgcccattacctccgcagagtatttccatgaggtatgcggatccgaaaactactcaagcagttgcacgaggagatgctgagtacattggatatctcttaattaatgatgtgattgagctgcactttggagaagcagagaaaagccagattggtgactttttggattttgcaaggcctgactcgagtattaatccaggcattgcaaataaatgggttctcgttggaatgccagaagctgcaagattgaagctacgtcctctgtattttgcttcagagggattgcagaatatcgaaaacgttgaaaaatcagtatgccaaatccttggtaatggatggcggccaacatttggcgtcgtggcagagcaccatgctcggattctacgccgcaatgcgttaggtgatcagcgtataacttcagaagcccatctcccggtttcttgggaactgcagtaggagggtaacaatcatgcaaaatggcgcctggagagtgattgactgtactaatttggaaggccggttgaaatatgctcgcgggcgcctccttgtatcccagtatgagactggggaaacgagtgagattccactagctcaaatcgcagttcttctagtcggacagaggtcaaactgctcaactgcattattgtatgaattggcgcaatatggtgttagcgttttaatctgtgactggagaggcatacctgtatctgcattgcatagttggtgtgatactcccacgattgttacgcaacgtcatcgtgcacaagtttctatgtcgttacctagacaaaagaatgcgtggaagaaaataatccaagcaaaaatatatggacaggctcattgtctcgaattgattggtgatgagcaagcaggaacattattcgagctcgccaagcaggtgcggtcgggtgatatctccaatgcagaaggaacggcggcacggttctactggtctagagtgtttgaatccggattcaggagaaaacctggatctggtattgggaaaaattctttattggactatgcatatgcagttcttcgcggccatgtgattagagcgataataacggctggattatcgccagtattcggagtgagccaccacaataggtctaactattattgcctagccgatgatttgattgagccatataggccagctattgatcatgaggtatatcagttgcctgaaacagcgactttagaagaccctttagtaaagaagcatctcgtcaatgcaacaaatcttcaatttgcacagtcaggtagcactataccaagctccttgactgagtttgctcagcaattcggcttgtattgcgagggaagaataaagtcattatccgttccaagattcggagaattcaatgaagagagatgaagagagcggtggaatgtggtgtgtagttatgtttgatcttccggtccaaacgaaggcgcaaaggcgcgctgcgacgcagttcagacatttactgctggacatggggtatttgatggtgcaattttctgtatatgcgagatacgctcctacgcaaagtggtaatcgaacaacagttaaagaagttttagcaaatataccggagcatgggaaagttcgaatattgcatgtgagcgataatcagtggtcgaaggcagttcatttttgtaatggaactgaggaagataacgacgaaatgccagagttactgttacttttttaaacgtaaaaagtgaggaaaagactggaatttcttcactcttgaccagctatcaagtctatcaagagtgaagaaagctaattcccagccagtgacacccctatgctgttcggactccaagtctatcaagagtgaagaaagctaattcccagccatatcactgccaggattagcgatacgccaagtctatcaagagtgaagaaagctaattcccagcgatggcgtggatacgctggctgacgctccaagtctatcaagagtgaagaaagctaattcccagcacacgtggcagatggcgcgcaacgtgcacaagtctatcaagagtgaagaaagctaattcccagcagctggttctactgcatcgatcatggctcaagtctatcaagagtgaagaaagctaattcccagccttagcgtctgcgatagcgtccacgatgcaagtctatcaagagtgaagaaagctaattcccagcgagcttcaccgacggagtcgtagccgttcaagtctatcaagagtgaagaaagctaattcccagcgacttcatcagtcagcgtttgctgttgacaagtctattaagagtgaagaaagctaattcccagcgcggtctacatactgttggttggcaattcaagtctatcaagagtgaagaaagctaattcccaacacttttgtcacgcgtgacatttttgtgacaagtctatcaagagtgaagaaagctaattcccagcaaactgttgccactgacttgggttatcacaagtctatcaagagtgaggaaagctaattcccagcgcatacccaagggcattgcatggcatggcaagtctatcaagagtgaaggaagctaattcccagctacgagaacgctgcaccatcggggatagcaagtctattaagagtgaaggaagctaattcccagcccgcaagagcggagataatccctaaagataagtgtattccaaagagagttgcaaatcgtattgcagaatataaatgtgtattagtgaattcagaacatgaacatatctatagggttttatttgaaagtactagcacggatatttttaaccaatgttattaattatccattgcgaagttttgagtggatttagaaaaatcgacttaaaatcacagatatggctgccatctaacggcgtatgctagccgctttgatgcaattctaaggattgttatgtgtaagttggacttgagtcgaatacaagattggcttgattcactcgatgaagattcacgaaatcgtgttgatatggctttacatgagcttgctttgcaagggcctcagctgcgcatgccattggtcaagctcatagaaggcagtaccacgcatgcacttaaagagctcagaattgcaaagtatcacggccatatttatcgcattctgttctgctttggccccgaccgcgaagctgtcatgctcgtagcaggggataaggcctctcacggcatgaagcattggtatgaatggtcaatcccagttgcagaagagatgattcaacagcttaaagatccggctcattgcggtttgatgcttgggtcttgagaggtgcgtgaatttatgccacctggggtgaatacaggaataaaaagaaaatataaactgctctgcagtatgggagcagcaagaaataaaaatgggtgaagtaacagtaataaactgctagtttccacccgtcagcgaactctcatgcttggccccttatgatggtcgcgattgaacgacttctatgattgcgatcactcatcaaggaggctcctatgaattacaaattacacgtggcgtctgcagcgacaccgttcacgttggctcctggagtgaatccgaatcgcgtgatggatgatcttgccggcagtgtggatggcggatctccagctgttatcgatattgtgttggcaaacggtcaaaccacgtccatttgggtcaacgctaaggaacttgcttggtggtatgtctctgaagatacggagccaagtaactgagtgagcattttctgaatcgctcgtaactcaggctggtccgacacttcgacgggtcatctcgaggtattcgcctgagttttatttctactgttgcgggttcgctccctcgcggggcgacccgtttttcttgctcgagttgccgttcgattggcacgtctctttgaactttccttttgatttctatttttgatttctctttgtagtgccatgggcaatctttatgtgatgtgactttatatgtccgtattgaggcttcttgagtttcacaatttcatcacaattcgtacaatatgtaatgcgcaaacccgatttgggtattgcaaatcctatgagttgcttgcggtacaaacagcacataaccaaacaggatgtgactgcaacagctggagcgatagcacagtatgagcaacagcacagcatgaacggtagcaagcgcttagcactatgagaggggaaatgaatggtttcgtttatgcggcttacacaacgattgacagcgctcgcgattacgagttcaatcactttgacaagttttgttcttggtgtgagttcaacacaagctgttgtaatacgaacaacagattctggttcgcatgtggctttgtctcatcaaaccagtgttgctgtagatactggcaatgctactgaggctaacaattctgatgagactggaaaagctactcatcctgatgagactgacagtgctaagaatattgctaaagcaaagcacattatcgaagaagcaatgcaacaacaaaacaatcgagatgcgcaacgggcttcaaaatcattgtctgaagcaacatcacgaaatgcatccgatggcctaatcactgcacacagcaatggtttacgtggtgattggggtccaacaccttgggactttgacgcatctcgaggaatacttaccttcgccccagaccaggaggcagagactccagcgtgcccgtttatgaggcttcctgttaaaggaacaatagagtgggccgtgaagactttaacgaaaaaagctgtatttgcacataaattgactgtttatagtccggattctctggcatgcatgtttgaaagctgcccgaatctagaagaggtcaagggactgaataatttatctcttgaacgcatgaaatggtatgaaggcgtgacgttcgccgctatgttcaaagatacaaaagttcgtagtgttaacttcactggagtggactttagctatgttcgcagtattgatttgtgcagcacctttcaaaatcttcaagctgctacgttgacaatacaaggtcttccttgggagaaggtctcgagcttgtacggtacgttcagagatactcaattgcagaatgtcaccgttggatatcctggacgagtagttgaagcaccaaagcttattgacgccaataatatattcaccaattcacatagtctctctattttgcagtggaatatgattgcacctaatctgcagtatgcggggtacatgttctatggtgctaccagtttgcaaaatattgatctcagtaatctgaagagtcagaaattatcttttgttagggacatgttcttagcatgtcgaagtcttgacagagtttccctgctaggcagtaaattctctgaaaatgcttgcgtgggctggatgtttggcggctcgattatgcattatctttctattgacaagagtgcacttgctcgaatatatgcactgggatcagctcaaaccttgccaagagaaggagatcccaagattgcttggaaagatgatgttttgaatctgacaatgagcattactgattgggctacatacaaacctgaagaggactgccaactcaatctgcatagtgtgtagtccctcaattatgaggtcctgttgtagctcagcagcgtatttcattatctataattgatagtaagcaaatccgaattgggtattgcgcgatgctatgaatagcttgtgttttaggcagcgcataatcagacaaaatgtgactgcaaaagcttggcaaaccagcacggcatgtgcaacagcacagcataaacagcagcaagcgcacgagcattacaagaaggaacaataatgacatcactggcacggcttaccaaacgaatagcagcacttaccgctacaagttcgctcatacttgctggcgttattggtgtgagctcagcaaatgctgatgaactccctgcagcaacagggcttggcgtccataccatggcagtcaatagagatgccaatgtcaataccagtacagacatcaatgttgacgccgatgcagatgcaaacgatgttgctttagcacatcaaattctcgatgaagcactgcaacaacagaaggacccagactctacagaagagaatcactacatagaaggatattggggtgaaacgtattggctattgaacaacaaaaatgagacgatgacgatcgctccttatgcagattctacggctccagattttcgtttcttagagggcaaggaggggtcgttggaatgggcaatcagaataacagtagaaaaagttgttattgcgcacaagcttaaggcaaccagtgagtcttcgtttgcatcaatgtttgagggttgcttacatctcgaagaggttgaaggacttggcaacatatcctacgagaaccttaaaaagggaagtaatccaaggctatatcaaatgttcgagagaaccaaggttcaaaatgttgattttactggagcagatttcagtacctgttcgaaatttaatccatcgtatatgttccttaaactgaacttctatgcaaaagaacctatagagttacatttggcaggtctaccgtgggaaaaggtctcttctacatggtcaatgtttaatggtgccaaaatatcaagtgtgttgatcgggtatccggatcaagtagtcgaggcaccgtcaatcgacacagctacagctatgttcatgaactgcccgtttcttacccacgtacagtggaatgtaactatgccaaatctcaaagatgcggacttcatgttttctaaagatggcatgctagaaagcattgatctcaataacttaaagagcagccaattagcctgtatcaccgaaatgttcggcgaatgctacaggctggccagtctccaaatgaaaggcactaagttcacggcaggtcgtgcctcctatacgatgtattacgcacctataaaccattttgtcattaataagagtgcacttgccgaaatctataaagctgctaggcacgggctaccgagagacgacgatccacagttccaacggtaccaatggaaagataaagatagtgggctggaaatgtctattactgattgggcaatgtaccagcctgatcaggattatgagttggaattggatttaccaaaacaggagcagtgctgagccacagtgctgaataacagtgatgagcaacagtgctgagccacagtgccgagacacaatactgaggcatagtgcccgtatgtagggcattatgttcatgaaccaggtactgtgttctacactgaggtaacgagcaaactctaatagggtattgcacaatctcttgaaaatctgatgttgagaacgacgtgttgttataagcaacacataccgattcaaagtgcaactgcaagggccacaatggcgccacaatacggactatggcacagcatgaacggtaataagcgaatgaaaatggagtaacagagggaaaacaatgatctcgctatcacgtgttacccggcgaatggcagcgctcgcacttgctagttcgcttacagtaacgggttttacagtcggtctgagtacagcgcaggctgatgaagtaactcaagataattacgagctcgcgtccactgatgcgcaggtaacggcgaaccgtactcatacgcttgcgcttgctgatacagctgttgctaatactgagtcctggagtggcgattggggtgatacccattggatatatgacgctaaacatgcagtcttgattattgctccagatcgggattccacatctggcgattcgccatttatggaagacgctgaaaaaagtattcaggaatggtttgtgaagacttatgtgaaaaaagttgttattgcacatagagtcaaactagccaataaaaatgtgttgaaatccatgtttagcaactgtcctattctttcagaagtcgaaggtttaggtaaactctcgctcgagctacttcctgaagaagatgtagtggatctctcttctatgttcagcagaaccagggtaagttctgttgattttactggagtaaatttcggtaagaggccactcaagacgaatagcatgttttatggcaaccccattgcggatttcgcgatgaagggtttaccttgggaaaatctgctgagtgcaagtaatatgtttgcttgctctggcataaaaaatataacggttggctatccagatacagtagtaaaagcaccgatgctctccgccataaatcaaatgtttatggactgcaaaaacctttcggaagtagattggcgaattgaagcaccaaatgtaatcggcacctacaatatgttctttggtgatacagcattgacgagtgcggacttgaataatctgaaaagccagaacattcttgattctggaggaatgttccaagactgtacgtcgctggagcatgccttgttgggtggcagcaagtttagctcaggcttccgagccatcaacatgttctctaacgcgcctaaaatcaaacatttttctattgataaagaaacactgagcaaactgtatcgttacggggataacggtaggctgccgagaatcgatgcgcagccagctttgcgatggtacgatgagagcctcgatcagtatctgacatttgctgagtgggcagcatatcaaactgatggcaatcgtacattggatttagatgcttaatttgtatgaatataagcctaatttgacgatggtaacgagttattacggcgacatctgatattgacagtggcgacgtgttgagctcaccgcaggagttatgctgcggtgagcttttttattattttcgtagtctctgctgctcgttctgctaccgccgtttgagttgttcaagaaaaatgacattttttaatttttgtatacactgcagtgccaattctgtaccgcttaaggtgttcgtatctataaagaattaattgttaagttaaataattatgtactgtacgtaacgtgtttgtgatttggggaaattggctgcgatttgttgataaactaagataaatcactccaagaccaagaaaggggagacagtacgttcgagcgagggaaactcgaatgcctactgtttattgacgtttcgtaagattacgtcgtatctgatgtccagaattcgagaagtatattttgtgaagatgattctggcatagagtaaatcatgtgctcagtaatgaacacaaaaaccaaaattcaaacggagtgaagggctccacatacgagggtaaatattaatgagtatgcctatcgtttttgaattttgagggggacaataaattacataagcaatcgtcggcacctttacgggtctaacgaatggtatgcagtgtctcgggaacgcaattccaatggcgcccgagatcggggtgataactggcatacgagtaagacaccgtagcgcaagggctgaagcgttgctgaaaggaaaacaattattatgctgaatactcagactatgaagcgtttctcggctctggcacttgctggatctttggcactgtcgggccttgctgtgggtgttacttctgctaatgcggcaccgatgccgtctcagacaatttcgattgtgaatcctgatgctgatccagcaacttcgggcacttggggcaaaattccttggacctatgacactgcaacgaagacactcgaacttggcggctatggcaagccaacactcgtaccagagaacactgaggtgttcctgacggacggcgcagatcagcaggccacaaagtttgaaatggaaacggttcatctgcatggcgtaactattgaagatgctaagcaactgacctctatgtttgcagatgcaaagcatctgaagacagtaacgggcttgaattctctgaattttgagaaggtagcagaaggcaagactgtgtcgtttatggacatgttcaagtacacggctgttgaagatgcaaactttgcgggtattaacatggccggccatgacattaatgcttctggtatgttccagggcgccacaagtaagtacctcaatctgacgaatcttcctgttgatcatattgtgactgcagacgcaatgtacgctgagaacaccaatctcactgaggtgacctatggcggtttctctggtcctattccagctcctgcactgaagtctgctaatgcaatgttcaaggactgcaccaatgtgacgtcgctctatatgaatgttgaagctccaaaccttgagcagactaatgagatgttcgatggctgcaagagtgtgaagcgcatcaacttcgatttcgttaaggctcagcatgtgaagagcgctcagtacatgttccgtaactgcgagaacctggaagacgcatggatgatgagttctgatttctcgcatctctctaaggcagaagccatgggcatgttcgagaatgcaaataaggtgagctggctgatcctgccaaaggcctcgctcgataacctctatgaggctgacgcacatggctatagctcgctgccacgtaccgatcagaaggatgctcagtggggtgtctacggtctcgaaggaccacgaacgt

SEQ ID NO: 568 - DNA, 23369 bp, synthetic construct
  source 1..23369: mol_type = other DNA
  misc_feature 1..23369: note = Synthetic
tcgagcgcggagaacgagtcgtcgaagatcaggatttcggggtggcggtagacggcgcgcgcgattgacaggcgctgcttctggccgccggagacgttggacccgccttgtgcgatcggggcggtgtatgtgccgtccatgcgctcgacgaactcggtggcctgagcgacgccggccgccgccttgacccggttcatctgttcagtcggcattgcggcgccttccgctctcttgcccgcggcgatgagttcggcttcgcgtttgcggccggccggagtggaggtgtcggccatttcgacgtccgcggagcttgccccgttcacgtcgtcgccgtagctcacgttggatgcgaccgtgcccttgaacagcacggactgctgcggcacgtatccgatcttgtcgcgaagggctttcagatcgtattcgcgcacgtccacaccgtcgacgagcacctgcccggccgacacgtcgtagaagcgcggcacgaggttgatgaggctggacttgccggagccggtggagccgatgaacgcgacggtctggcccttttcggcggtgaagtcgatgccttcgagcgtcgcctcgcgtgagccggggtaggtgaagctcacattgcggaactcgacggtgccggttttcccgccgcccagacgcgccacgtcggcggcggtcttggtgccggttttgacgatcggatcggtgtcgaacacttcgagcacgcgttgcgcggacacgtcggcgcgcggccagagcacgaataccatgctcatcagcaggaagctcatgatgacctgcacggagtagttggagaagacgaccatgttggagaacacgttgagcttgtccgtcaggccggcggcgtcgatcagataggcgccgatccagtagacggcgagcatcaggccgttcaggacggtgttcatcagcggcatcatgaacgccatgacgcggttggtgaacagctgcgtgtcggtgaggtccttgttggccttggtgaacttggcctcctggtagtcctcggcgttgtaggcgcgcacgacgcgcaggccggtgaggttttcgcgggccacgaggttgatgttgtcggtgagcttctgcatggccttgaacttgggcatgaccatggccatcatgatgacgacggcgacgagcaggatgacgacggcgatgccggtggcgagagtccattcgaaaccttcgccggcgatcttgcatatggcccatacggccatgatcggcgacttgacgatgagctgcaggccgatggtgatgaacatctggatctgcgtgatgtcgttggtggagcgggtgatgaggctcgcggtggagaatttgctcatttcggcggggccataggattcgaccttgcggaattcgagcgagcgcaggcgctgggtgaatgacgagccgacgcgtgcggagatgtagccggtgacgatggcacaggcgacggagccgagggagatgagcagcatcttgccgccggcgatccagatgtcgctcatcgcgctgcccggcgtctcgacgagcgtggtgatgtctgacatgtaatcgggcagtttgaggtcgaagaagacctgcccgacgatggtcaccagggcgatgagcatctgaccgatctccgctttggagaggtatttcaggatgcgaagcattggctttccccttgtgttttgttggtgattggttacgttatttgccgcggcatcgatatccgatgcccgaattagtttctgttgttagattacttacagtgtaagatattacgcattattctgtgtattcgctgtgaatggcgcgctttgcgctggctgcgcacgagagacacggcacgcacgccgtcccccacgtcatccgcagccggcggaagaagctactcctcgccggccttcgcgcgctcggtccgcatatgatcggcgacacgcctgtcacgctcggcgaacgcggcccgcacctcatcgggggtcgggcgcggagcgccgggatggcagatggccatgtatgtcgagaactccgacagcagatcaacgaactcgcgcgtgcgccgctcccccatctgcgagaagatccaacagattgccgaacgcatctcctccaagtcgcacttggaccgctctcgcccggcatccgtaaggttcacgcggatgatgcggcggtcgtccgggtcgatgtctcgggtgatcaacccttttttctccagagcggcaagcactgtggagatgcggccggagctggccttcagcgaactggcaagctgcgacggcgtcatggtgccgcgcagtgcgagctcgtgcagaatgaatggctcgccatgcgcgccgcgcgcgaactccttctgcatcttggaacggttgccccacacgctggcgtacagttcgctgagcgcctcccgctcaaaacccatttcgcaccgccttccgattcgaccattgccgcactaccgcgctccgcggagtaccgccaatacattccagcggcatatacatcgtgcaaacatctgtaatattatctcacaccgtaaacaatttacagtatgtgattatatgtccgcgctttactcccccgctactaaacttgatctgtacgcattttttccgtacaaccattctatggcgacactaacgaagcaaacggtatcgaaacagaaaacgtcccggcttgacattcgactgacggatgcgcaacggcagctcatcgagcgtgccgccgagctgaccggcagcacgctcacgcaatggaccgctcgccatctcctggaatcagcccgtaaggatatagaagaagcaaccgtcctgcatctggaatcacaggcattccaagatttcatacaggcattggatcagccggttccgccagcagccgaaaaactcatggaaagggatccgcagtgggcatgatccatcattcccaacgtccgcgcaagctcggcccggaagagagaatggggaaagttctcttgtggagtaccgttcatcgacaagtgggccgcacgacacgcaccgtcatcggcccagcatgggacggccgtcgcgtacgtgtcattcactgcgtcaggtgaaccggcgggattctacacgctgagtgcatattcggtactgcgagcacgatccgccagcggcgcactagggtcacgtgcgctcattgtggaaccttacgacgataaagcacgcgcgttctatgcgcatttcggttttcaaccgattcccggaaccaccagcatgtatctcaggctcgtttgacgacgagcctgttccgtatttatgacggtgactcatagcgttgattcacggcagtaaagacagctcctcaggggcgagcgtgagattgactgcggcgaacgagtcccggacctcatgcgggttgcgggcactgggaatggtgaacagacggtcatatctggtcagctcccacgcgagcaccacacgctggtacgagacgccgcgggccgctgcggccgtgcggaacggatcatacgcatgactgtcgaatgcgtctaggaacccgccgagcggcgaccagcacacaaaatcaagaccgagatcggcacagtgacccatcgtatgctcggggtcgggatgcgatggcgagaactggttctgcaccgcaatcagacggtcgccgagaatcccacgggctgtgtcaatctgcgcattgtccacgcgcgagatgccggcgaaccgaatcacgccctcatccagcaaggttttcagcgcgccgaccgtatcctcatacggaaccgcggggtcagggccatgcgaatacaacaaatcgagcgcgtcgacgccgaggcggagagcggactccttcgcgtcacgaatcatcgtctccgggcgcgagtcggccatccacccgtaccggctgccggccgcctgcaggtgctgtcgctcggatgcggatgcgctcgcgccgtcgcccggggattgctgaggatcttccgcgtcgcggttcgtcacttccagcgttcggcgataaccagtcttcgtggcgaccagaacctcatcgcgcggaccgctccagctggcgagcgccgcatgaaccagcatctcgccgtacccgaaatcacgcggcacgcctgtaccgtcaggccccggttcgcttggcagataatacgaccatgcggtgtcgagataacgcactccggcgtcaagcgcggcatggatcgtgccgatggccgtcgcccggtccgggcgtccctcgatagagagcgccatcgttcccatgccgaggcgcggcatgcgcgctttccccgcaaactccacaacgttcgatgtcaccatgccaccatcatcccacgcgacacgaacacagggccgactggcaatgcgccagcccatgagtcccggccccggttcctttcgacttgttccggcgaaagtcccatccgaagacactcaaatgggactttggcgggatgggtggacttcacctcccgcgtgaggccccggcagtcaacaaaaagtcggccggccaccgaataggtgaccggccggcatcatatgccgatccgctgattcagcgccggggctcgcgccgacggcgggcggcaagcgccgcgccgacaccgaccgcgagcagtgccgcgaacgcgccgaacacgccgctcacagaggcgccggtcttcgacaggccgggctgcttgttgccggcatccggcttgttcggcttcaccgtgtcgccgggtttcgtcggctcagtcggcttcgtcagttcggtcggttcgatcggcttgctcggttcgatcggcttgctcggttcgatcggctcggacttctccctgacggtcacgacacgcttgaccgtgtacgacgcaccttcggagtcggtcaccgaatacgtcagcgtgtattcaccggccttctcggtgttcaccgaaccttcgaccaggatcttgtcggtcagatcgccgtcctcctcatcggaagcggtcacaccggccttcgggtcgaacgcgtcgacgttgatgttctgcttcgcggatgcgttgagcagctggtaggtggcaccgtcggacgtgttgaaaatccaccgggccgcggggtcggacttggcgtcttccaccgactcatcgctgaaggcgttggtgccgtccttggcgacgagcaccttgcagtccgtattggtgatgacgtaggccttgaggtcggggcgctcggtgtcggactggtcgatctgggtgaacttccaggcctgcttcttggcgtcggtcagggtctcgggcgtgtcggcgatggacagtgtggaatcgccggaagccgtggcggacaggttcttgccggactgcacgccgacaagctggtaggtgtgcccgaccaggcgatcaccgagacgggatggaacgcccacaaggcgttccgcgccatgccgcacgacgcgcagaccgcatttgccatccgcatgctgttcacccaccgcgacgtggaccgctacggcgccgacatgttcctgcactacgagcgcggcttcaacgtgcgcttcgagggtgccggctcgaacaactaccgaattcgggcatcggagcgccagagggatcccggacgcgcgagccgccaagcgcgacacacgcacaacacgcgacggttttgcttgtccgcgagtctgtggtattctcttcgagttgtctgttgaggctaaaaggccgcggcaaacagcgcaatggaggattcgcctagtggtctatggcgcacgcttggaaagcgtgttggtgtaacagcctcacgagttcgaatctcgtatcctccgctagcagggttttcggatgattccgaaagcccttttttcatgcccgaaaatggctccctttcagcgattccaaccaatttggcccatatgccattttgccgcgtgatgccttcgaatgacgttggaaacgccgatatcggtgacacacatgacggaccaaatcggtgtgtcactctaacgtcgaaaggaactccggcatgttcgctcatcccggtccgggggcatatgcatctgacgcttcccgcatccgcattttcgtcagtggacgtgacgctgcgtgtttacacctgtttacactggtttactctttttacaggtcttgatttttcattgctggtgcaacgcttgtggatgatgtgggcccatgggttccccggtacgatggtgtttgcctgcgacgaccgggtatcgggaggtcccatgggccggtacgcccgtcttgccttggccgagcgcgaggaaatcgtgttgctgaggcacgggggggggagctgcggcgggatggccggagcgacgggcggggacaaagcgaccgtcagcggggagatggccggaaactcgttcgccgttggctcggggcggtgccatcgtgcatcgaccgcccagcgtggctgcgagtcccgaagggtttcctgcgtgcggcccggggtcctcgacggcgagcgaggggcggggcttgtgcggcgtcttgtcgtgcgggagcattggtcgcccgggcggatcgcgggcgggatcgcggtcgagtggccgggactgatggtctttgcgtccgctatctacagggcgatcaacgagcggcggcttgatccacccggcctgacgcgtacccgccgtggaatcagggcgcgtctgcgtcataaaggcaaacgccggcacgggaggggcgggccggaggaacggcgtggcaagatcccgggcgcccgtcccatcgggcagcgtcccgagatcgtgggggaacgttccgggctcggcgaccgggaaggcgacaccgtcgtcggcaaaggcgccggggcgtgcctcgtcacgctcgtggaccgcagaagcggtctgctctccggaggacgctgcgccgcgcatgctgtctttcgtcaaataaatctgcgtgtcgtcaccagttaatctgaacaccatcggcgttcaaaatggacaccgtcaccggcggtccggctggttcccctcttttcgtttatctcatcagggagtggctgttgcggtacgactcgccacggaacctgacgatccttccgtggtgcacgatgcggtcgatgaccgcggcggccatgtcgccgtcgccgaacacctcgccccaccgtccgaactccaggttcgtggtgaacaccacgctccgcttctcgtaggaatccgcgacgacctggaacaggagcctggccccgtcgatgtcgatcggcaggtagcccagctcgtcgatgaccagcagcctggcgcggcctatcgcgcgcagttccgcgtcgagccggttctcgtccctcgcccgccgcaaacgcatcaccagcgacgacgcggtgaagaacctcaccggcatgcccctctcgcacgccagcatgcccgtggcgatcgccatgtgcgtcttgccgcatccaacgtcgccgtagagcacgaggtcctcggcccggtccacgaaccgaggtccatgagctgctcgcgcccccagtcggcggggaacgacgccatgccccagccgtatccgtcgaagcccttgacgcacgggaatcccgcgttcctgatcagcctggcgcgcctggattccgtccggctggcgttctcggccctgaacaggtcggccagcacgccgagctggccgggcgtggcgtccgcgaccacggaacgcaacacgctcctggtcaacggcagcccgcatgcgagctccatgacctcgtccggggtggacttgctcacggtccgcccgcccctgcgtccgcccgccgcggcgtccgtcgactcactcatcgccgtcctccctcatgaacctgctgtacgtgtcgagcctggccctcgattcgggaccgtcgccctgcgcgatccgcctggccgtctggtcgatcgcggccctgtcgggcctcctgcccgcggcgacgatctcgacgacggccatggcggccgcacggaagccactcgccacggccgcgcggcggatgccgtcgaccagcaggccacgttcgcgcggctccatccggtcgagcagcacgcgcgtctcctccgggaaatcggagcgtatgggactctcgccccacgaacgcggcttgcgcgcgatgatggcgagcagcgacagcgggtccatcgcggtgtcggggctgcggccccacctgcgctccagcgtgacgatcggttcgccgtccatggaacgcagctcgacccgcagggcccgcacaccggccatgagacgcatggaatgccatttcgggcccgcgaggtagcggttcgagtcgatcgtgaccgttccggtcctgtcggccttcaccccgcgccagtcgcacgcgtcgaacatggacggcggcagcgggagcatgtggtcgaggtccgtctcgaacaggtcccggatcggcacgtcctcgcggtagtggacgccgcgcgcgatctcgtcgcagcgttccagccacgcgtccgtgagccggtcccatccctccgcggacggcgtcggcaccatcaggttgcggcgcaggaaaccgaccgcgttctcggtactgcccttctcgtgcccggaatacgggtcgcggaacctcgtctcgaagccgtagtgcgcgcagaacagcgagaacagcctcgtctgggtgacggtcccgtcggccctgcggtggccgaccccggtggcgttgtcgaacaccagcacgcgggggaccatgccggcatgggagagcaccttgttcaggccatggcacacgcattccgcggtctcgccgggcagcgcggccacgtatctcatgttcgagtacgggaacgagaccaccaggaaatgcacggtccgttccacgccggcgaccacggccagggcctggccgaaatcgacctgcgcgctgcccggcgcccattccagcccgccggacccctcggcctcgccgcggtggcgttggctccagcgcttgacccatcgctgcaccgacgaataactgccctcgaagccgcattcctccacgagccgctcgtgcacgcgccgggcggtgtgccgctgtttgcgcggcatgcgccggtcggcctcgagccattcgtcggccttgcgcgcgtactcgcccgcgaccagggaacggctcgcagttcccccggtcggcggaacgggcgaataatcgcgggtcgcgtacttgaccacggtcgtccgcgaaacgcccagttccctggctatctgcgtatgcgtcaggcctttcgtctcgagctgcctgatactctgttgaatacgcaccggtgtcgtcattcctttcctcccgaggaccatgtgtggttgctggcactcgggaatctatcaggaaccgtacggcaccggcgcttttcttccgccgatgccatttccggccgccgtccgtgtccaatatgaacgcttataccgttcagatttggtggtgacgccgtacacgtttatttgaccataaacacatgccagacgcgacgttgccgatgcggggatcggcgcgctccgaaggcatccggagagccggaccgtgaccctggaccggggtatggagttcgctgacttcgagaaggtcgtacaggccaccggcgcggtgttctgcttcgccctgcccctccatccatggcggcgcggcggcaacgggaacaccgacgggctgattcgtgagtgtttccccaagggcgccggcttcaccgctgtcggcgagcaggaggtccgggccgtgtacgatgccatcgatcacagaccacgcaaacgccatggataccggacaccctgggaagtccaccattcaacggtgtcgcacttgctctgacgattcaagtttgcttggttttgatgtcggtatttcccttgtccaattggtaatttgattgattaagttaaaagcagtaaacttaaagcgctaattctcagtaagggtggacttgatagccaccttgaatgctaagcagttttctgcaggggcggttctccgccccgtttttattttcctgcagatgatgctctattgcttcaatgagagatacaatgcccctcaagtagacgttgctgttgaacaaaggggtgctggtgctgtacagaatccgaaagcgttacctgatcgggattgacgtgggccttatgtccgtgggattggccgcaatcgaggtagatgaatccggcttcccaatcaggattctaaacttacagagcgtgattcacgatggtggaatcgacccacaagccggcaagaagaaatcgatttctcgcaaggctgtttccggtatcgccaggagaacgcgacgcatgcgcaacaagaaggttgcacgcctccggcagctagatcttttgcttgaggagcttggctttccgattgtggagccggattccttggatgctcgtgacgcgtggcgtgtgcgtgccaaattggttgattcttatatcctggacgatgaaatccggaaagaggacgtatctattgcgttgaggcatattgcacggcatcgtggatggagaaacccgtattcgagtgtcgaatcgttgcttatagatactgtgccttcgaaacaatacgaagagctcagaagcaaggctgagcagaagctcggtagaaagttcctcggtaatccaactcccgcggaaatcgtctgccgcgtttgggaagagcagggtgagacggctcgactgcgcaccagcagacataaggacaagaacggcaaggtagtggcaagggaaggtctgctgcctgtaaaactgatgcagagcgacaatgctaaggagattcgcaggatattcgaaacccaacggatagatgatgcaacgggaaggaggctgctcaaagcggttttcaaggcgtcgtcgccgaaaggttcggcagcacagagaaccggcagagacgctctggctccggagcttccccgtgcgcttaaggcatcaatggctttccaagagtataggattgcaaatgttctgacgaatttggtcatttcggtaaaaggcgtggaacggaaactgacggtcgaggaaaagcggcgcgttttcgccctgctgtcgtccgataagcggaatgatgtcacatggattgacgtggccgaggaattgggtgtggaaagaaaccagatccaaggtgtcggtcgtctgaccgccgacggcgaagaacggatttcctcgatgccgccgcggaacgtcaccgtgtcccgtatccgttcggtaaagttggtcaggaagaagttggctgcatggtggaagtccgcgtcagtcgcggaacgggaaaccatggtggagattctttcgagtgccgttgatatcgatcgtgtccgtgagcatatggattatgcgtcggcatccacattcatcgattccttagacgacgaggaactagttgcattggactcgatgaatcttccgtcggggcgtgccgcatactcgattcagacattgaagtgtctgacagaaaggatgctgaataccgatgatgatttgcatgaggcccgcaaatcggttttcggcgttggggacgattggaaaccgccggttgatgcgattggcgtacctgtgggcaatccctctgtcgatcgcgtcctgaaaatcgtgaataggtatcttctggcttgccagaggcggtggggaaatccccaaagtgttcagatcgagcacgtgcgggagggtttctcttccgtcgccaaggcaaagaaaacggaaaaggcccaggctgagagggcacaataccgcaatgatttgaaagaacagatacgcagggaaaaactcgccaagatacgcgaatcagacatcagacgctgggaggcggtgcaaagacagaacggggagtgtctgtattgtggcagaccgatagactttaatacctgcgaaatggaccacatcattccgagaaaaggtgcggggtcgaccaatacgcgtgtcaatctcgcagccgtctgtgcggtgtgcaacaaattgaaagataatacggctttctccgtatgggcgaggacgcaggaggcaattgcacaagacacatcaggttacaaggtcagcctgcgcgatgcgattgaacgtgtcaaggtctttaatttcgaccaatctgtgccgtcgccacgagaccagcgtgtattcagacaggccatgatttcgcgtctgaaacaaaccgaatcagatccggcgatagacaatcgatcgattgaatcggtggcatggatggccgacgagctgcatcgtcgtattgaggcttattttaatcgggacgcggatacgtcgaagaataccatcaaaaccaaggtatgggtgttccgagggcggttgaccgctctggcccgtaaggcgtgcggaatcgaagggcgcatacatttcgctggaaagcagaggaaaactcgtcttgataggcggcatcacgcagtggatgctgccgtcatcgcgatgttgaaccattccgtagcccagactctggttgaacgcgactcgctttgtctttcgcaatggataacgagaagacccgagacatggacggaataccccttcgtggaaggacagaagaagactcgttttgaggaatggctttgtcgcatggatgggctcctggatcttctgaacaatgcactcgatgccgactgtgtccacgtcatacgcaaccagaggttagcgcttggcaattcccaggcgcatgacgcaatcatcaggaagatggaacacgtggaacttctttcgtccatggactctgatctgatacgacgggcttccactcccgcgttatattgcgctttgacgagactgcctgattattctccggaaaatggtttgccggagaatcacaatcgtgaaattgtgctcaatggtaggcgtatccgttcaacagagatggttgatttcttcgcgagcggcgcggcccagatagcagtgcgtaatggttccgccgaaattgggaacgcaatccatcatatgcggatataccgttatcgaaaaaatgggaagagcacgcaggaatatacgtatgggatgattcgggtattccaagtcgacctcattcacgcgtcatcgaaagatcttttcacggtgcagcttccacctcagtcggtttccatgaggtacggggacaggaatacggtccaggctatccaggaaaaacgtgcagagtaccttggctacgtcgttcccaacgatgaaattgtgatcgacttcgaaggcgttcagatgaaggacagtgagaagataggcgcatatgcgagagatttcagcggaactgcctctgaacttgcgcagagacggcactgggtggttgtcggctccgatgtaagtaagttggctttacgccctgcctaccttgctgaggagggactggaaaacttagaatctgatcgtttctcagaacagacacgaaaggtcatcggaaagggatgggtcgtcgcgattaatgttttggccaaatatcgtcctgtcgtgataaggcggaatgcgctgggcgagccgagattccggtccaattctgggatgccgatttcgtggcgttggaatgggtaggttttgatgcagagccagtggcgtgtgattgattgcgttgatctcgatgggatgatttcatacgaacgtggtcatatgaaagtgaaaagacgcggcgatgacgagcctgtctccattcctctcgctcaaaccgcggtcgtactgatcggacttcacgtttgttgttcctctgccgtgctctatgaaatggcaagggccggcgtgtcggtgatgctctgcgattggagaggtgttcccgatgcggcgttgcattcatgggccaatgttccgtcagaggtcgcggctcgtcaaattgcgcagagtggtatgaccctgccacggaagaaaaacgcttggatgaaaatcgtcaaagcgaagatacgcgggcaggcggcctgtctcgatgcgcttggaatagagggaggaggaatccttcgtggcattgcttcctcagtcaaatctggcgatatttcgaactatgagggatacgcggcaagagaatattggagaaggatattcgctggtgatgggaaacggtttaggagagttccgggaactggaacaggtagaaacgcccaactagattacgcgtatatgattctccgcggttttactattaaagcgattcttagtgcgggcttgatacctacattgggagtgaaccatcatggtcgtggtaactatttctgtctcgcggacgatttgttggaagtctatcggcccgctatcgattactgtgttgcccaactgggggtgtcggattgtttatccgacagggacgtgaagaaatatctcgctgattccgtcaaccagcagtttaattcatccggtttgacgataccaagttcggtaagcgatttcgcgcaacagtttggtctgtactgtgagaagaggatcgattcattggtggtaccggaatatcagggtccttatgaaaaaagatgaggacagtggtggcatgtggtgcttggtgatgttcgatttaccggtgaaaacgaaatcgcaacgccgtgaggcaacgaagtttaggaacatgcttttggatatgggctatagcatggtgcagtattccgtatacgtaagatacacaccgactcaggcaggcaacagatcgacagtaatcgcgataaaggagaatcttccagctgaaggcatcatacgggtcctccatatcggtgaccatcaatggtcgacctcattgcgtttttccagctcgaaacgggtcacagtcgatgagacgccggattattttacgcttttttgaatagaagaaatctaataaaaggcggaaaatagcccttcttgataagaatacaagtttatcaagaagggtagaagctaattcccagtgtgccgggcacctcgcggtgcagcacgacaagtttatcaagaagggtagaagctaattcccagtacaaacacattcgttcgcccttgcggttcaagtttatcaagaagggtagaagctaattcccagtcaataggcgaccgtacggacgcaatcagcaagtttatcaagaagggtagaagctaattcccagtaaggtgttcgagcagcattacgtctatacaagtttatcaagaagggtagaagctaattcccagtgtttcataacggtaatcggcgcgtttttcaagtttatcaagaagggtagaagctaattcccagtagataaagcgcctacacgggatgtccaccaagtttatcaagaagggtagaagctaattcccagtcaacgttagcacatggctacgaagtacgacaagtttatcaagaagggtagaagctaattcccagtctttgcggctggcttccatgctgcatttcaagtttatcaagaagggtagaagctaattcccagtttgtgtggtgtatttgtatttgtatgtccaagtttatcaagaagggtagaagctaattcccagtccatttcaccgcctgatatttgcttgatcaagtttatcaagaagggtagaagctaattcccagtttaacgatgttgtgagcatgatcggtagcaagtttatcaagaagggtagaagctaattcccagttcatccatgcgacaccgttgaccatgaccaagtttatcaagaagggtagaagctaattcccagtaatagtgatatcttgtctggcagtccgacaagtttatcaagaagggtagaagctaattcccagtccaaggacgcgacgttatccacgacaaccaagtttatcaagaagggtagaagctaattcccagttcaactcggtcaaccattatctgcatgtcaagtttatcaagaagggtagaagctaattcccagtaccgcttcgacatcaccgtcaacggcaccaagtttatcaagaagggtagaagctaattcccagttcggcaaccagtgggcgctgaccctgaacaagtttatcaagaagggtagaagctaattcccagtatggactgactatatcaatacaaccacgcaagtttatcaagaagggtagaagctaattcccagtttcctgcgacggcgctggcgcgtcgtctcaagtttatcaagaagggtagaagctaattcccagtccgtttggaaaccctcgtgtgcgaaactcaagtttatcaagaagggtagaagctaattcccagtttatttatcgtggttggcagcatctctcggtagtgcccgaaaggttgcgcactttggatcatgcccgcccatggcgcgatgaccggttcgcttcctgcagattgtcaccgagccgggacatgtcgaggtaacgccggttggaccattcgttcgcggtgacgtacctgatgcgcgcacagacgagcatgagcgcgccgttcccgtccgggaagcttcccacgacgcgagtgcgccgcctgatctcgcgtttgagccgttcgatcatgttgttctattcttcccgcctatctttttcttgtgggggcgttggaaaaccgccgttttcgcgggccggtcgcgctggtggtctgacttgtggtgcaactatggcgcgactcgggccgcgatatggttcgggaaggttttcgcttcgcgcaacctcgtcgcgggtggagggtgatgggctggcggggacgggcgcagcgcccatggtgtcgttccccgtgtgtgctccgcgcagtttttttcgttttggttcgcaacaatcccagcctccgtatcgcaagcgcatcgcagcgaataccggtcggcccagcgcgaaggttcccccggaccccctccgagaaacgccacacgaacgcatacgggtgccatgaaagtccattcgaaccgtcaatcaactccttgatacatagacaggaagtcaaggaacgttcgtcggtcggatgggtccgaaggagaaaccggcaaaccccgccggcatccctcccccgggtgttcgccagcgaacggcaccggctccgccatgatcggccaaggagaagacatgtgcccagaccccatccgccgcaaaggcaggaaaacactcgccaaggtatacgattccctatccggcccggaaaaggccccggacaggtcgcgcatcatcgggctgcccaccaagaaggaggcgcgcgacattcggaacgaattgacggcggcggcgtgggtgggcggcagatcggtgtcgcgcatacggacggccaaggaatacatcagcgtcgtcgaatcattcttccgcaagctgcgggccatcaaaaacgcggagccgcgaaccccgcagacgggtattccgtccctgcgggagctgctgagggatacccgcgtgaccagccttgacgagtatgaaagaatgcttgagatcacaagcgcggatacggtaatcctgcttgtcggcaggaaagaccgccgaggcagaggagcccggatgctgctggccttgaacgagatgcgactgaaaatggggaaggcgacgatcctcctggcccacggggcggaaaaagaccacaaagccgtcctgcccgcgtacaagcccaggttctaccggcgataggcaaaggcgtgaggcggcgttccggcggctccccttcgccccggtcgcgcacgcgcccggctggccgccgttccctcttccgccttacccttgaatcgtttttgtcgccatcgcgcacccacgggccggattcggctcgattcagcccgattcagctcgtaccacactccttttccgccgccccatgagtgttttactgcccgtatcgccattcacggcattccacctaaaatagccttcaccagagctgcaacagcgcaagaacgcaactcattcggcaccagttggctttatggcctcttaagtaggaatccaccaattccgctacattaactcagatctttacgaatagaaccttcatcctgtacttttgaacgcctcaatacaaagcagcagtccctgatcaccacgggtattaatcgtacaaagctgttctaatagcagcctcataaacattaggctccggcaaaccaacatttgagaaagcggcagacactttttcaacagttgtgcaaccctctccagcaactttaagcggaacaggcctgccctccacagctttatcgaaatcgtagtcatagcgcaggaagtggatggctccgggctgtgagggaaaaccgaaagaaagattgtgctctcctccaagtcgcctcataatgcggtcataaacgggaacgggagtgacaaaccaaagacccgtcttattaagacgttcacgttgcaacacttgccctttgtagacaatctgaggaataattcgtttattaacgttctcccagttcaagcccactgtggatttaacgattcgacgttctggctcaaataacgcaagacgagacaaacgataattccccgtggtatcgatagtctgcacctcaatagcagtgaactccaccaaattgccttctccgtcgagacgggcgagaatccaatcaacaaagtaattcccaaccccatcacgttttggaagctttaattcaccgccccagtcgtgtccatatacggcgactgcaccaccttcttctttcgctttgtagagagcgagcttattcttaccagaataaaggttgagatcaaccccgaaagacttatatgcaataatcttaagcattttgtaatcgtctgcatatagacgaataggacaacaaatagtaggtgttgcgtccttaatctgcgctacagcgcaggctccgctgataccaccagcatcatcttccgctacaggcttagtacattgtttgcctagaaaaggacactgtctacgtgcagatgccaattttgccgcatccgttttatctgttgagaggtatccgaagaagtcaactattgttccggccatgttcatgcctcctttagcactgctgataacgacgtacctacagcaagagcaagtagtggcggcactgcattgcctacctgcgcatattgttcagcctgagaacctgtaaatacatagtggtcaggaaaggattgaatacgcgctgcttctctaactgtaaatgccctgttctggtcagggtggaaaaaagcaccccagtgggggtcgcacttggtgaggatcgtggaagataacccatcccacataggacgtccataacgctttgtgtgatcagatttcctagctttacgcatgccttttggcaataattcatccggaatgtctgtccaatttcccccctgctgaatgtagtttaggcgctgcatgttaattgcagagagtctaggagcttcatggttcagaacacctatggagccgcgcctaagcgcacgctgataatcacactgcggccttaccgggtattctttgaccgcttcgccgcgttcaccgttctgtaatgaaggcaaatctccaatggcttcacgaagcgtagtgaatggcgcatctgtttcggggctaggctgcttaacaatttgtcgcccatcaaaagtggtagtgaagttcgctcgcacaggagcatgacgagtgggttcaggccaagcggattgcggtataaccgcgccacgaaggccaagaatgatagtacgccaacgcatctgtggcacaccgtagtaaggggcacccagaatatgcacatcagcaccgtaaccgagatctgccaatgcatcgagaatcgcatgcaaagttccgccgtgctcaaaagagacgagtcccggcacgttctcgattagaattgcacgcggctgaaaggcatccacatagcgtagatattcacggaacaaatggttgcggggatcctcattggaacgaacaggcgcattaatggagaacccttggcagggcgggccaccagccactaaatcaagttgacctttctctaggcccaattcccggcgaacgcgctccgggtcagttttacggatatcttcaacacataccttagcgctgggatgattcctagcgtaggtctctgcatattggggaacaatctccgaggcgaaaagggtgtgaaacccagcctcctcaaggccttccgaaagacctccagcgccagcaaacaagtcaatggaaatcaggtcggatgatggcgtaagagtcaacgcatttcacctgccttcacgcacttcatgactgctcctcacatgtaggtccgctataggcacaggcgtcataagctcacacaagtagcagatgttccaataagcggcacatgcctacagaccagcgtatgaagtttaccagtgggcacgtaccgacatgccgaccatcggtcttccgactaatcgtcttgggacatctacctctgtctcatttttgtactttccaagagtttccgcggaggaacgacttcaatctacatcagcagattccaccgttgcttcgaaacaattcatccaaccgctttcacatcttgcgtcgctattcatgggtatattcccgaacggtcacctcagtgtcatcggcatgttgttcgtcgtttgaaactggcagccttcgcggaagcgagctgccacgccagccactcgcccggctggtcctcggggacgcccttgagcgccttcgccttcccgatggcgtcgtcgagcttgtccagcagcttcggctccttgagctgatccgccttgtatgtggtggcggtggcctcgtccacggccttcatgagcgccttgtcggccttcccggcctgttcgaccgccgcgtggtatccggtcgattcgtggtgcgtccagtaggcgtagccgccgccgatgcccgccagcgccacgaccaccgccgcgacgatgacggcggtgagtttggcgggcttaatacccttgggcttgctctcctctggagtggcgtcatccatggtttccactccctctgatggcttcgtcattactcttccctatgtccttatgcgccgacacgtcgattcgcccatcgacatggatataacggcgcggaggccgtcaggccgaagctccttatcccgtggagacgtcagagacaaccgcgcttccatatcatgcgaattcaatactacattcgaccaagaaatacaaccgaagaaagcgccttcgttgaagagctaattcaaacgattgctgaacgtcaaaggcatggtcgtcgaggacgtgtcggtggacgattccccgttgcgtcccgctcccgcgctggtggtccggctgcggtgccggaaggcggcactcaggtgttcgcgctgcgggcgcaagtgccctttctgcctacggatagaatctggtcaaatcaagcaacgatgctgtcctcactttgcaaaagcgccgaccataaggcgcgaattgatgcatcgtgttcaatggcggacagccgataccgcacctcgccatcagccgcccgccatcgttcgccaccgccgcagccactcaccgctcacccgagcaggccaagctccttgagcttgttctggatgtccacgacggacggctcgacctggaacgacccgtcgccatagagcacgaccgggatgtgcttttggccgctgatctcaacggcacggtcggccgcgccctcctcctgctcgatgtcgtgccacgtgtaagcggcgccgaaccggtcgagcgcgttcttggcacggtggcagtcgccgcaccatgttgcaccatatacatcaatcgccatgggaactctcctctcgtcatatgctctacggcacatctcatgaaagacatgcaccttgcgacctgcgatgaagctcgcagccgtctcatacgatatcgtatccggcaatgcttggtgccagttaccctgtcggctgacagcggatgtagctagctccggctctccccgcccccccgccggcactcggcgatgaacgccgcgcagatcataatcacctgcgccaccaagttgaaccagatgagcacgccgatgatagctgcgaacggcgccagcatcgggttgcgcgacgcacccgtcaacagacgagcgcccagcagctgcatcaccgcgaccgccagagccccaagcgccgcccccaccagcgtgaatttgcccgcgcgtatgtgcgcgaccacgcgcagcagcagcatgaacaacgcgaaattcagcaacacgccggtagcgaaaccggtcgattccagcaacagcgcgcccggcagcgaatcatcggcgatgccaagcgcccgcaacaccagtctcatcaggccgccagagacgacgcccgccgcggtcgacaatatgaacagtaccgccaccatgatcgcagcgaccgtatcgcgcaatcgcgccttaaccacgttcagctcctgcgtgcaatcgtcgaacatggtcgtcactgcattgcgcagggaattcatccaaccggtgaccgtccaccagaacaccgccagcgtcaccagaccggtccatgtcagcgtatgcgagattccactcagcatcgacgcggaaaacagcgaatcggaaacgctcggaatcaccgtgcgcagcatcgcgagcagcgccttctgcatctcctcgctcccggtcaccaccagtccgagcgcgctgaccacgatccatacgccggcgaagaacgcgaacagtagcccatatgccaacccgttcgccagcagcggcccgcgccgcgacacataccggtcaatcacccgcccgatcagcgagcgccgccaccatgcaaccagcgaatcaatcgcctcgcctatcctgtgcagccattgcatgattcgactatacgcggtcgcgcgactgtccaccacgacggcgatagtggtggcacacatgggcatcgaggtaaaggagcacgcatcatgacagaaaatcacgcaagcgaccaatcaccgcagcccggacaatccagccagcccgctcttcccacgcgactcacccccggccagcccgctcctgatttcaccctgcctgcggtcaacccggacggcggtgagacctccgtcacgctgtcgcggctgctggcgcagggcaagcgtgtggtgctgtacttctatccggccgcgatgacgccgggctgcaccaccgaggcatgcgacttccgcgacaacattgcccggctcaccgcactcggtttcactgtgctgggcgtctccaaggacccaatcgacaagctgcagcgtttccgcgagcgcgaccacctgtcgttcccgctgctgtcggacgcggacctgaccgtgcatcggctttacggcgcgtacggcgaaaagaagctctatgggcgcacgcacataggcgtgatccgctcgacattcgtcatcagcgtgtctgttacaggcgcagccggcacgatagaaatcgcccgttacaacgtccgggcgaagggtcatgtggcttctttgatgaaggctctgcaataggcgctctcaaaactcgcaggtataacgattgacgctcgaaaaaagccttgtatctgcaagttttgagagcgcgattatacgcgcatggcctctttggcggcctcaacctgtgcaggaccgccttcgccggtggcgatgaagcgcccggaggccagcacatagtagcgatccgcccgttcgacggcgaattccttgagcaccgggaacatcgtcacggcctcgtcgtaccgcgctttcgcctcggacccgtaccggtcggcgaccacatgcagg

SEQ ID NO: 569 - DNA, 23366 bp, synthetic construct
  misc_feature 1..23366: note = Synthetic
  source 1..23366: mol_type = other DNA
gaaaccgattgtgaagtggtggcgggacgtgtgccgtgcaattggggtgaggccttcaaatcggtggtcggtaccggtgccgcctccatcgtcagcgatctggacgaatctcgtctcgcgcttgagatgctgatgaggcagcaggcgggcatggagcatgtcgaattcaccgaccagcaggtccgcagtgtcaccgtctggaaggtcgagtcggactatgtcacggcaaaggtgcgtgaaagaccgcagccgcgtcagtagtcttccccgtcatgctggcatatccggattcgaaacgacgttttgccattctggaacgccgtccaagagagacgggcatcatgtcgccatcaagcatccgtgcgagcggtggaatggatgatgcgtgcgaacaccagatagatgatccacgcgagcggcatcgtcaacatgaacgccggatagaaccagctgatcggcatgtgtccatagaagatgcccgccagaatcgggcccaatgccatacctaggtcgagacccatgtaatacgtgctgttggccagtccgctgcgctctcggccggcaatcaccacagcctgcgcctgagtgaccgaactcatcagaccgtagctggccgccatcgccactcctgcgccgaacaggtaccagtcgttcgtcatgaacgccaggaatgtcagcatgacgagcattgcgatcgagcagatcgtcagccagaacttgaatcctttggaatcgaacagatccttcatggtgatgcgcatagtcagtagggcggccgcatagaacacgaagaacaggtcggaagaaaccgccagatgacgtgttgcaatatagtccacgatgaacgattggttcgcgaaataggggatggcgaacatcatgaacaccatcgtcaacggaatcgcgcgcggctccaccagattgctgaaacggagatgacgtgcgatattgcgccatccggcgttgttccgtgacggcatcacggtctttcgagccggattgccgccgttgttgaccaacatgacgacgaccagcgtaaacacattcagcaccaatgacgacacgaacgtcagatggtagccgaccacggcctgcaggcgaatgccaagtgccggtccgacggcgatcgcaagcgcgttgacgataccgtacaatcccatgccggcgcccatatggcggatcggcagcagcagcgacacccaggtcgccagacacaccgaaccgcaggcgaatcccagaccgttgaccacgcgcgccgcaatcagcatccccgtggaattcgccaggcagtacatgatgccggcgatgatgtacaggcttgtgccgacggccaccagcagacgtttgctcaccagatcggacagattgcccgcaatcggtctgcagaacagggagacaaaactcatcacgccggcgatgatgcccatcatcgtgccggccgcacccatggattcgccataaccggcgatgatcggcgtgatgatcatgttgctggtcatgaagaagaacgtcgccagcatgaccaacgccacgtcacgggtgatcagccggtccttctttggcttgcttggcatgttgaaatttccggatgttacggacggattggccggggagccggtcgatccgtttgcatcgcttgcagtagatcgcgtcattttcgcctccggtgttgacactttagcgaaacatatgaaaaacggctgcccacctaagcggacagccgattataggatatcgtgattgacggcgaccttacaacgatttggcggcctgctcgacgaaatgctccataccgtcaatctcgacgacatcatcgaaacgtacatcagcgtgttcaaggccgcgcagtgcggctggagcagtggtgccggtggccttggcgagcacgtccatgcattcgaaatcggtgccggacgcatccaagccgagggattcgttgactacgcgcgggaacttatacgggctggccgtggaaagcagtacacgcggggtgagcggatcgcgcggcatctgctgcatcacgtaatagccgcaggcggtgtgcgggtcaatcacgtagtggttcttgttccagcagtcggcgatcatctcgcgcacctggtcttcgtcggcccaaccggtgccgaaaatcgaacgaatcttggcgagcatcggttcggggacctcataggctccccactggttgagatcgttcatcagcatggcaatcagacgagtgtccttgtcggacatgtagtacagcatgcgttccagattcgaggagatgaggatgtccatcgagggggagatggtctggaagaacggacgctgacgattgtatgtgccagaggtcaggaagtcgaacaacacgttgttcctgtctgaggcgactaccagatgcttgaccggcaaccccagcagtttggcgtagtagccggcgagaatgtcaccgaagttgccggtcggtaccacgaactcgacttcgtcgcccacgttgattacctgctgctccagcaactgcgcataagcggagaagtaatagacgacctgcggcaccagacgacccacgttgatggagttcgcggaggagagcgccacatgggaatcgtcggccagacgttccgcaagctccttgtctccgaagatgcgtttgactgcggactgcgcatcatcgaaattgcccttgaccgcacacacgttcacgttggaaccggtctgcgtggtcatctgcagctcctgcacctggctgactttgccttccggatagaacacggtgatgccagtgcccgacgcatcggcgaagccggcgagggccgccttgccggtgtctccggaggtggcggtgacgatcatgatcttctcgtggctatcatcgtcggccggagtggtgcgtgccatgaagcgcggcaggatctgcagggccacatccttgaacgcggaggtcggtccgttgaacagctccatcacgaaatcgtcgccgagcggcttgaccggagtgattctctcatcggaccactgcggcccgtacgcctccgtaatgcattccttcaattcgtcctcggtgaaatccggcaacagtacggacaacacgtcaaacgcgatctgctgataggacttgccggccagggacgcgatgtccacatgggtttcgcccagggagtcggtgacgaacaggccgccgtcatcggctatgcccttgcgaatggcctgcttggaggtgagcgagtcggtggtactgcgtgtgctgtggaacgtggtcactggacatccttagcaataaggcggatagaggtaaatacaccaccagtgtagtggtaaaggtgggcaacgaggggctttgagtccgtgaaatggaacgatgatttcctccatgtttcgaaacgtctctcgtcaaaagcgattgcgggtcgtagactgcttccttaagccgcattcctcgcggactaccagtaccagccaaggagagcccatgactgcatcacctctcgcccagaccccgaacgacatgttcaatgcccccatcgcccaggccgatcccgaaatcgccgccgtgctcgacgccgaactgtcccgccagcaagacggcttggagatgatcgcctccgaaaacttcgtgccacgtgcggttctgcaggctcagggctccgtgcttaccaacaagtatgccgaaggctatccgggacgtcgttactatggcggctgcgaacaggtcgataagatcgagaccatcgcacgtgaacgcgccaagagcctgtttggtgccgaatacgtcaacgtccagcctcattccggcgcccaagccaatgcggccgtctaccaggcgctcgtcaagcccggagacacggtactcggcctggccctcgatcacggcggacatctcacccacggcatgaaaatcaatttctccggccgtttctaccatgccgaagcctatggtgtgaaccctgaaaccttccgcatcgatccggaaatcatccgtcagcgcgcactcgaaacccaccccgccatgatcatcggcggctggagcgcctacccgcgcatcgaagacttcaaagccatgaaggaaatcgccgacgaagtcggcgccaaattctgggttgacatggcccacttcgccggccttgtcgccgccgggctgcacccaagcccggtcccatacgccgacgtcgtttcctccaccgcgcacaaaacccttggcggaccacgttccggcttcatcctcgccaagcaggactatgccaagaagctcaactccgccgtattccccggacagcagggcggcccgctcatgcacgtgatcgcaggcaaggccgtcgccttcaaagtcgcggcctccgaggaattcaaggaccgcatgcagcgtaccctcgacggcgccaagatcctcgccgaacgcctcactgccgacgacgtcaaaaacaatggcatcagcgtcctgacgggcggcaccgacgtgcacctagtcatggtcgacctgcgcaacagcgaaatggacggacagcaaggcgaagacctgctcgcacaatgcggcatcaccatcaaccgcaacaccgtgccgttcgacccacgcccggcatccgtggcatccggcctgcgcatcggcaccagcgccctcgccacccgaggcttcggatccaaggaatacgaagaggtcgccgacatcatcggcaccgcgctcgcagccggcaaggatgcgaacgtagacgcactgaaggcccgtgtcgacaagcttgccgaagacttcccgctgtacccgagcctcgatcagatccactgatcgacaggcatgcgacgcaacccaatatgattcacgaatcgcgtctttcccggttcatcggcgaaaatgggccatgaaccaggaatggcgcgatttcgcgctatggtaggagactatgacgaatccacagatggaacaaggcgcagtcggtgccgacgcgttcgcggcggtctgcgcaaagggcgacgccgcacgacgcgcgcagggcctgctggcgcaatccaacacggaagccaagaacgaactgctgctcgccatcgccgacgcactcgacgcacgcgccgacgaaatcgcaggggccaacgcgctcgacatgcaggaatccttcgaatccggcatgagcgcaggcaaactcgacaggctcaaattcgatgtgccgcgagtggccgccgccgcgcaaggcgtgcgtcatgtggcctcactacccgacccggtcggcgaaatcgtacgcggataccatctggaaaacggcctgcgcctcgagcaggtacgcgtgccgatcggcgtactcggcatgatctacgaagcccgacccaacgtcaccgtcgacgtggcctccctatgcatcaaatccggcaacgcagtactcctgcgtggcggacacgccgccgaacgcacgaatgcggcaacgctgaacatcatctccgacgtgctcgccgaacacgagttcgccccggcgctggtcgcctccgtcgacgaattcggacgcgcgggcgccacagccatgatggaggcgcgcggccacatcgacgtgctcatcccacgagggggagcaggactcatccaagccgtcgtacgcaattccaaagtgccagtcatcgaaaccggcgccggcaacgtacacatctacgtggaccgttccggaaacctcgacaaggccatcccgattctcctcaacgccaaaacgcaacgtgtcggcgtatgcaacgccaccgaaaagctgctcgtacaccgcgacgtggccgaacggttcattccactggccgcgcgggcgctcgccgaggcgcaggtcgagatgcatgccgacgaacgggcctacagcctgatcgacaaggccggcatcgatggcgcgaacttcgtgcaggccatcgatgaggattgggataccgaatacctggcattgaagatcggcatcagaatcgtctattcgctggacgaggccatcgaacacatcaaccggcattccacggggcacaccgaatccatcatcgccgaggattactcggccatcgaggaattcacttcccggatagattcggcggtggtaatggtgaacgcctcgacgcgattcaccgatggcggagtgttcggtttcggagcggaactcggcatctccacgcagaagatgcatgcgcgaggcccgatgggacttcgtgaaatgactacgaccaagtggatcggatatggaacggggcaggtgcgagcatgaacaagcagatcatggaggatatggataatccttggaatgctgaccgcgaggacccgcggctcgggttgcgtcttgcttcggaacgtctgagcatcgtacggtacgtgttcctcgtgcagatcgaggatggcatagcctccgccgcccaacgcgcctcactcgaatacgccgatgcggtgctgatcggctggccggagaccgatgcgggagatgtagtcgaccttgacgatgaccagttgaggaacattgacgagcagatgcacctgatggagcagtacattgccagattcagcgcgatggaacgtgagggtgacatcgatggcatgaccgataccctgattcgcgtcaccgaacgggtggccgaggtacggcgcttgtaccagcctgactttcccttgccgaccttcgccgaaattcgtcgcgtcgtgcaggatgaatgggatgaggatatgggcaagatcgacccgcaggagggcgcgcccaccgcggatgagatcgagcgtgaaaccgccgacgccgacaagctacaggatgaggagaccgcatgaccgggcctcgacgcatgcgtccggaatcggccgaagccgattccgagcttgccgtcagctatgtgatcgaaccggaaaggcgtatggcggacctgtccgtcgacgtttccggttcggcagtggcctccgggcgtaggtcggcgcgcggcaattggcacagtcgacctcgcatcggcatcatgggcggcactttcgatccgattcacaatggccacttggtggcggcatccgaagtctcgtgggtctacgatctcgacgaggtgattttcgtaccgacagggcgaccggtgttcaaactcgacaagagggtcaccaatgccgaagaccgttatctgatgacggtgatcgccaccgcatcaaacccgaaattcacggtatcgcgtgtggatatcgaccgtcccggcatcacgtataccatcgatacgttgcgcgacatcaggacgcagcatccggaggcggaactgttcttcatcaccggtgccgatgcggtcgccgagatcatgcagtggaaggatgccgacaagatgtgggagctggcccacttcgtggccgtgacacgacccggatactcgtctccggaaggcgtgaaacttccggaaggcaaagtcgacacgttggagattcccgcattggcgatttcgtccaccgacgtgcgccgacgcgccgaacatggtgaaccggtctggtatctggtgcccgacggggtggtgcaatatatcggcaaacacggcctgtaccgttgattttccacatgaacacgcgaggctcgtatggtctgtgtaaacggttagtattggtcacgtccaattgacgcgaaaacagacgtttggagacatggtgagcgcaatcctcgaaggaaagccggataaaaaccttatccttgtcacaggcaggacgcatccgaagctggcggcggaagtcgcggaacagctcggcatcgatgttctggaaaccacggcatatgatttcgccaatggcgagatgtacgtacgctacaccgaatccgtgcgtggcgcggatgtgttcgtactgcaaagccattgcaacccgatcaatcagtcaatcatggaacagctcatcatgatcgatgccctcaagcgcgcttccgcacgttccatcaccgcggtctgcccgctgttgggctactccaggcaggataagaagcatcgcggtcgcgaacccatctcctgccgtctgatgttcgacctgctgaagacggctggtgccgaccgcatcatgagcgtcgacctgcatgccgcccagtcgcagggtttcttcgacggtccggtggatcatctcatcgccatgccggtgctggtcgattacatccgcgaccgtttcgccaaccagctcgacaatgtcgccgtggtctccccggatgccggtcgcatccgtgtggccgaacagtgggctcagcgtcttggcggcggccctctggccttcgtgcacaagacccgtgacattacccgtccgaaccaggccgtcgccaaccgtgtagtcggtgacgtcgaaggcaaggactgcgtgcttgtcgacgacctgatcgacaccgccggcaccatcgccggcgcatgcagcgtgctcaaggacgccggtgccaagtcggtgaccgtcgtcgccacgcatggcgtgctgtccggtccggccatcgaacgtctgaagggtagcggcgcccgcgaggtcgtgctcaccgataccgtgccgattccggaggagaagcgttgggatggcctgacggtcctgtccatcgcgccgctgctggccagcgccatccgcgccgtgttcgaggacggctcggtcgccgagctgttcgacacgtatcccgagcatcacgggcagggcttcctgttcgcctgatagctgatcaaagccggcggccatatcaggtggcccgcgggcttgcacgaggcactgctgaaactgcggcatcacctcgcgacacgctgggttggcatgatatggcataataaacacttggtggtgtttcccaatggaattccgccgttcccccatggtgtaatggcagcacacgggtctttggaaccctttgtcttggttcgagtccaggtgggggagctaccgagacgggttctcgcggagaagcgggaacccgtggccccgggtcggttagatcggcgtccagggagccatcacaaacgcgcgaggcccaacggccccgtgcgctttgctttcttcacctccttccggttgcctgtcccaagggcggagaagtggcagtcctgaggtccgttcgaagcaggaccagcatgttccgtcacggttcgagttgacgctttccgaggcaacaacacaaccgtaacgcgaagctctccaagctgctagaaatatcgttcaacggcaggatcatgggcatcacgccgcacctcaaggcaggtcacggaaaaagacagcgaggacacgctgcgaatctactactgctgggatccgatgacggggagataatcatcggacatatcggcgcgcacctgcttaacgataccggactgaacaccaagttctgctaaccagaagtaggatgaaacggagaaggacggcacaaatgaaaaaacactggcgaatctgtcacacttcttcttatcgggcatggccgacgcgtgctccgaaatgatgatgaatcatcgttatcctcattttcggatacacggttcccgagtacaaggacatgccggacctcaggcacatatgagtctcgagaaagcagtcgcgacgcttcaggaggaaggctggaaggtatatacggcctgcgtgcgttcaagaagcctgtctgggctgtgagaagatcggttgcgatgaaggctgattataacgattccagagagttgacatgggatgggcttgaccggtcatgaaggaggttgacgacaccccgtggaaggccctagggtacaaaacaccgaacgagatatgaaacaaaaggattgtcaggctaacatcggaatcgacgggcacgaaaacaggtgttacttttataaaacgaatctggattggattgattcgtcatatggaatgggttataatgaaagcgctaattctcagtaaggacggactcgatagccgtcttgaatgctaagcagttttctgcaggggcggtttccgccccgtttttatttttcatgtgaatgctgcggtgtctttctggcgatagggatacaataacccctaagtgcgtgttgctgctgaacaaaggggtattgagtgttgtacaggtgtcgcagacgttacagaatcggaattgatgtgggtcttatgtctgtgggattggccgcaattgaagtagacgagacaggctttcctatcagaatcttgaacattcagagcgtaatccatgatggcgggattgacccgcagctgggcaagaagaagtcgatatcccgcaaggccacttccggcgtcgcccgaaggacccggcgcatgcgcagaagaaaggccgtgcgtcttcgtcagttggatgcgactcttgagagtttgggcttcccgattgtcgaaccggattccttggacacttgggaggtttggctcacccgcgcgaaattggcgggttcttatattcaggatgacgaaatccggaaagaggatatctctattgcattacggcatatcgcacggcatagagggtggaggaacccatattcgaatgtcgagtcgctgttcgtggacgtcgcgccttcggaacaatacgaggagcttagaagaaaggccgaggaaaagctcggcacgagtttgtccggcaacccgacttccgcggagatcgtcgaatgcatcttgaaaagacaggttggtgaagtccagttgcgcaccagaagccataaaggcgcgaatggcaatgcggcggaaaaagaaggactattgccgacgaagttgatgcagagtgacaacgccgcggaaattcgcaggatattcaaggtccagaggatagatgatgagacggggaggaaactgctcagggcggtcttcaaggcgtgctccccgaaagggtccgtggaacggagggtaggcagggacgccttggctcccggacttccccgcgctcttaaggcatcgttggcgttccaggagtatcggattgcaaacgtcctcacgaatctagtcatttcagaagatgggacgaaaagaaaactgactatcgcggagaaacagcgtgtctttggttttctttcttccaatgagactgatgacattacgtggattgatgtggccgaaaaattgggattggaaagaaggcagattcaaggcgtcggctgtctgaccgccgatggtgaagaaagaatctcctcgactccgccacgtaacgtcaccgcgctgcgcatccattcggcgaaaccggtaataaggaaaaagctcgttgcatggtggaaggctgcgtctcccacggtgagggaaaccatggtagagctcctttcgaatacggtcgatattgaccgcgtccgcgaagacatggactactcgtcggcggtcgcgttcatcgattccttggatgacgaggaactgactgcgctggattcggtagatttcctgtcgggacgtgctgcatattcacctcagacattgaagcagttgacggaaagaatgctgaataccgatgacgacctgcatgaggcccgcaaggcggtttttggcgttgacgacaattggaagccgccagtcgatacgatcggcactccggtggggaatcccgccgttgatcgtgtcctgaaaatcgtgaacagatatctgttggcatgccagaaacgatggggaaatccccagagcgttcagattgaacacgtgagagagagcttttcttccatcgccaaggcgaaagagacggaaagggctcaggatgaaagagcacgataccgcaatgatctgaggcaaaagctttacgagcaggaaggacttaataagatacgtgaatctgacatcagacgttgggaatcggtccaaaggcagaatggaacgtgcctgtattgcgagtcaccgataacattcaagacctgtgaaatggaccatattgttcccaggaaaggcgttggctcgaccaatacgcgggtcaatctcgcggccgtatgcgcggaatgcaacaagctgaaatccgatacggccttttccgtgtgggcaagaacggaggacgcggcccttcgtaaggtcagccagcgtgacgcgatcgaaagggtcaagaccttcatctttgacaagtctgtgccgccaagagagcaacgcgcgttcaaacaagccgtaatctcaagactgagacagaccgaatcggatccggcaatagacaatcgctcgattgaatcagtggcgtggatggccgatgagctgcatcgccgcattgaggcgtatttcaatcaggataccgatacgtcgggaaatgctccagccacccgagtgtgggtgttccaaggccgggtgactgcactggcccgtaaagccagcgggatcgaagggcgcatccatttcgccggcgagtggaaaaagacccgtctcgacagacgacatcatgcggtcgatgccgctgtcatcgcgatgatgaaccattccgccgcacaaaccttggttgaacgtgattcgcttcgcctctcgcaatggataactagggagccggaaacgtggaagagctatcctttctcagaaggtcaaaagaaaacgcgtttcaaggaatggctcgactgcatgaatacgcttctggaccttctgaatgacgcactcgactcggaccgtgtttccgtcacgcgttgccagaggatgtctctcggcaattcccaggcgcatgctgcgaccatcagaaaaatgaagcatgtggagctttcctcgcctatggatgccgatttgatacgcagggcatccacgcccgcattgtactgtgctctgacgagattgccagagtattctccggagaagggtctgccagagaaccgtggtcgtgagattgtgctcaacggcaggcatattcgatcaactgagaccatcgatttcttcgtaagtggtgctgcccagctaatggtacgcaacggatctgccgaaatcggggattcgatccaccatatgaggatataccgttatcgaaagaccggggcgaaatcgcagaaatacatgtatgggatgatccgagtattccagattgaccttctccatgcgtcgtcggaggatcttttcgcggtccagcttccgcctcaatcggtttccgtgaggtacggggacaagaatgtggtccaagcgatacaagaggggcgtgcggagtatctcggctatatcgtccctaacgatgagatcctgattagctacgaaggcgtccagatgaaagacagcgagaaaatcggtgcatacgcgaatgatttcagtggtaccgcatccgagcttgcacagcgacgacattgggtggttgtcggatctgatgtcagtaagttggccttacgtccctcttatctttccgaagaaggactggagaacagcggatcggaatctgaccggctttcaaatcagacgcggaaggtgatcgaaggcaaaggatgggtcgtcgcggttaatatactggccaaataccatcctgtcgtgataaggcggaatgcgttgggtgagccaaggttccggaccgattccgggatgcctgtctcgtggcgctgggacaggtaggttccgatgcagagccagtggcgtgtgattgactgcactaatcttgatggaacgatttcatatgagcgtggccgtatgaaagtgagaaagcatggtgaaagcgagtcggtctgtgttccattggctcaggttgccgttgttctgattggacttcatgtttgttgttcttcggcagtactccatgaaatggcaaaagctggcgtgtcggtaatgctttgtgactggaggggaattcctgatgccgcattgcattcgtggaccaacgttccttcggaggtggcagtccgtcagattgcgcaaagcgagatgactttgcccagaaagaaaaacgcatgggcgaaaatcgtcaaggcaaagatacggggacaagcctcttgccttgattcactcgggatagaagggggagggaccttacgtggtatcgcatcctcggttagatccggagacacttcgaattacgaaggatacgcggcaagagaatattggaagaggatatttatcggtgatggcaaacggttcaaaaggattccaggggatggaaccggcagaaacgcccaacttgactatgcgtatacaattctcagagggtttgcggttaaagccattcttagtgccggattgattcccacgctgggtgtgaatcatcatggccggagcaattacttctgtctcgcagacgatttattagaggtctatagacctgctatcgactattgggttgcccaacttgagccggaagatggtccatccgacaagaatgtcaaaagatatcttgctgattccgtcaatcagcagttcgactcatctggcctgacgataccaagttcaataagcgatttcgcacaacaatttggcttgtattgcgagaagaagatcgatgcattggaagtgccagaatatcgaggcccttatgaaaaaggatgaggacagtgatggcatgtggtgtctggtgatgttcgatctgccggtgaaaacgagacggcaacgacgagaggcgacagagttcagaaacatgcttttagacatgggctacagcatggtgcagtattccgtatacgcaagatatacgccgacccaatcaggcaatagatcgacggtgatcgcaataaaagagaatcttcctcctgatggtattgttcgaattctccatgtcagcgatcatcaatggtcgaccgcattgcgtttttccagttctaaacaggtggaggctaatgaaacgccggactatttcacacttttttgaacagaagaacctaattaaaaggcggagaatggcccttcttgacaaacatacaagtttatcaagaagggtagaagctaattcccagtttgcctcggcggagccattggcttatgacaagtttatcaagaagggtagaagctaattcccagtgcatcggaggatcaccggctacaccgcccaagtttatcaagaagggtagaagctaattcccagtcctgccgtgagtcgaagtgatccggcagcaagtttatcaagaaggatagaagctaattcccagttaatgtacgctcgccaagccatatccgacaagtttatcaagaagggtagaagctaattcccagtatctaaccgcgtgggcgctactattccccaagtttatcaagaagggtagaagctaattcccagtgttgacaaggctcacgacacgtcgaatccaagtttatcaagaagggtagaagctaattcccagttgcacgatctgcggcatactgcggcttccaagtttatcaagaagggtagaagctaattcccagtcgtcaaacatttgacgaaaggggtatgtcaggtttatcaagaagggtagaagctaattcccagtctgttcttgcttggcattgccctgctcgcaagtttatcaagaagggtagaagctaattcccagttcaagtcatgcagtatccactcggtctccaagtttatcaagaagggtagaagctaattcccagttggtcgggcagcgttcggcgtcgcaggacaagtttatcaagaagggtagaagctaattcccagttgcattccacgcacaccttatgcccccagacaagtttaccaagaagggtagaagctaattcccagtccatgagcgccttataaatgagcgcttgcaagtttaccaagaagggtagaagctaattcccagtgcttcggtcacaacgatgtcacaacgaacaagtttaccaagaagggtagaagctaattcccagtgcagaatatgacggtcatcaccgaggctcaagtttaccaagaagggtagaagctaattcccagtcgatccacgaggatgttcgccgccatgtcaagtttaccaagaagggtagaagctaattcccagtaagttacctacgggtggcggttcaaatgcaagtttaccaagaagggtagaagctaattcccagtactcctattgttgaaggaggccgcgcagcaagtttaccaagaagggtagaagctaattcccagtgattgttgctgtcctgaccgaatgtgatcaagtttaccaagaagggtagaagctaattcccagtatggaatccatggatacgccttgacgatcaagtttaccaagaagggtagaagctaattcccagttcaaaaacctctctggtggtcagaattgcaagtttaccaagaagggtagaagctaattcccagtgctgtgacagtgttgtgacagtgttgtgcaagtttaccaagaagggtagaagctaattcccagttgacgtgcatgtggtggtttccgacttggcaagtttaccaagaagggtagaagctaattcccagtatgaatatgcgtcatcgttcggaaggatgcgagcacgatgaggttcattcgacgcgaagtgatattacggaaaagaggtttcggctcacgatgcatacaggttccgaatgtttgatcatcggcgcgcccaagcacggccatcttgatttcacctatggcctgacgcaggccggcagagaagcgttgatgctgtccgattcctgcgtgatgaaactgttcgacgttttcattggagtattggacgaagacgaaggcttggaaaagtcatgtcggggcaggaaaggcgtctgaacaacctccggaaggtgcggatagacaatccttaaacaaaagaaaatcctgcaaccgctgtggaagccctttggctaacagtcgtctcgcaggcacgatcgtcggcatcttcaagggactgttcggctgacccaagcggaatatgaagacggatgagtgacttcaatggcgacttcatcgtgaagtcgccatgtttattgccggccgtttaaccaaccttcttcaggaagaatgcgtatcttcccaatgtggacataggctggttttcccttgtctattttgattcaatgacggacatttcctcgctgaaccagtcgcaaatgggtgagaatgcgtcgaacatgtcacaagaaacacggtcggggacaattcgtccacgaaatcgtcgcgactcaccgtacgcaaggaaccttcgagatccagaggaacgttctggtgtccgccgtgaaagcagtagctttcccttaattgcctttcccagttttcgcatgcttgtacagcatgttttccgccgtgattcgcttagcccccccctaccgggcaattgtcgttcccacatcatctgtttcggattggtccgtagccggtgacgtaggcacggatcgcaaatcgagtcccatcgtcgtccaagtccttcatcccgttgttcatacgcatcgaatcgaggatgaaatgcaggtactgcgcgtaatgcttcgggcataggtatagcttgccgtagcaatcctgcctgccctgcggatcggcgaacatcacatagtgttttgcgggttcgtcgcattcttcgtactggctgtcgcagctttcgtccccgccgccgcggtcatcctcatcaccgaacgggatgaatccgtcgaagatatcgtcgaatacgttgaagtccgtcgattcgacaatttccgacgtaattttgattgccgtggccgttctggtcttggcttccacacgtgtctccatcaatacggtcattgcattgactcctttctccggacgttttcatatgcgtcgggattcttcctgaggttgatgttgttgccgatgacataggcaagttccgcctcgcattcgtcgatctcgcgttggatgacccgttcatcggacccgtcgtcgaagcattccggatgatttcgctgctggtgtttatggtcaaataaacgtgtacggcgtcaccaccaaatctgaacggtgtgagcgttcatatcggacacggtcggcggctggaaacggcatcggcggaagagaagcgccggtgccgtacggttcctgatagattcccgagtgctaacaaccaacacatggtcctcgggaggaaaggaatgacgacaccggtgcgtgttcaacagagtatcaggcagctcgagacgaaaggcctgacgcatgcccagatagcaagggaactgggggtctcgcggacgaccgtggtcaaatacgcttcccgcgactattccccggttcccgcggcggggagggagggaagccggtcgctggtcgtgggcaggtacgcgcgcaaggccgacgaatggctcgaggcggaccggcgcatgccgcgcaagcagcggcataccgcccggcgcgtgcacgaacggcttgtggaggaatgcggcttcgaaggcagttattcgtcggtgcaacgttgggtcaagcgatggcggcaacgccaccgggacgaggccgagggattcagcgagctggaatgggcgccgggcagcgcgcaggtcgatttcggacaggccctggccgtggtcgcgggcgtggaacggaccgtgcatttcctcgtggtctcgttcccgtactcgaacatgcggtacgtggccgcgctgcccggcgagaccgcggaatgcgtgtgccatggcctgaacctggtgttctcccacgtcgggatggtcccccgcgtgctggtgttcgacaacgccaccggggtcggccgccgcagggccgacgggaccgtcacccagacgaggctgttctcgctgttctgcgcgcattacggcttcgagacgaggttctgcaacccgtgctccgggcacgagaagggcagcacggagaacgcggtcggcttcctgcgccgcaacctgatggtgccgacgccgtccgcggagggatgggaccggctcaccgacgcgtggctggaacgctgcgacgagatcgcgcatgccgaccactaccgcgaggacgtgccgatccgggacctgttcgggacggacctcgaccacatgctcccgcttcccccgtccatgttcgacgcgtgcgactggcgcgacgtgaagaccgacaggaccggaaccgtcacgatcgactcgaaccgctacctcgcgggcccgaaatggcattccatgcgtctcatggccggcgtgcgggccctgcgggtcgagctgcgttccatggacggcgagccgatcgtcacgctggaacgcaggtgggggcacagtccggacaccgcgatggacccgctctctctgctcgccatcatcgcgcgcaagccgcgttcgtggggcgagagtcccatacgctccgatttcccggaggagacgcgcatgctgctcgaccggatggagccgcgcgaacgcggaccgctggtcgacgacatccgccgcgccgccgtggcgagcggtttccacgcggccgccatggccgtcgccgagatcgtcgccgcgggcaggaggcccgacagggccgcgatcgaccagacagccagacggatcgctcagggcgacggccccgaatcgagggccaggctcgacgcgtacagcaggttcatgagggaggacgacggtgagtgaggcgacggaaaccgtggagggcggccgcaggggcggacggacggtaagcaaatccaccccggacgaggtcatggggctcgcatgcgggctgccgctgaccaggagcgtgctgcgttccgtggtcgcggacgccacgcccggccagctcggcgtgctggccgacctgttcagggccgagaacgccagccggactcagtccagacgcgcccggctgatcaggaacgcgggcttcccgtgcgtcaagggcttcgacggatacgactggggcatggcgtcgttccccgccgactggggacgggagcagctcatggacctcggtttcgtggaccgggccgaggatctcgtgctctacggcgacgtgggatgcggcaagacgcacatggcgatcgccgttggcatgctggcgtgcgagaggggcatgccggtgaggttcttcaccgcgtcgtcgctggtgatgcggctgcggcgcgcgagggacgagaaccggctcgacgcggaactgcgcgcgataggccgtgccaggctgctggtcatcgacgagctgggctacctgcccatcgacatcgacggggccaggctcctgttccaggtcgtcgcggattcctacgagaaacggagcgtggtgttcaccacgaacctggagttcgggcggtggggcgaggttttcggcgacggcgacatggccgccgcggtcatcgaccgtatcgtgcaccacggcaggatcgtcaggttccgtggcgagtcgtaccgcaacagccactccctgatgagataaccgaaaacgagaggaaccatccggattaccggtgacggtgtccattttgaacgccgatggtgttcagattaactggtgacgacacgcggatttatttgacgaaagacagccatgatttaccgccacctcaatgaagtcctgagtattagagctcaggaatggtctaacactaccgcaaaaagcaatgcaagtcgtacctcaatgaagtcctgagtattagagctcaggaataaccaccaccgcatacggaagcatcttcgaaaaccaacctcaatgaagtcctgagtattagagctcaggaatgccttcagtagaatcaggtttcatatcttgctggccgacctcaatgaagtcctgagtattagagctcaggaatcgccatcagggattattgcgactccaatctcgtatcgaacctcaatgaagtcctgagtattagagctcaggaatgcattggcctccgcacaaggcgcagacccggaccagacctcaatgaagtcctgagtattagagctcaggaattgttttgcatgatggctttgatgatgccggtcaaacctcaatgaagtcctgagtattagagctcaggaattggactcgtcccacgagcccggcgacatcgtcttacctcaatgaagtcctgagtattagagctcaggaatcttgcatacgtgtggctgatctatcctagctacatcctacctcaatgaagtcctgagtattagagctcaggaattggcaattgcgaaagcacttgatctcactgttgctgatcttacctcaatgaagtcctgagtattagagctcaggaatcgtggcgctgacgtcggttatatccctattatttgcgcacctcaatgaagtcctgagtattagagctcaggaatgtcttggaacggcggcactatttcacgactttctgccaacctcaatgaagtcctgagtattagagctcaggaatgtcgcgcgcctgccagcggctgcgttctcgatgaacctacctcaatgaagtcctgagtattagagctcaggaatggtgcgtgaaggcaagtatggtacggcttccggtaacctcaatgaagtcctgagtattagagctcaggaatagcggtcgaataggtgcgttgttccgcacccgtcgtacctcaatgaagtcctgagtattagagctcaggaattaggggtacggcgaagtgagttggagcgcttacctacctcaatgaagtcctgagtattagagctcaggaatctgtgtttggggtgatggtcgagcgcatacaggacacctcaatgaagtcctgagtattagagctcaggaatcggaagtatggtaccattcgcagaaccgtcgcgaccaacctcaatgaagtcctgagtattagagctcaggaatgacggcctgtatatgcaggtcgagcatgtgcaatagacctcaatgaagtcctgagtattagagctcaggaatatcaccgccgacgtgatagtccagccgagcgattgcgcgacctcaatgaagtcctgagtattagagctcaggaattcgcactctcgcaagcaggcggactcaaatcaatcgcacctcaatgaagtcctgagtattagagctcaggaataggaggaatagatgggcaagataacagctaagagacacctcaatgaagtcctgagtattagagctcaggaatggcagaaccactcaacgtcaaaggcccacagctcacctcaatgaagtcctgagtattagagctcaggaatttgaaaatccccgatctgacgaatcagatcggggattcacctcaatgaagtcctgagtattagagctcaggaatagtcttagtgtagagcgttgtggtgacatgtatctcaagcaattatgcgagcgatgtacttcataccctatgaaaaatgcgaatctgggaacgctgaatcccacagaaacgccattttccgcatgcgagcgcttgccgcgcgtctcagaagtgattcacctctcgtgcgcatgcaagacgaaacactctttagttatcaaacagcccagccgttttgactgaaatcaaataattgtgggaatttctaagtctgcatatcctcgatgccccagaaaatccaatccctcttccgtctgcgcaattgtccccaatgagcagaacacaacagaatcggttccatagtcaatctctttctcaatcttcatacgtacgttgagcatcattgaggggcgcacttgcaacagaaaaacactgtattgcagccgttctccataatgctgaagaatcttcgctacatgactgcgacggtaatcatcgctcacatcatatgcaactaaatagccacgtttctggttaaccatgccatagcttcttagcgaattctgattccacgatattcagcttgtgttccgtcgagatatcccaaaatcatccgagcttgaatctcaatagtccttcgccaagatgccttatatttaaagatgggatgggttatttctgtagccattcttcgttcatatgctttgattacggctttacgagtttcgtccatcatacgtaccgatccaagtgcatctgtaaatcctgttgcgttgatttcaccgttgttgattactgtttgcaccacagaatcagcaattggcgctctgaattcttccatcaggtccagtgccaacgcaggcttattacgtttgctgctgtgcagaaagccagcatgaggatcaagcccacaagaaatcagcgcacggacacaatcagacagcaacaatgtataagtaaaatcaagcaaagaattcaacgcatcgggcgctggccgcctcatacgggcaatccaatgccattcagcctgacgatcaactttgatgagatgcttgaactgggaaaaatataatgcagcagactctccttcaagaccaagcacgtcctgccatctgttcgcattaccgacttgtttttcgatatgtcgcaactgaggtagtactggattatccgactctgagcgacgcaacagaacagactggttatgaattttggcgatgatgaattctcgtgcgagtccaagccggccctcatgagaagccacatgctgctcgacacgttgttcgccattaggcccatacgagggaacagaccaaccatacatacgccccgttccactgcaccaaacgattggaatatcacgccacatcaactcacgaatcaaaccactcgacaagtcggtattaccatagatttgcaatccttgcatggtgtcaattggaattgaggcaagttcttcgccgtttttctgaactatcattcgcccagacctgataaaggctttcgaaccaggagtagcaagatgagtcacttgattatcag

SEQ ID NO: 570 - DNA, 23363 bp, synthetic construct
  misc_feature 1..23363: note = Synthetic
  source 1..23363: mol_type = other DNA
cgtgatccgcaccttctgcagtccgcggaaaatgccgttcgccgcatagaccagcagcatgcctggcaacccgaacaccacggtccgcacatacgcgaccgcgttcgccagcacggccccgcgtgcgcccatcgccgcgcacagcggcccggcggccgtgaacagcagggcggaaacgaccatgccgatgcccagcgccagccacaatccgtcgatgcccgcctcgagtccctcgcgtcgccggcccgagccgatcagccgcgccacctgcgacgtggtgccgtacgccaaaaacacgcacaggccgaccgtggtgagaataatggtcgaaccgaccgaaagtccggccagtgccgcgtcgtcgatgtgtccgacgatggccgtgtcgatgaggatgaatgccggctcggcgatgagctgcccgaacgtggggatcgccagcgcgaggatgcgccggttcgcggatgcgaaggaggaggcggacgttgcggatggcggagcgggagtgtcgccggattgcgccgaggccgctggcgtgcgagacgagggctggtcgtcgcggttcgtgatggtcatgatccactaccgtactcaattgccgtgctcaatgtgatgcgtgcgggagacggtaatggagaggccgcgttccgtatcggcggttgcggtcgtgttgtgtcttgttgcggcatttaatgtgcgcatgtggcctatatcacattgacctgtgaaaggcaaatggattgtccacgcgcaatcggttatccacgggttatccccaagttatgcaccgagttatccccaatatgtggataactcggtggattgtgcacaggttgatccccgaaatgtggataactcgattttcttatccacattgcacaatccgtgcgtgtcgcgccgatggcgccactgtgaacggaagatgacggctgcgtttgctcggggcttcggaggtggggcgtccgacagtcggacgactaatagtcgttgtgactatatctcgttgtaccgtatccgtgacacatgatccatgacatatcatccgcggcgcgaaccgaacgcaagacaccgcggagcccacggagagaggtaccgatgaacgacctgatgaacggcgtgaggaacgccgtcaaccccaagcgcgtgctgcgcgaactgaccgatttcaagcccggcgaattcctgctcatcgcagtgatgctgctcgcgcagatcatctccttcgtcttcgccggctcctacggtctggccgactggatcggcctgatctccggcatctgcatcgtcttcaacctcatcctcgtcgaccgcggtcgcctgaccaactacctgtggggcttcctcggctgcgccacctggctgtgggtcgccgtgctgaaccacctcgtcggcgacatcttctcccagatcttctacgtcgtcatgcagttcgtcggcgtgtatgtctggcagcgccagctcgaccgccagaagagcgccggctccgacgcgtccgccgtcggctcggccgaggtcaaggcccgcaacatcacctggtggcagggcctgctcgccgtcgtcttcaccgtcgccgtctacctgatcgtcgtgttcacctcgcatgcgaccggcggcgtgcagatctggctcgacggcacgctgctgccgctcggcatcatcggccaggtgctcatgacctacggctaccgttcgcagtggatcgcatggctgctgctcgacgtcatcaaggtcgtcatctggtggaaccagctcgccgccggcggcccgggcgcgatgtcgatgttcgtgctgcaggtcgtcatgctcgtcaacggcttctacggcacgtgggtgtggttccacaaggacagcgtctccgccgcggccgagcgtgcctctgagcagcccgtcgccgcccaacccgccgtcgcgaaggcctgatccgcgatgcccagctgcaacctgtccaccgcgccgctggccggttcgcgtttcgccgtgctcgtcagccggttcagcccgctgcacgccggtctggaacgtcgcatctacgacctcgcctcgaactacgacggcgtgatcctcgtgctcgcctcccgacccgacccggccgacggcatcggcctcgactcgctgaccggcctgagcgcgcgcaaccgctaccgctacttgcgcgaggcgttcaacgacgatccggcgatcagcccgaagaaactcatctggtccgataccgaaacgtccgcggacgcgcccgcgtggatcaaacagctcaaggacgtcgtccgatcggccatcgacccggcctccgtcgccgcgaagccgacgttcacggtcgtcaccgacatccgcgacgtcgaccgtgcgctgcgcaacgcgtgggacggcgacgaccattggtccgtgggcgagttcgtcgacggttccgacgaactgcagcgcacgatctgcgccgccccgcataaccgtgcatactggccggtcatcaaccacacgttccgccgcgaattcacgacgatcgtgctcgtcgtcggcagcgcgtccgtcggcaagaccacgatggtcacgcgcctgtcgaagctgttcgacgccccgatcgccgtcgaatacgcgcgtgagttcgaggaggcccgcaacgtggacgacgacgagctcaccgcattcgactaccagcggctgatcctgagcaagttcgcgcagaacgagcaggcgctcgcctccgacgcgaaccacggcatcgtcttcctcgacaccgacgcgatggtcaccaagacctacgtcgaacggtacctgccgcccgaggaagccgcgcggctcgactcgacgttcgacatggtgatccggcaggagaggcccgatctggtgctcgtgatcccgcccgtcaccgaatacgtggacgacgggttccgtgcgatgcagtgggcgtccgaccggtacaggttccacgaaacgctgatgaaggtgctgaacgagtcgccgtacgccgaccgcgtggtcatgctcgacgaccgcacgttcgccgaacgagacgctcacgcgatccgcgtgatcggcgagaagaccggattcgaaccgcggccggtgcggtagaccgccgccggcaagccgttcgccctcggccaacccggccaacccgtccagctctgccggctctgcccgctcggtagacgccggtaaaaaacggccgggtatgccgagggcgctctatactcggtgactatggcagacggaaacacttgggaagagaaccgccgcggcaacggttccgcggcgggcggcaccggcggcgatgcgccggtgcgcgacgcgctgttcgaccgcgtcccgccgcacgacgacgacgcggagatggccgtgctcggcggcatgctgatgagcaaggacgccatcggcgaagtgtcgcagatgatcgacgtcaccgacttctaccagccgaagcatcagacgatctacgacgcgatcatcggcctgttctcggcgtcgcagccggtcgacgtggtgcttgtcgccaacaagctgctcgccgacggcgacctcgacaaggtcggcggcgccgactacctgcacagcctcgtcgcctccgtgccgaccgccgcgaacgccacgtactacgccgacatcgtgcaccagcgcgcggtgctgcgcaacgtgatcgccgcaggcaccaagatcgcccagctcggctattccgccgaaggatcgcaggccgaggacgtcgtcaacctcgcacaggccgaggtgtacgagatgtccgtcggcaaggtgcgtcaggactaccaggcgatcggcccggtcgtgcacgacgcgctcgaccagctcgacaagctgcagaacggccagatggaaaagggcgtgccgaccggattcaccgacatcgacgacgtgacgcagggcctgcagcccggccagatgatcgtcgtcgccggccgtccggccatgggcaagtccacgctcggcatcgacttcgcgcgcgccgcctcgctgcaccacggcatgaccacgatcgtgttcagcctcgagatgagcaaggtcgagctcgcacagcgcatcatctcggccgaaacgaacattccgctcgtggcgatgcgccgcgccgacgacatcacgccggagcgctggaacacgctcaacaccttctggaacaagctgcacgacgcgcccctgttcatcgacgacagcccgaacatgtcgctgatggagatccgcgcgaaatgccgccggctcaagcagaccaacgatttgaagctcgtcgtgatcgactacctgcagctcatgacctccggcaagcacgtcgaaagccgccagcaggaggtgtccgagttctcccgcgcgctcaagctgctcgccaaggagctcgaagtgccggtcgtggcgctctcgcagctcaaccgcggtccggaaatgcgcaacgacaagaagccgcagctgtccgacctgcgtgaatccggctcgatcgaacaggacgccgacgtggtgttcctcgtgcaccgtccggacttctacgacaaggaggaccggcccggcgaggcggacatcatcatggcgaagcaccgcaacggcccgaccgaaaccttccatctggtcttccagggcgaccgttcccgcttcaacaacatgccgcaggattacaacagccagggggtgtgacgatgggacgtgacaatcacggcaacgcgaacgacaacacgaatacggcacgtgcgcgtgacggcaaggcatggaattccttcgcgacgccggccatcggcaagctcgtgcgcaaggccgcaagactgacccgtcacggcggctcggcgttcccgggcaaggtcgtcgaacggatcgatcccggattcctcgcgcgcacgctggcccaactgccgctcggcgtcgtgctcgtctccggcacgaacggcaagacgacgaccacgcgcatggtcgcgtcgatgctgtccgaactgggactgcgcgtgttcacgaacccgaccggatcgaacttcacgcgcggcgtcgtctccgcactgctggaacaggtgacgctcggcggccggctggacgccgacatcgccgtgctcgaactggacgaggcgtacgccgtgcattttgtgcggcaggtcaagccgcggtatgcgttgctgctcaacgtgatgcgcgaccagctcgaccggttcggcgagatcgacaacaccgcgcgcctgctcggccatgtggccgaggcgacgaccggcacggtggtattgaaccgcgaggacccgcgcatcgcgcgattggccgatctcgtgcgcgagccgggcgccgacgtgcggtatttcggactgagcgacgacctgcgcgcgttcttcccgtccgacgacgacatggcgaccacggtcgcggtcgaaggagcggcgacggcggaagccagcgaccccctcagtccgctgcgcggacagctccccctcccggggggagcatcgggagagcctccagtagagtcttgctccccccgggagggggagctgtccggcgcagccggactgagggggtccgtatccgcgacggccgcgctccccgccgacgtgaccctcacccgcgtgggcgatcatgaggccgatttcctcatcgccggcgaatccgaaccgcgcaccaccaccgtcaggctcgaaggcgtgtacaacctgtacaacgccgccgccgcgctcgccgtcgtgcgcgcggtgcaggccgatgcggaacggttcggcatcctgacggtatgcggcggcattggcggcccgcgcgaggaaacccctcgcgagcggacgttcgcgggactgcggtcggccatcgagcatgacggcgacctcttcgaacgcgtccaactggtacgcgaggcccgcatcgaaaccctgctcgccgcggtctcccatgtcacgccggcattcggccgcggcgaggtcatcgacgtcaacggccagccgaccgaactgctgctcgtcaaaaacccgatgggcttccgcctctcgctcgccagcttcccgccgaacgccgataccgacacgatgatcgtcatcaacgacgagtacgccgacggccgcgacatgagctggctgtgggacgtcgacttcaccagcctgcgtgaaacgggcgtgaaacaggtctccggcatgcgcgcgtgggacatggcattgcgcctcgaatacgaccgggtgccggtcggtgcggtcgacaccgacatcgacgccgcgctcgccgcgttcgtcaggcctgacccggcgcggcccggccgtcgcaagcacatctactgcacgtacaccgccatgctcaaggtgcgcgccgcgctcgcccgcatcgccgacgtcgccgacgccggcgtcggccagtgatgcagtcgttctttcaaggagctttaatatgaccacgatcgacatcatgtccctgtacccgaaggacatgaacatctacggcgactccggcaacgtgctcaccgtcacgcgccggctcgcgctctacggctacgagcctcgcgtcaccgcatacaaccagggcgacgaatggccggaccacgtcgacatgatcctcggcggcggcggccaggacaccggtcagaagaagatcatcgacgacctgttcctgcgggcggacacgttgcgcgatctggctgccgacggcgtgccgatgctcatgatctgcggcctgtaccagctgttcggcgagtacttcgagacggtcgacggcacgcggctcgacggcatcggcgtgatcggcgcgtacacggtcggccaggacgtgcgcatgatcggcaacctcgtcgaacacagcgatgatttcggcgacgtgatcggctacgagaaccattccggacagacgttcctgcgcgacggcgtgcgtccgttcggccgggtggacgcggacggttgcggcaacaacggcgaggaccataccgaaggcgcgcgcgtgaacaacgtgatcggcacgtacatgcacgggtcgctattgccgaagaacccggcggtcgcggatttcctgatccgcacggccgtcgaacgccgctacggtgcgttcgagccggaacggcatcagaatgcggatcagcgcgaggcgttggcgcggatcaacgcgaccgccgaacaggcgcgtcgcgtcgccgcctcacgcccgcgctgacccgcgtaggtcatttgtgattgcgggcaactcggaagttgccgccccgaaccgtaaagcggggagcccggaggcttcccgcaggtgaggtgagcgactagaagttgccgccgttccagccccagtcggtggtggccgtgtagcggatgtacgtgcgatcctgcgggatgccgagcgtgccctcgagcgcggccatgatcgactcggtcagcttctcccaagccgaacccggcacggaacgtccgaacacgttcacctcgacgtacgcggccggcttgctgtcgtcgccggcgaagtagatcggcatgtcatcctcgaacgggcacatcagccaaccctcggacttgccgggcacggcgctgatcgccttgccgtacgcggccttgagcgcctcgcgctgctcgggcgtggtcttgacggaaacgtgggtgtgaatgacgggcatgattcctccttgatcggatgggtctaacgtcaccctccatcctaatcgcgcacgaccgcgcgcgatccggtccggccgcacctgatcgggccgagtcaaacgcaacgtgttaaatgtttcccgtgaagaaactgattgcgcagcttatgaaattcggcatcgtgggtgtgatcgcgttcgtcatcgactggggcatcctgaacctgttggtcggcgtgttccacatgcacaacgtggtcgccgcgaccatctcgttcatcatctccctgatcttcaactatctggcgagcatgaagttcgtgttcaagcaccgtcccgacatggcgcgctggatggagatcgtgatcttcgtggccgccgccgtggtcggcctgctcatgaacgacgcgatcatctggatctcgacgtacggcatgaaccacgacgcgtacgtgtcgcagcacgccgaatacctgctgcgcacgaacgtcggcaagctgatcgccaccgccgtggtcatggtgtggaacttcgtgatccgcaagtggctgctcgacgatacgcacacgaacgcgatgaaccgcctcaagaaggccgagaaccgactgacccccgaagagctcgaagccaagtgggagcgcagcttctcgcatcgtctcggcgtgtggtcgctggagcatacgcccaagggctggccgaagtagacggttcgggcggcaggcattgcgtccgcatgatgggtgcgcgttcatggcaatgatgccatgatccttataatcgtgccgcttacgtagaataggcggcaatgtaatcccaagagagaatggacagcagtggctctcatcgtgcagaagtacggcggttcctcggtcgccgataccgattcgatcaagcgcgtggccaagcgcgtcgtcgagacgaagaaaaaaggcaacaaagtggccgtggtcgtctccgccatgggcgacaccaccgatgacctgatcgatcaggcgctgagcatcgactccaacccgcccgagcgcgagatggacatgctcatgaccgccggcgaacgcatctccatgagcctgctcgccatggccatccatgccgaaggcgaccgcgcgcactcgttcaccggacagcaggccggcttcttcaccgacgcgcgctacggcgcggcccacatcaaggccgtcaagccggatcgcgtcaagaacgcgctgtcgctgggcgacgtcgcaatcgtcgccggcttccagggcatcaacgcgaagggcgacgcgaccacgctcggccgcggcggctccgacacgtccgccgtcgcgctggccgtggccctcggcgccgacatctgcgagatctacaccgacgtggacggcatcttcaccgccgacccgcgcatcgtgccgaccgcacggcgcatcccggtgatcggctacgacgcgatcctcgaaatggccagctgcggatccaaggtgctcgcgctgcgctgcgtcgaatacgcgcagcggttcaacatgccgctgcacgtgcgcagctccttctcgcatcggccgggcacgctcgtcgtgccggacggcgtcgatccgcgcacgctgccgaacctggactgaccgcggtccgggccgccacacgtaccaccgaacgtaacaatcaccgactttcagactttcacgagtaaggcaatcatcatgagcgacaacaccaccgtcagcaacgaggacgccaagtccatgggcgacctgttccccgacctcggccccgaggccccggtcatctccggcatcgcgcacgaccgttccgaagcgctcgccaccgtgcgcggcgtgccgaacgagccgggcatggccgcgaaggtgttcaccgaactggcctccgccggcgtgaacgtggacatgatcgtgcaggccggcgcgtcggtcggcaccgcggacatctcgttcaccgtgccggaatcgaccgtcaagcaggtcgaggacgtgctgttcgacaagcacgacgagctgggctaccgctcgttcgacatcgacacgaacgtcggcaaggtggccgtggtgggcgtcggcatgaagacgcactccggtctggccgcgaagttcttcaccgcgctgagcgaaaagggcatcaacgtgctcatgatctcgacctccgagatccgcatcgccgcgctcgtgccgctcgaacagctcaacgacgccgtgcgcgcgctgcacaccgcgtacggcctggattccgaccagatcgaagccgtcgtctacggcggcaccggtcgctgattttcttttcggacatctgagtcgggcgtggctgcttgtcttgtgtagtagactgagaaacgctaattctcaataagagcggacaagttagccgctttgattgctcggcaggttttctgtcaggggcggactatagtccgccccgtttttccggtactatttctgtaacccaagacttcgaaggaaaatgaggcaggtgcatactgcacgttacagaatcggaattgatgtaggtttgaattcggtgggattagccgcgatagaggtcgatgatgacgacatgcctatgcgcattctcaatgcgcagtcggtcattcatgacggaggagttgatccaactaagagcaaagaagcaattactcggaaaaatatctctggcgtgagtcggcgggcgagacgaatggtgcgtagacgtcgtgagcgtctcgaccatcttgacgccaagctttcgcagctcggatatccgctcattgatcctgaatcattgagcatgccatttgaagagtggcatgtccgcgcgcgattggctgggtctttcatcgaggatgaatccactcgtcgcgaggatctgtccatcgctatacgtcatatcgctcggcataggggatggcgcaatccataccatcgcgtggaatcgttgttggcagacaacccgtactcgggtcagcatgctgagctgaaatcacgagcagaacagcgtataggacatgttctcaatgaggatttcacacctgctcaactcgtcgtttctgtattgtcggcaggatatgagaaatcgccgcgtctgcggaccagtaccaagtacggtgagggactattgccgcagaaactgatgcaggaagacaatgcgaatgagttgaagcgcattttctcagtgcagcgcatacctaaaagagagtgggagccgctatttcgttatgtattctgctcagtgtcacctcggggagctgccgaaaagcgggtcgggcgtgatccattcgatgcttctcaactgcgcgcattaaaagcatcattagtgttccagcggtatcgtatcgcgaatgtgctgacaaatctccgcattcgagagaatggacatgaacggtcgttgacgcttggtgagaagcggtcgacatatgcattgctttcctctgattcggcggaggacatcacctgggcggatatcgcgactcatcttggaattgagaggaatcagattcgaggcgttggcagattggctggcgacggtgaagaacgcattgcaaacatcccgccaaggatgacgtcttttcaacgaatatgcgaagctgacaggaagatctccaaaccgttacgacggtggtgggcggaagtgtcagatgctgcacgggagtcgatgatcagactattgtccaacactgtagattttgatgatgtctatgaagatgttagttattctgaagccattgagtttatcgattcgttggatgacgatgggctggctaaactggattcagtcgatttgccgtcaggccgtgctgcatatggtgagaggacattgcaaaagctcaccgaacgcatgctgactaccgatgatgatcttcatgctgcgcgcaaggcattgttccacgtgtctgattattggcgtccgccagcggatccgatcggtgcgccgttgggcaatccttcggtggaccgagtagtgaagatcgtcaatcagtggataattaattgtagtggtcgctggggcgatcccgtgtctgtgcagatcgagcatgtgcgttctgcattcgactcagtggcgactgcgcgacaatatgaacgtcgtacggggaatcggagtgtatatcggtctaaaatagctgcgcaattgcgggaaactgaacaccgtgaccgtgtccgtgcgtcggatatccgcaggcttgaagcaatacaatgccagaatggccaatgtctgtactgcggccggccgattacgtttgacacgtgcgaaatggatcatatcgtgccacgcaaaggcgtggggtccacgaacactcgtgccaatctggctgcagtatgtattgattgcaaccgatccaaatcgaaaacgttgttctcggtgtgggcaaaaaccgagcaggcgcaaaaacgtggcgtcagtctacaggatgcgttgaatagggttgaccatatgctgtatgacaggaacgctgatactccgcagacttggcgtcgttttaagcaagaggttaagactcgtctcaagcagaccgaagacgatgccccgattgataaccgttccatcgaatcggtcgcgtggatggccgatgagttgcatcgtcgtattgactggtatttcaatgcggaacggtatcttgctgaacatgacagggagcgtcctcatgtcgcagttacggtactggttttccaaggtcgtgtcacagccctagcgcgacgggcaagcggattggagggtcgcatccatttctttggcgcccgatacaagacgcgtctcgatcgtcggcatcatgcggtggatgcttctgtaatcgcgctgatgaggccgtctgtagcaaagatgctgctcgaacgtgattcgatacgtgaggctcagatgatttcgggacggctggccgaaggcgaacgtagttggaaggaatacccgtatgaagggcgcgacgaatacggtttgttccagcggtggcgtattggcatggagatgttacttgaactgcttaatgaggctcttgactgcgatcgagtggccgtaagacagtcggtaaggttgcagcttgggaattcgatagcgcacgatgcgaccgtcaaagcgttgaagagcgttcatcttggagatgcgatgagcgccgacttgattcgccgcgcctctacgcctgcgttatggtgtgcgttgactcgtcttcccgattatgacgtaaagagtggtttgccatctgatgacatgagacgaatcgtcgtgcacggtactacgtattcggctgatgatgaggtgaatttctttgatggtcagtcggcgcggattatcgtccgtggaggttcttccgacatcggttcggcaattcaccatgcacgtgtgtaccgctgctggaaacgaaacggtaagccttggtatggcatgattcgcgtgtttcaagtggatttattgaaggaccatggcgatgatttattctcggtgccgctgcctccgcagtcggtatcgatgcgctggggagagcctcgtaccgtacaggcgattcaagatggatgcgcagagtatcttggttggctggttgttggggacgagattcgcgtgcatttttcgcgtagcaaactcagtggccagattggtgagtttgctgagtggtgtggcgattctgattctgcggatattgttcggtgtacttgggtactcgttggctttgaatccaacatgcatgtaataatgcgtccccgactgttggcctccgaagggttgaagaatattccggaaatgtcttctttgccggagagtgttcgaaagatagtggaaggaaaaggctggcgttctacggtaaatgctcttggaagttctttccccgttgtggtgcgtcgtaatgcctttgccgaacctcgttggcattcacgagcggggatgccgtgctcgtggcgatggtctcagtaaggctgagccatgcaaggtcaatggcgggtcattgattgcacggaaatgtccggctatatctcatatacgcgcggcaatatgcgtgtgaaacgtgatgatgacgacacggttgcggatgtgccgttggcgcagaccgctgtggtgttgcttgggttgaaggtgtcatgttctgcagccgcattgcatgaaatggctcgtcatggagtatcggttatgctctgcgactggcgtgggataccggatgcggcgctgcatgcttggacggatacgccgactactgtcacgcaacgtcagttggctcagtcggatatgacattgccgcgtcggaagaatgcatggggcagaatcgtgcaagcaaagatacgaggacaggccgcttgcctggactcgctcggcattgatggaggtggaatattgcgaggcatcgctgcttcggtaagatccggagatccctcgaattgtgaagggcatgcggcacgggagtattggaagttcatgttcccggcagatgaggattttcatcgcatgcccggcgaaggtgtcggccgtaatgcgcaattggattatgcatatacggtattgcgggggtttgcggtcaaagctgttattgctgccgggcttattcccgcattgggaatgcaccaccataatcggggaaactatttttgcttagccgatgatctgttggaaccgtatcgcccggcaattgatcgtcgggttgctgaactgggctcggaggcatctcttgctgaaaggagtgtcaaacggtatttggtggaggtgatcaatcagcagatgaatggtaccggtctgacgattccgagttctttgaacgattttgcgcaacaatatggttttgtactgcgaagggcgtatggatcggcttcccgtgcctgaatatgtgggagtgaaatgaagaaggatgaggatagcggcggtatgtggtgtttggtgatgttcgatttgccggtcaagaccaagcaacagcgtaatgctgctactgattttcgaaacatgctgctggatatgggctacggtatggtgcagtactccgtctatgccagatatacgcccactcaggcgggcaatcgcgcaacggtgcagatgatcaaagcggcgttacctgcacaaggatatgtgcgtgtcctacatgtcagtgatcatcagtggtcatcggcgttacgattttctaattcggagcagttggatgatgcggaaacgcctgagctgttcacgctttttttgatcgtgaaaatatgctgtaagccgcagaaaacagcccctctcaagaagtgatcaagcttatcaagaggggtgaatgctaattcccaactaccgcggtcatccgcgcccgcgtgggacaagcttatcaagaggggtgaatgctaattcccaacggatgcttcgctgggtgaaatctcattgcaagcttatcaagaggggtgaatgctaattcccaacatgtgctgtgtatggacgtgccaggcatcaagcttatcaagaggggtgaatgctaattcccaacgaaccgcaggaacccactccacacgtttaacgttatcaaaatgtttcaaatgcattggcccatcctcatgcaagttacgaagcttctcaggtgccgtatcaccaatcttcggcgagaaggaattcgtcgatgcgccggtgttcgatgccgtcgcgcgggcgcaggatcggatccatcgacaccacggttttcgggtagttatccggaacgtctcggaatactccgaactcgcgctcggcggtcttatcactgtcgataagatacgtcacctgtacatatcgacgttgggcgcctttgtcaaacacgaagtcgacttccttgtcattgactgtgcccacggaaaccgtatagcccctgcgtagtccttccatcgcaaccatgttttccaacacgccttgtatctgtgcggtgccgtcgccgatgattgcgttacgtaacccatgatcggctacatagtacttctgcagtgttttcagcacctgcttgccggccaaatcagtacgattcatacgttccagcagaaatgcctcgcggcagtattccagataattgatgacggtctgcgtgctgacttcaatacgttccgccttgagatatgcggcgatggcgtttgcggataatacattgccggtgttttgcatggcgaacatgacaatgcgttccaacagcgccacgtcgcggatgctatggcgtcgaaccacgtcgcgaagcacgacggaacggtagatgtccgtcagatatgtacgacggctttcttcgctccaactgccggtggcaacaaacggcatgccgccttcttggacgaatgcgtcaaaagagtcatttccgtggatgtgttgccgtgcgtcgcggaattctgcatatccgaatgggaaaatctcgaactgcacgtatcggccgccaaggtaggtggcgagttcgccggacagcagcgtggaattcgatccggtgatgatcacgtctgcctgtgttgtagcgcgtagtgagtttacgaccttttcgaaacctcgcacttcctgtacctcatccagaaaaatgtaaggcttgccgtcgatggcgtcgattcgatccatgagatacggatagagcacgtcgggatcgtgatacttggcgagagcatagttttcgaagttcagggaaatgaactgcttaggggttcgaccttcggagagaagacgttgttggatgagccgcagcatgtccgatttgccgcttcggcgtagtccgactaacactttgatgacatcgtcggccccgatgaacggcatgatgcgatcgaggtagcgagagcgatcaatcagcggcttactttctttcatggaagaaagtatatcaattttttagaatttcttcttccatggaagaagaaattctaaaaacgcggaaaacttcttctatacaagaaagtggtgtgcgcaatgcgcgggcagccggcccgactacgacgaatccccgtcggtttgattccggacggggattcgtcgtatgtgcattgcggctattgccgttgggcgcgcctacttcttggtgatgtagccgagcgccttgagcatttcggcgcattcgagcgcgccgccggccgcgccgcgcagcgtgttgtgcgccaggccgacgaacttccaatcgaagatcgaatcctcacgcagacggccgatcgacacgcccatgccgccctcatagtccacatcgagcttgacctgcgggcggtcgtcctcggtcaggtactggatgaagtgcttcggcgcgtgcggcagaccgagctcggcggcctgagacgtgtagttgacgagccggtcgatcagctcctccttcgtggccttcttgccgaagttgaggaacacggtcgcggtatggccgttgagcacaggcacgcggatgcactgcgacgtgatgcgcagcgggccgtcgaacggcacgatctcgccgagttccgggtccacatgaccgaacaccttgagcggttccttctcgctcttcgcctcctcgccggagataaacgggatgatgttgcccaccatctcgggccagtccttgaacgtcttgcccgcaccggaaatcgcctgatacgtgcttacgacgacctcgcgcggctcgaactccttccacgcggccagcgccggggtgtacgcctggatcgagcagttcggcttgaccgcgatgaagccgcgcgtcgtgccgagacgcttgcgctggtgctcgatcaccgcgaaatgctccgggttgatctccggcacgaccatcggcacgtccggcgtccaacgatgcgcgctgttgttcgacacgaccggcgtctcggtcttcgcgtaccgttcctcgatcgcgcggatctggtccttcggcatgttcacggccgagaacatgaagtccacgccggccgcgaccgactccgcgtcgtcgccgtcgaccacggtcatatgcttcgcgtactccggcatcggcgtctcgatcttccaacggtcgccgaccgcctcctcgtacgtcttgccggccgagtgcgcggacgcggcgagcgtcgtcacctcgaaccacggatggttctcgagcagcgtcacgaaacgctggccgaccatgccggtcgcgccaagaatgccgaccttgagtttttcggacataccaacccctgtgtttgtgcggattacgaactgcgagttgccgaccattgtacgaaccgcggcgcataacggcacgcgcgctcccacatgctggccggatgccgtatggcgtggcggccggggtgaggcctgctgaccgtaaccgagtccgtgttccgtatatgtgactcagtcacggtcgttatagacgacaagacaaccattactgagttcggatatgacgaagcggactcagttacggtcgttattcgtccggagacaaccgtaactgagtcacgatgatgggacgtgtactcagttacggtctgaaataatgtggagatgaccgaatccggatcgaaatgtgtgacgcggactcagttacggtcgtgatgggaaatgatgaggaaccggctgagggatgaccgaccgagccgctggtaggctgggagatatgtcgatcgcatcggatgaagcacgcaagcagctggaccgtctcgtggcgttggggtacccggacgtggcggacatctccgccgcctcgttccgcgcactcgcgcgtccgctgatcgccgcgctcgagagatgcgatccggacagcgacgatcctcggtaccgtctgggccgcgacatcctgttgatcccgacgcgcgaactcgtctcgccggaatcgctgatcgcccgaaccagcatcaaccgcatggccggattcaccaccatgccgccgcgcgacatcgccagcttcctgccgcaggacggattcgagccgcccgaaggcccgttctacttggccgtcgaaccgcacaccggcacctgctacatcaaccgcgaaccggacgtggcgcgcaagctcatcgactccgacgaacgcacgccgctcacccttgaggaaggcctcgcgatcgccacgcagcacccggaatggctgctcgaaaagaacgggttcaacctgctcggctcgcgcagcgccgacggccgcgtgcccagcatctggatgagccagaacgccccgcggctcggcgcggtatggcccaactcccgtcatacatggctcggcaacgcctactgcatctcccggcgcggggtgagcctgttccgctgaaccagttccactaccctcgtcagcatgccgagaaccgtcgaagaatatactgaaggcatccgttgctgacgaggaggtcatcatggatgccgatcgtgaagtgcgcgaatcgcgcgaatcccgcgaactggcccgcgaaaacaggcggaacaagatcattgccgcggtactctccatcgtgatgatcatcgtgacggcggccagcctgacgttgtatgcgttcctcaagccgatcaggtccactccgccggcagacgacacgacacccatctcgtcctacacgctgcccaagccgacgccgtacgccgacgatccggtcatggccgccgacgtcatcgcatccatcgaccggctgcatcgctccatcagctactccacccgctaccggttctcgggagccgccgaaggtgctttgctcggatacggcggcacgaccaacgccggctatcgcatcaccgaggactcgctgcccgatgacctgacactgatcgtgtcgcgaggcccgggtgtcccggacgacatcgtcggcagcgacgtcggggacgtgcccgcgtatctgaagggcatggacctgaccgtgagttacgtcggcatgccggtatcggatacggacaagcatccggccggcacggtcgtcgccacgaacccggcacccggcacggcgctgagcgagggcgatcccatcgtcgtcggcgtcgccacggccgtcggcaacgacaacggcaaaggcgtgctcggcgcggacatcatcggccagcgttccgacgaggccaggcaaacgctggaatctcaaggccatgcggtcaatctgcaaccgaggttctcgtccagtgacgctctcggcacggtcgtcgccactgatcccgtgcccggttcggtactcgccgacgggcagtcggtcaccctgtattacggcgttgacatgaccggcgcgaaggatgtgttcagtgagccgcgcgacgacctgaacggcttgcgcgcggtgcgcacgggcgcgtcatccggcgtgaccacggccgcgatcgccggcacgtactgccgcgacgtgacccgggaatccggcacgtcgcccggcactccggtgacggatacggccggccaatgcctgacgctgaccgaccgcacatcgactgacggttcgaacgggcactatctcgtgctcaacggcgacgatcccgcacagcccgacgaccggcttgacctgacgaatttcgcgcacgacatcggtggcgcgctgctcgaagccgatccggacaatcccaccggacagtttcccatgcgcaaccatctgctcgcccagggactcgacaagaactggggcgtcgcggaactgtacgcgggaaacggcctgccgaactgcggcgacgccgtgttcacgggcgctcccggccagacctgcgacggcgatctcacgttcgagatgaaggatttcctcgtgtacttcgcggccggcgccaacgtggacgaggtggagaagaccggatatttcgaccgcagcgcgttgtcggaggcgctcgaccagtcgccggtcgacgattcgcggccgttcgtgctggtgcgcgaccgcacgctgtacgacgtgaccagcaagccggcgggggagtggatcacgacggtcaatccgttcgtgccaaccaattccgcggacaacgactaccgcaacgcgatggtcggcatgaagccggcgcccagcggtgagaccgtgtactacctggtcgacgaaccgtacgactggtcggtgttccccgcgtatgaccggcagtaggttttccgctctgatctcgctcaaaggccatgaaaggcagcgacccatgccggcctgcggatgccttggctccctctgacccgggagccaaggcggatcgctagcgtcgcgtccgtttgccggaccgcctggccggcccgatctgcctgaacacggcatgcacgatcgcggcgaacgcggcggtggtgccgagcgcgacgccggcgaacacctgcgggcggcgcagctcgttgcgcaggctgatcgccccggtcacgcagtggtcctcgaagaacacgcgcacctcgttgctcgaataccgcccgaccagttcgccccaagtgagcatgcgcgtcacgtagttgcgcggattgtcctcgcggaactcgaacaggcggatgccgcggtagcgcgacttcggaccgtagcattcgaatccgcaggtcggcgcgtagccgagatccatgccgtccacgtggccgacgaacgagttcttgtggtcatggccgcagaacagcgcgaaatagccgcccgcgtcgcgcatcgcgtcgacctcgccgacgttctcgtccgcgcagccgatcgcctcgccgagccgcgatcccggccggcagatctcatggttgagcacgtagcagtgtccggcgtagttgcgcgcgccctcgaccgcgttcggcgtccatgcgggcacttcggtcaggcagtcgtagaactcctgcggcggaatgtgctggaacgcgatcgacggcaccggccggccgtccccgttgcggtccgccagctcgcgctgcacgtcgccgagccatgtgatcgcctcgtcgctcggcgtgccgtatccgtcggagtcggcgagatcgagaccgcgcgaattggcgacatagcgcggatactgcgcgtcgttctcctccggcttgcccgcgtagtcgcccgaattgaccatcatcacgctcatcgcgatgtgtcccgagccgtcggaggcggcgaccggcagcgcgaacgtgcccggttcgaatgagtcggcggggttcaggcatcccggatattcgcggtagatgtcgtcctgctcgtcggcgaggatgccgcattggaagtcgtggttgccgtaggtcgcggcgaacgggatgccggcgttgacgaccgggccgaggaatccgctgaacgtgtcgcgcaccttctgacgggtgtcgtcgagcagatcgtcgagcgtggccacgtccgcgacgggcggcagatcggggttgcggcgggcgtcgatgcgacgccggatgcctttgagcttcgcctcgacctcggtgacgaggcggaccttcgcccctggattctcgccgcggcgacgcaggaacgtgtcgatgtacgccggatcgtagccgcggatctgatcgccggtgaacacgacgagatcggggtcggcggccttgatcgcggcttcgatcatgcggatcgtgtcgggatggacgttcgggccgtcctgaatgtcggccatctgcagcacgcggaacgtgccgtcctcgcggaaccgaagcgtggcagaggaatgggattcgttcgcggacgtggtgcggggggcggcggcggtcgggccggcgtgcgcttcggccggctgcgcgaaatcggaaggctgtgtcatgcaccccatctaaccgtgccgagcggcccgtcatcggacgatgtccgcgatccgcgcggaagcatcacgtttgcgcaaccgtgcgtttcacatggtgatgcatgtcggagcgcttggccggactcatgcgccgaatcccgagattacggcgatttcccggggcggggccggtatgatgaaagtttgtacatgttacgtacacgtaaacgatacggccgggctgaaccaccggcgcaattccaagaaaaggaggagtgatgggtcaggatcaatcgtcagtgtttgatctcgcggcggtcgccgcagcgtccaacggagggaacaacgacccgctgctgcctccggcgcgcttcatcggcgacccgcagaagccgagcaagatgccgtacaacaagtacgccgcctacgacaagcaggtgccgttcgactacccgcagcgcacgtggccgggcaagcgcatcgagcgcgccccgcgctggtgctcggtcgatcttcgcgacggcaaccaggcgctcgtcaacccgatggattccgaacgcaagctgcgcttctggaacctgctcgtctccatgggcttcaaggagatcgaggtcggcttcccgtccgcgtccgaaaccgatttcgacttcatccgcatgctcatcgagcgtgaactgatcccggacgacgtgaccatcgtcgtgctcacgcagtgccgcgagcacctcatccgccgcacctacgaggcgctgcgcggcgccaagcgcgcggtcgtgcatttctacaactccgtgtccgtgctgcagcgcgaggtcgtgttccgcaagaacaaggccgagatcaagcagctcgccatcgacgcggccgagctgtgcaagcatctcgagggcgaggccaagggcatcgacctgtactacgagtacagcccggagtcgttcaccggcaccgagccggagtatgcggtcgaggtgtgcaatgcggtcatcgacgtcatcaagccgacgccggatcacaagatgatcatcaacctgccggccacggtcgaaatgaccacgccgaacgtcttcgcggacgaggtcgagtacgtctccaacaacttgaacgaccgtgattcgatcgtgctgtcgctccacccgcacaacgacgagggcatgggcgtggccgccaccgaactgggcgtgctcgccggcgccgaccgcgtcgaaggctgcctgctcggcaacggcgaacgcaccggcaacgtcgatctcgtcacgctcggcctgaacctgctcacgcagggcgtcgacccgcagatcgactactcgaacgtgccggaaatccgcaagacggtcgaatactgcaaccagatcaagatctccgagcgtcacccgtacgcgggcaacttcgtgttcaccgcgttctccggctcgcatcaggacgcgatcaagaa

SEQ ID NO: 571 - DNA, 23111 bp, synthetic construct
  source 1..23111: mol_type = other DNA
  misc_feature 1..23111: note = Synthetic
ggttgcgaaggcgacttcgaaccgaccgaagagggcttcaagtgccctgagtgcggcaattccgagcccgacaagttcaacgtgaccaagcgaacctgcggctacctcggcaacccggtgcagcgcccgatggtgcatggccgtcacgaggagatctcccaccgcgtcaagcacatggctggcgaaaccggtcacgtgacgctcaaagacggcgagacccgcgaatggttcgaagagaccaagtgagcttgagctgaactatcgcaaacatcgcagagggcaggcttcgtgcctgccctccgtcgtgtttgtcggcatttgtgctaacgggcttttgcggttttgccgttttaactacagcttttgacgtttatacccacattttggctattgaaccgtataaaacgtcaaatctatctgtgaaaacgtcaaaaatatgctgttttgacgtttttgccaatgcttttgctgtttatgcatacttttcagctggaaaagcggtaaaacgtcaaaatgtttggtaggaacggcaaaacagcaaccagaaacgtcaaaactgacaaacgtatgtggctttccgcgccccgggtcgcctgcagggattgtggcgaacgggtaagatgacggcattgagtgaagaggagcacagggtggaacatcagcaggaatcgatttggcgagcaacaggggagccgcaacagtcagagcagtcgacggcgcaaaaagtgaagcctgctccgaagctgcatgatttcgcggcgggggagacgaatcgtgggccttcgattccatcgccattgtcgaacaatccgcgtgccggtcagtggacgaacaagatgagccacaacatgatcgccgactacaagcgattcctgatgaccgacggcgaaggcatccgctgctccatctacgtctccggctgcccgttccactgcgtcgaatgcttcaactcgtcgatctgggatttccaggccgggcacccatacaccgagaaactcgaagcgcagatcatggacgatctgagccaaagcttcgtgcaaggcatcacgttcctcggcggcgaaccgctgctcaacaccggcgtgctgctacctcttgcgcgtaagatccacgaacgcttcggccacaccaaagacatctggtgctggaccggctacacctgggaagaactgatgcgcgaaggggagacgcaagacaagctcgacctgttgcacgaaatcgacatcctcgtagacggccgctacctcaaggatgaacatgactcgctgctccagttccgtggttctcgaaaccagcgcatcctcgacgtaccggagtcgttcaagcaaggcaagccggtgatctgggcgaaattgcacgatcaggagcgcttcatcccggaaatctacggcaaggagcgtgccgccggcgaaggtgacgccagctgatctagcataacctcgatcttgttccatgcgacgcgtcggtattctcaagcagtcttccttttgctacactgtgtattacacgtaatatacagtggttttggtagaaaagaggttgcgatgagcagtgcgatgattacagctcgcgttgacagcgagcgcaaacgcgaggccgaacgtgtgctgaaaaagcacggacgcacatattccgatctgattcgtgatctgaccgactatctcgcacgtacaggtgaactgccgctgttcgaacggcagacgttggaactgatagaaaacgaggagaaacggcggcgcatcgcgcagttggaggcgttcgcgaaccgtcccgtgccgcctgttctcgatgaccggtccgacgaagcgttgctggccgagtctcgcgacgaacgattcagccgattcgaggcatagccatgcaagttctgcttgacaccaatgtgctgctcgatttctgcgacagcgcgcgccaaccgtttcacgatgactgcctgaccctgcttcgcgcctgcgtgaacaacgatgtggcgacgctggcatctgtgtcatcgttgaacgacgcctactacattctcgccaaacgctatggtgagccattcgcccagcagtccgtcgccggtctgcttgagttgttcgatgtgcagccgatgctggtgtcgtatgcgaacactgccgtggattcaaacgagccagatttcgaagatggtcttattcgcgcaatggcagagaagctgcactgtgacgtgattgtgacgcgtgacgcagctgcgtttcgtgcgtcacaagtcccggctctaacgccacaggaatgtgttgcgcgccttgtataaccttaggatattgaaaatttatcatttttgcggtatgccccgcagaagtgacgttgaagggtaggcttcgttgtcgttgctgcggttgcaactgcagatgtgacaaggaatctggattgtggattcctttggtgtcgtaaatcgatgtgctaggcgagagcccacgccactgccagagccacaagcgcaacgagggggagagcaccctgcttgatggcggcgctacgcttatccggcgagccggcgaacagcaccgtggcggcgccaaacattgaggcggtgcccgccgtcatcaacgtgacgccgacggtatgtgcgccgcaccagaacacgatggcgccagccattgccatgatgccaaggaacatgttgtagaagccctgattgaatgccatctctttcgtgttctcggcctcctgctcggagctgatagagaatacggcgcgcgtttgcggttccgtccagtgccaggattcgagaatgaaaatgtacccgtgaaggcatccggcgagtagtgcgaatacggctgcgatgttcagtgcgatgaacatgtggtgtcctttcgtgaaattgggtaaaacaatagcatttgtatgcacggtaatgcataaagattcataggtattgtacgcataatgagcaagtgatgcgcaacgttagcaaattcacacgaaacccattgcaaacgtactgcgtattcattaaactgaagagattatgagctgattcaccgactggtgaataaacatgctgaaagacgttacgggcgtaaggtgaacaagcccgagaatcgatggaatgaacgaggtactgatgagccacacggcatccgatgcaatgtcgaacaacggttatctgacggacggtcataccagtattgatccaccggcacagacggctgattccgccgtcttagcagacactgcatcccagaccacaccgaagcagcacacgctgcgcatcggccttgacatcggctcgaccaccgtcaaagccgtggtactcgatgattccgacgatctgagctcgccgctgttcgccgactaccgccgccaccacgccaacgtgcgcacgacgatggaaggcctgctgcaagacatcgagaagacgctcaaagacctcggccgcgaagacgagccggtgaacctgacgatcaccggatccggtggcctcgcgctcgccgacagcatccacgtgccattcgtgcaggaggtgattgcggaaacccgcgccatcgacgagcagattccgcaggcggacgtcatcatcgaactcggtggcgaggatgcgaagatcacatacttgaagccgaccccggaacagcgcatgaacggttcgtgcgcaggtggtaccggcgcgttcattgaccagatgtccacactgctcgacaccgacgccgccggcctcaacgatatggcgaaggaatacaagacgctgtatccgatcgcctcgcgttgcggtgtgttcgcgaaaaccgatctgcagccgctcatcaacgatggtgcggcgaagcccgatctcgcggcctccatctttaccgcagtcgccacgcagacgatcgcgggcttggcttccggccgtccgattcacggcaccgtcgtgttcctcggtggcccgctgttcttcatgtcggagttgcgtgaggcgttccaccgtgcgctcgacggcaaggtggacgagttcatcacgccgaaggacgcgcacctctacgtcgcctacggtgccgcgctgatcgccggcgaacccgaccagtgggagggcgagaacctcgcaccggcacgcccgtgccgtgagatcatcgccgatctcgaagacctgagcaatctgcccgcgaacacgcacacgatgccgccgctgttcgacaccgagcaggatcgcgccgacttcaacgcccgccaccaccgcgagcacgtgcacatcggcacgctcgacggtgcgcaaggcccgcatttcctcggcatcgacgccggctccaccacgattaaggcaacgctcgtcaacgacgatcgcgaaatcgtctggagctcctatgctacgaacgacggctcgccgctgaccgccgccattgacatcgtgcgcaagatccaatccgaactccccgaaggcgcgtggatcgcgcgtgcctgcgcgaccggctatggcgagggcctcatcaccaccggcctgcacctcgacgaaggcgttgtggaaacgatggcccactaccgtggtgcggaaatggtgagcccgggcgtcaccgcagtcatcgacatcggtggccaagacatgaagtacctggcaatcaacgacggcgtgatcgattcgatcgccgtcaacgaagcctgctcgtccggctgcggctccttcctgcagaccttcgcgcagtcgatgggactcaccatcgaggagttcacgcaggccgcgctcaactccactcatccggtggacctcggctcccgctgcacggtgttcatgaactcgtcggtcaagcaagcgcagaaagagggcgcgagcatcgaagacatcgccgccggcctgtgctattcggtcgtgcgcaacgcgctctacaaggtgatcaagttgcgcgactccggcgaactcggcgacaccgtggtggtgcagggcggcacgttcctcaacgacgccgtactgcgcgccttcgaactgctcaccgaacgcgaagtgacgcgcccgaacatcgccggactcatgggcgcatacggcgcggcgctcaccgcgcgcatgcactacgacgatgtggcggacgacaccgacggagacggcgaaacctccgccgcacacaccgccgtcatcgacggcgtgacgcacaccgtgtcgagcatcctgcacggtcaggaactcgacgacctgtcgatgaccaccgaacgtgacgtgtgcaaactgtgccagaaccactgcaagctcacgatcaccacgttccacgatggttcgcgctacgtcaccggcaaccgttgcgaacgcggcggcgacgcgaaacgcaagcgttccgaccgcccgaatctctacgacttcaaatacaagcgcgcgttcgcgtaccgccgactcaccgacaagaaggcgacgcgcggcacgatcggcattccgcgcgtgctcaatatgtatgagaactacccgttctggttcacattgctcacgtcgctcggcttcaaggtcgtgatctccggccgctccagccacgaactgttcgaaaccggcatcgagtcgatcgcctccgagaacatctgctacccggcgaaactcgtgcacgggcacatcaagtggctgctcaacaagggaatcgacacgattttctacccgtgcgtctcgtacgaagacaacctcgtgcccggcgctgacaatcatttcaactgcccgatcgtcgcgaactacccgatagtcgtcggcgcgaacatgcccgaattgcgcgaagacggcgtgcgctacatccacccgtacttcaacctcgccaagcacgatctcatggtcgaccgcatcgccgaggagttcgcgtgggcgggtgtcacgcgtgaggaagcgcagaccgcagtcgaagcggcatatgcggaagacaaagtgttcaagcacgacgtgcagatggaaggtctgcgcgcgcttgcctatatgaaggaacataacagccgcggtatcgtgctagcaggccgcccctaccatgtggacccggagatcaaccacggtattccggagaccatctgcgcgctcggcatggtcgttctttccgaagactccgtcagctggatcgatccgaaggaaaaactcaacctcaccgaatacctgagcgagggggaggaagacccgcgtgcgaagaacaaccagggattccgccacgtcgaagaccgcaagctgaagacgacgctgccgttgcgcgtcacgaaccagtgggcgtaccactcgcgactctaccaagcggcgaacttcgtctcgcagtacccgggactcgaactagtgcagctcaactccttcggctgcggactcgacgcgatcaccaccgatcaggtgagtgaaatcctcgccgacaaagcagacgtgtataccatgctcaaaatcgacgaagtgtctaatttgggtgcggcgaagattcgcctgcgctcgctcaaggccgccgttgaggagcgcgagcgtaacacgaagaagcgcgcgcagcaagagccgaccgaaattgcgaagtccgcgcagattgaaaccgctcaatccgcggacgtgcagtctcagaacacgcagtcgttccgccgtaccggcagcatggcgccgacgccagggcgtcaggccatgctcgacgcggtgatgcgcacgtcgaagaacgcgcagaagaatgcgaagaacaccaagcatgcgcgcaagcagacggccacgatgtcgaactacgcgaaccgcgtgccgttcggcaagaatatgcgtgactacacgatcgtcgcgccgcagatgagcccgatccacttcagtctggttgaggcggcgatctgcggttccggctacaagttcgagattctcaagcacgcgagcaaaaccgacgtggaaaccggtctcaaatatgtgaacaacgacgcctgctacccggcgatcatgaccgtcggccagctcgtcgaagcgatcaaatccggcagatatgacgccgatcacacggcgctcgcgatcactcagaccggcggcatgtgccgcgcgacgaactacttcggtctgattcgcaaggcgctgatcgacgccggatacccgcagattccggtgctcgccatctccacgcagggactcgttgacaaccccggcttcacgccaacgctgccgatgttgcaccgtgcggcgaaggctctgatcatcggcgatttgctgatgaagtgcctgtatcgcgtgcgcccgtacgagcaagtgccgggctccgcgaacgcgctgtatgagcgctgggatgcgatcgtgcgcgaaacgctgctcaaccacggcaattcggcgacggcgaagaagtattacggcaagtctcactggacatacagcaagctcgtcgcgaagatagtcgaagcgttcgatgcgctgccgctgcgtgatgttccgcgcaaggtgcgtgtcggcgtcgtcggtgagattctggtgaaataccagcctgacgcgaacaatcatgtggtcgatgtgatcgagtcgcaggattgcgaagctgtggtgccgggcatcatggaattcatgaccacgcgcccgtacatcaacgactggaacgcacacaacctcggcatggggcgcagcaaactcatgtacggcgcgttcaaagccggactcaacgcatacatggcgccggtgcgcaaggccatcgcgtcgagtcatggcaagttcgagcaggacttgccgatggagaagctcgtcgagaaggcgtccaccgtcacatcaattggcgtgcaagctggcgaaggctggcttctgaccggagagatcatcgagctgatcgaatccggctgcccgaatgtgatctgcgcgcagccgttcgcctgcctgccgaaccacgtgaccggccgcggcatgttcggcaagattcgccgtctctacccgcaggccaacatcgtgtcgatcgactatgaccccggcgcgagcgaagcgaaccagctcaaccgcatcaagctgatgatcgccgccgccaagaaggcagcacgttcttccgagatgcctgagtcggcgagctcggaggagatcgccgcgtaatcggctacataaccggttttatgagtccaagctgcaagtcgtagcttggactcttttgtatagtggttgtgcggcaaaagagtattggcatacgccggcagagcaaaacgtgcgttgaaagctgaattttgtgcggattatcagctttttctagaacagtcccgacatgtttcccgccgcgcgcgttactatgagcagttatgacatcagcacgaacttcgtacgcgcacatgctcgccaagccaaacgccaagcatgttcgcagccttgtcaatttcttcgagcagggggccaagccggaatcacgtgacgggttcggtgtggaaatcgagcatctgcccgtgcataacagtgatgacacggcggtgacgtatggcgaagcgaacggtatcgaaacgctgatgctgaggttgcgtgagtattatgacgagtcgcgcgaatattggcaggacgaccagctcgtcggactcgcgcgcgacggcatcggtatttctctggagccgggcgggcagatcgaaacgtcgatcggtgttgtgcgcaacagcagtgagctcggtgcgatctacgagcagtttcggcgtgagatcgatccgattctcgacgagctcgggttccgcttggtcaattacgggtatcagccgaagtcgtgcgcgctggatatttcgatcaatccgaagcgcagatatgcggcgatgaacgagtacctcgggcacatcgggcagtacgggccgtgcatgatgcgcgcgtcggcgtctacgcaggtgagcatcgactatgcgaacgagcaggacgcgattgagaagctgaggttggggagcgcggtcgggccaatcatcaactatttcttccgtaatacgccgtttttcgaaggcgaagtgaaccatatgccactgcgacgccagcgcatgtgggatttcttggattgccagcgcacgaacttgattccgggactctacgaggatgggttcggctgggaggattacgcggtgggtgtgctgggcacgccgctcatgttcgcggacctcacgcacacgcctgaggcggcgggtctgccggtggaacggaaggagttcgcggcgttccgcgaaaccgccgacgatgtgtaccctgaccgcgagctcaacgactacgaggtggcgcacatcctctccacacacttcaatgacgtgcgactcaagaacttcattgagatgcggcactgggattcgctgccgatcgagcgcgcgcaacggctcatggagatcgttggggcattgttctacgaccccgcacgactggcgcagctcgccgactacttcgacggcatcggggaggccgacgtgttcgcggcgaaggccacgttgaacgcgcatggtgacgcagcagaaccttacggaaactcgctggagttctggcgcgagttcttgggactcgagggcgtaatggccgatgtgccgggagatgcgaagtggccggaggtatttcaggcgtagcgagtgcattttgcgaaaatcaaatattggcgtatgatggtgattgctaatttccagtaaggatggactcgatagccatcttgaatgctaacggaaattttccgcaggggaagcttcggcttccccgtttttctttatctgaactgtgtcagaccagcattcggtatttttacccgttttggtttgtaagtgccctaaaagctatatacttgacattagtttttccaaaggaggggaaatgaaacaacgtcgttataatgtgggttttgatgttggtttgaattcgcttggatttgctgccattgagattgatgagcagggtatgccgattcgtattctgaaggcagcgagcgagatccatgatgggggagtggatccaaatactcagaagacaggtgattcacgtaggtcgcaggcaggtatagctcgccgtacgcggcgtatgcgcagacggaggaaggctcgcctggaacgcttggacaagactctgacgaagctcggcttccctatcgtgaatgagtcttcgcttcacggtttcgacgtgtggaagatccgtgcactagctgcaagcggtttcatcgaagatgataatgagcgtaaatgcgctatctcgattgcttaccgacatattgcgcgccatcgtggttggagaaatccatatacgcgcgtggagtctctgctgaatgtcgcagcaccagaatctgaccagtaccagcaactgagagacaacgcgatacgcgttttaggtggagaatatattccggatgctgccactccagcgcagatcattgatgcggtgctggcagagagcagcggtcctgctatgaggattcgcacttcaacaggcagtcgcaaattaggtgatcgtccgggacttatttcgacaaggctcatgcaagcggattatgcatatgagctccgcactatcttcgagcagcagcatgttcctgatgatgtggctcgtgaattgatgtttagggtgttcgacgcgaagtctccacggggatcagcggagaaacatgtggggagggatcctcttgcaccggcgaagtccagggcgatgaaagcttcattggctttccagaggtatcgtatcgccagcatgattgtgaatctccgtgttaatgagaacggcgaggaacgcttgcttacagtcgaagagaaacagagaatctatgaccgacttgcttcacaggcggtcgagaaagatctgacgtgggcagatatttgctctgatcttggtatatctcgcaaccagctcaagggtgtgggatctctcactgctgacggtgaggaacgcgtcacaagccgcccgccacagctgacttctgtacaacgtattgccggactgagtgactcaaaacttcggaagagtttgttggattggtggaatcacagtgatgattccgcgcgagaagcaatgatcgcgttgctgtcaaattcagtcgatatcgacgataaaaaggatgatcagaccttcgttgcagcagttgatttcatcgagagtttggacgatagcgctctaagtaagttggacacaattgatctgcctgctggccgggctgcttattcaactgacacattgaataaactgactgagcgcatgcttaccacagatgatgatctacatgccgctcgcaaggtcctgtttaacgtcgatgataattggcgtccgccgcagcccgctataggtgcacctttagggaatgcctcggtagatagggtgctgaagatcgtggatcgattccttatggctgcgcaaaaacgatggggagctcccgttgccgtgcaaatcgaacatgtgcgcaatgggttcgcttcaattccttcggctcgtaaagacaagcgcgactatgagaagacgcttgaaagacggaagaaatatcgtgatcagcaggcagaacgtttgaaagacgagttcggcctcgataagattcgtgaagacagcattcgccgtttggaagcgataacccgacagaacggacaatgcttgtactgtggtagaacgattacgcttagcacctgcgaaatggatcacatcgtcccacgcaagggagttggttccacgaacacgcgggacaatttcgcagcggtctgcaaactgtgcaatcaaatgaaatcgaacacgccgttcgcagcgtgggcgcgaaccgattcagcgaaacagcgaggtgtgtcactgagcgatgccattagtcgtgtcaggatgttcaacattgattccggcgagatgaatggtcgcgaagcaaggaacttcgaacagggtgtgattagaagattgagccagacggaatgggatgagccaatcgataaccgttccatcgaatccgtcgcatggatggcagatgaactccataggcgtattgactggtattacaattcctctcgctacgagggacatggcacggagagcacagaaggttcaacgaaggtgagagtgtaccaaggaagcctcacctcggaagcgcgtaaagcgtcgggaattgacggtcaaattcattttgctggcgcaagctataagacgcgtcttgaccgcaggcatcacgctattgatgccgcagtgatagcgatgatgacgcagggagcagcgcaaacgttgcagattcgaaggaatcttcgcgcatcacagaatgccgttggctatattgaacctgatgaaattgcgtggagagactatcccgcagaacataacgctgggtatgcggcctacgcgaaatggttggattcaatgtacaagctgttggacttgctcaatgatgcgttggataacgatcgaattccagtgattcatgcacaacgctattcactcggtaactccatcgctcacgatgcgacgatcagaccgctcgatagagtgcttttagggagcgccatcagtgtggagaccatcaacaaggcatcaactccagcattgtattgtgcgctgaccagactgccggactattctgcagcagatggtcttcctgcatctgagaatcgtgagattagtgtcaatggaattcgctactccgctcatgacaatatcacgttcttcagcgggagcagtgcccagatcgccgtgcagaacggttctgccgacataggaagcgccatccatcatgcacgaatctacaaatgttacaaggaaaacaagaagggcattcgcacatatttctacggaatgattcgcgtattccaagctgatttgctccgtgctgcacatgatgatctattcacgtgccagttaccggttcagtcggtttctatgcgatatgccgataaaaaggtggtagatgcaatcttgtccggacgcgccgaatacaggggatatctcgttgttggcgatgagattgaagttgaattcaacgatcaaggtaacaatgcgattgcatcattcaagaatttcttcgaacatgagctgtctgtttctccggatgtagtcaataaatgggtagtagcaggtctgatggagcccaccaaaatcaggcttcgcccatctattctctctcaagagggaatggacaggatcaaagaatcacatcctgtggacgcttctatcttgcatgacgttgagagcatttttgataaaggctggagaatggcggttggcactgcttccaagtacaagatgcgtgtggtccgacggaatgtgttcggagagaaacgatatacctctaaaaaacatatgtctgtttgctggggcttcgactagaaggagtatgacatgcaaagcgcttggcgagttattgactgcacacaaatgcatggcagattgcggtacgttcgcgggcgcttgcttgtctgccctgataatgaggaacccgcgcaaatcccattgacccagattgcggtgattttgctggggcagcatgctacatgctcaaccgcattattgttcgaattcgcagagcatggtatcagcactatgctctgcgactggcggggagttccagttggggcaatgcacagctggggaaatacgccgacttttgtgtcacgcaggcaacatgctcaggtttcaatgagcttgccaaggcagaagaatgcgtggatgcaaatagttaaggcaaaaatacgaggtcaagcgcactgccttgatatctgtgaacgttcaggaggtaatgagctcagagaacttgcgaaaactgttcattctggtgacagcaccaatgttgaaggtcaagcagccaggaagtattggcagtatcttttcgatgagagcgaggattttcatcgtaaaccaggcgctggagagggacgaaattcgcaatttgattatgcatatgcagttttgcgaggctttgttgtaaaagcaattttctcagccggactgtctccgacatttggggtcaatcatcataatcgtgcgaattacttctgtttagcagatgatttgattgaaccatataggccagcaatcgatgcacaaatcgctaacttagatattcaagattctacgcttaatcaagagagcaaggcggctcttgtgcatgcagtaaacgcacaattcaatgcagggctgaccattccaagttcgatcaatgattttgctcaacaatttggcttgtactgcgaatccaagcagcgtgccctatctgtgccagtttttggagcggatgatgaagaaggatgaggatagtggtggcatgtggtgcctagtgatgttcgaccttcctgtcgggactaagagcgagagacatgaagcgaccgtgtttcggaacttgcttcttgacatgggatacatgatggtgcagttctcagtgtatgcgagatacacacccacccaatccggtaacagatcaacgatcaacatgattaaaaagcatttgccatcaggcggaaaggtgagagtgcttcatatcagcgatcatcaatgggcacaatctttaaggtatgtcaataatgttccgcagcataatactgaagcaccagacgtatttacacttttttgattatctttttgcccaaaatcgttggaattcttaccttcttgtaggctaatcaagtctatcaagaaggtaagaggctaatttccagcggatagccaacacggctgatttcatgtccaagtctatcaagaaggtaagaggctaatttccagccgcgtcaacgtcacccacgtctccggcacaagtctatcaagaaggtaagaggctaatttccagcggctgctgggccatgcatcggtcgaaaccaagtctatcaagaaggtaagaggctaatttccagcttggaacaggagatagacataccgtcgtcaagtctatcaagaaggtaagaggctaatttccagctcctgaggtcacagtgagtgatggtcagcaagtctatcaagaaggtaagaggctaatttccagcttccgtctctgtttgagacaggcagactcaagtctatcaagaaggtaagaggctaatttccagctctccaatgtgcgctcgccatttgccgtcaagtctatcaagaaggtaagaggctaatttccagctcgatgcctagcctattttgccggccaccaagtctatcaagaaggtaagaggctaatttccagcactcttgtcggtaggccctttacccgggcaagtctatcaagaaggtaagaggctaatttccagctgtagtgcgatgatggttgtttcgggtagtcaagtctatcaagaaggtaagaggctaatttccagctgagcgttggaatgaattccatcgccggcaagtctatcaagaaggtaagaagctaatttccagcattcggcgtgtcgatttgcatatcttatcaagtctatcaagaaggtaagaagctaatttccagctcgacatacgcgtacatcgattttttcgcaagtctatcaagaaggtaagaagctaatttccagctcgacatacgcgtacatcgattttttcgcaagtctatcaagaaggtaagaagctaatttccagccagcgggaaagcgttccctccgatgtcgcaagtctatcaagaaggtaagaagctaatttccagcaccggaacggcaaatggctggccaaatccaagtctatcaagaaggtaagaagctaatttccagcaccagtgcacgttcgtttccgtgatctgcaagtctatcaagaaggtaagaagctaatttccagttccctttcatggggagcgcggattgaaatcaagtctaccaaaagataattaggaatgtgtgaagctaatttccagcttacaatccaaaacatgacttatcatagcagatttgcgactaacctctttgagtgtctgtgtgcataggaacgtggatcaactgtgttgctaaccacggagatatccgtagtaaatgaaatcgatataaaaatgtaagaaattatttactatatgaatagtaatgccaatgttaaataatggtttggcaatgataacgggtggcattcaacggaacggcatagagcagaaataagtattattcatctgtcttcttatgctgtagccatcgaaacagtgaggtaattagtaaggaggaatggcgatgactgaatactatatgggggttaagcaggtggcagagcatcttggtatcacaccaggtggcttgttgaatctaaagcttcctgagccggatgtttgcattggccgtactcgaggttggaaaacagagacaatcgatgcttggaatgcatctcgtccaggacgcggcgttggcggaggtcggccgaagaaacatgcggactgaatttaagagtatctgctgaattaactggtgaaagagatgttgacatgaaagttcaaggactgaatgtcgcctatcacggtgattttgagcgattccttgctgaagaccacgatgcaactacgttgaaaaaagatacggctgatgcattaggcgtatattgcgtcatgttccacgagcctttcttcaacaccgaagacaactccataagcatctcagccgaagaattatatcgatgggtcagctggtgcatatactacggacgctcgaaagacgaatatccactcacaattcagtgaagaaaaaactccacataatgaggcttgatcgtccacacgagtgcgtggcgaacatggtatttcgacaaaagcagttccaagtaagacaactataatgagagttgacaatgttcatgctgtagaaagtggcgtaaagcaaacgtgcgaggtatgacatgcaggtgatggaagcactgaaaaaagcagctgacatggaatccggaatggaaatacgctccgtgaaagaattcaatgatcactggtttttcacctgcatggatcctgatatgcatggagtgcaacttgattgtccacgaatcagggttcacaaggataccggcgaagcaagctatgtcctgctcacggacaaggactttttcgatagtatgaaagctcaggaagtcatactgccagaaggagtcctcccgtactcagcgcaagagcaatgaatatcacacggcatgcaaacataaaatagtaaaagacggatgtgcgggggaggtgtgatatgcagctcatggaagccttggacaaggcagcgttgaagctatcccactatgcgataggaaacgtcaccgaatggaatgattattggttgttccatccgatggatccagatgatccagataccgcgattctcgacccacctgtcatcaagatcaacaagaagaccggagaggaaagtctatccaccatcactgacccagactggcgttcaatcatgaaggaatcgaaactagtgcagatgccagaaggcgttcttccatatatggaacattacacgccatataccagcaaataatatcagaactttacccgtaaaaggccaccacatatatggcggccgatcatccctgcgagtgggggcaaacttgtcccgcgcgcacgcggtcagaattccgcgttgaccatgaactggccgctcgctccatcacgctccagcaggttagacgatatgcggcggaaactcgatggcgcctcggtcatatacgatccgtcattgtactctgtaacgagctgctgaatctccgtatcggtggcggacggtgcgaaaaaacgcgcgacaaacgggtaatcggcggcgatctcatcagcattgcccgacgcataaacgcgcatcatcgtaggtgtgccatcctcaacacgataggcaaccacatcaacgtcgagagaacccaattccccgtgcaccgcttgggcgtttttatacgcgcccaaacgatactcggcacgataatactgcccactggaatcttgcgggtcaaacactgcgacatcggacattttcacgccattcgccgcactgaaatttttagcgaactcctcagcctgattcgtggcagcagtagacgaacccgaattggatccactacgctctttgagcgttatttctggagagctgctggctgacggcgatgacttcgcaggactagcactcgcgctcgccgataaggttgtgttagaccttctgccgccattggcgccgccgcctatcgcggccaacacgagcacgacgacaacccaaaaccaccaacgtttccataacggtttttgtacaccgtgcctattttcgtcattcgcgcttttctgttccattttccacttcctgcctcaaaatcgtatcatcatcacgagtgtggggcgaatgagggaggggacggtgccccgccgaacctgttcggatcatcccaccggtgtggggcaaacgaaaccgaaccggcgcggtcgcctcgtggcataggcggtccggcacaccatgacgaatgatgcagcaatcctacgggtatgaaaaagatcccgaaggttgcaacttcggagcctttacttccgggctgttgcgcctgaaagattatcatcatgaagaagaatatctccatcattatagggcatccgcaacggaactgccacacactcgttatcgggcccatcgggtgcggtgtgtcgagcgcccccacctgcgggtgattcgcccagcgccttccgcgcccgtccatattcggaagtgtgcggatcacccctgcaggtgtggggcaaaccaccacggcatgagtcgctaaaaacgacccgcttttacggttctctatgccccaccgaacggtaagtagcccacatgcaccaagccacgtagtacaacgacagcagcatacgggacaggtcgcggttgtacagcagcacgatgcccaacggaaccagcagcgtcgctaggatcaccgctaacgatccacgatcgaaccgccagtgccggtacaccagcacggccagagacatcaaccagctcgtgagatacacgaatgcatacaccgtgaatacgccggggtggtagcccagctcattgactaggcataaagcgaaggcacaacagccgatcagtgcggggattgggctttgattgtcttgattcaaactggatgctggagctgtcgatctggtcatgagttgctcacctgatttctgatctcagaggaggccggccctactggcgggtagtatcacacccaccatgcctagggagagaatactgaccaataacagtctcaacccatatatgaaagccttttgccccttcatgttgtgttcctttgcacgaatgcgcttcctacgcggagggaggcgccgttgcccccatttaaaaaggctacgagactgtaagccatcaccgcaacgaggcaggcatggaatagcgaataaagcgcctgatctgtagcacaaggctcaaaacagtgggacgttctctgcagtagtcccagagtcggtctgcttgtattttttggagccgatgaacatgctgccgctatgtctggcttgctcctcctcaagccgcctgcgtgattcctccatcaccttggatggctccacctcggccgccaactgtttcgttgggttctgttccggtgcggactccttgtcttcgcggttgaagtggaagacgaagcccgatagggacggccttccacttcccgctttctttttctggtacttgcgttcgattttcagatgcatcaaatcgcctaattcgtcttcaatcggcttgagcactctgcggttcagctgaccaatgttgaagctttttgtcacgtcgaggaggcggcgaaaaatgtcgaggctgaccgcccgcatcttcagtagatctgtactgcttggcgcgcctgtagaattccttggcgtatgaggatcaccgcgagtgcggggcaaaccgcctcgcggtatttggcttcccagtctgtgttctcgctcgtaccctgcggctcgtcgacgttctcgtcctggttgtctgttgtgttgtctgccatgtaggctcctgttctgtcgggcccatgcgggcatgaaaaagcccctcatgcgaggggcttgtacgtggactgcgccggaatcgaaccggtgtattacgccttgcagtccttgggtatggaaaaggccacccatttgggcggccttgcgatgatatggttgagcacattcatacggctgattgcagtaagtgctcgtagccttctttatcttcgtccgtcaggcatccgaatgcgtaaagcaggacgtctttggggatggagacctccggcagcgtggcggaaccgagaagccagtccaaagcgagatacggctcaccgacttcgaccatttcctgataggggtcgatgtggtgcttctccatcgctggggcgacatatggggcgagcctgttgatggcagccatgatgtcattctcacttgccaagcctcctcctttgatgctcattcatggggtaagctgattcaacgctgaatctctcctttgtttttcgccgtttttcaagtatatctctatatactcgtcatcgatcaacggatcatccccgcgactgcggggcaaactcgcccgtctcctccagcacgatgtccatcggaggatcattcccgcgagtgcgggggcaagccgactgaccgtaatgtcgaggacatgttacaggcggcattgggagacggttatccacgatccgtcggtcatgggaacgggtatttctcattattcaggcatgtttgtggagaaccgtgggcggagatcatggacgcgcaaatcgcgaatccaaatgcatacgcactgatagagaagtattttccgaaatcggttacaatattcaatgagatggtgaaggaggcgttgaaatgaaagcacgaggactcaatgtcttatacgacgggaatttcgagcaatttctcgctgaagaccacgacgcatctactttgaaagaagataccgataatgcattaggaacttattgtcgcatgttccacgagccgttcttcaacatcgaggaaaactccataagagtatcagccgaggaattgtaccgatgggtcagttggtgcatctactacggacgttcgaaagacgaatacccactcgccaaccaataaagaaaaggccgccacgcattatggcgcctttcgcatatcaggactggaaggccacgcacaccggttcgactccggtgcagtccacgattcaaacccgccgcacggcgggttttttattatccgaaacgggtcaaacgaaaggaacaccgcgatgagcgacgaggaaatcaaggcgctgcaggacaagctggcggaaaccgagtccaaactcgaggaaagcgtcaaacactcccgcgaatgggagtcgagagccaaggcgaacaaagcgaaggccgacgaactggaacagctcaaaaccgaacgcgaagccacggccaaggaactcgaggaacggatcatccccgcgagtgcggggcaaacgtgagcggtttcactcgaacccgttatcggctttcgggaacccctcgaagaagcatggacgcacaatgatggtcagtgatatcagtgatcggtcttgcgtctggatcccttattggcccttgttcgtagggccgggctctattctccgcacggttccctcataatcgatgagaagcacgtacggatcatccccgcgagtgcggggcaaagttgcatgtggtcattggcccgccgacctgcgatggatcatccccgcgagtgcggggcaaaccatatggcaggtaatggtcttcccacctgtgccggatcatccccgcgagtgcggggcaaacaaattcccgttcggcgttcgcccatctctgtgcggatcatccccgcgagtgcggggcaaactcgaccacctggtgccgccagttcgtcgaccgcggatcatccccgcgagtgcggggcaaacgctgcgtatttctgcacctgaccgctcgcgcccggatcatccccgcgagtgcggggcaaactgccagtcaccgcgaatcacagcggttgcgaacggatcatccccgcgagtgcggggcaaacacatccaattcctatggcctgtagacccactacggatcatccccgcgagtgcggggcaaactttcgatgcaggagaccgtcggcgctttgtcgcggatcatccccgcgagtgcggggcaaactcctgcgcggtcttgaacgcgtcgagcgccttcggatcatccccgcgagtgcggggcaaaccacatggccgtgggacagtcgttcgtctctgggcggatcatccccgcgagtgcggggcaaactcgcggcttcggcagaaggtcagccgctgccgcggatcatccccgcgagtgcggggcaaactctccggcgaatccgctgagcttgtcccacagcggatcatccccgcgagtgcggggcaaacccacgcgctggcatgtgtacaggctcttgtcctggatcatccccgcgagtgcggggcaaacttcttcgatggcgcggtggtcaggggcggtgccggatcatccccgcgagtgcggggcaaactcggtcgtaccagccgtagtccacgctctgcacggatcatccccgcgagtgcggggcaaactgcgcctgaatccttgaggccggcggccatgtccggatcatccccgcgagtgcggggcaaacgttccagatgttgcgcacggcattgcctgcgccggatcatccccgcgagtgcggggcaaactcgtcatcgacgcgcaaagccccgccaccgtgcggatcatccccgcgagtgcggggcaaaccaatcggctatgcccttgagcacgtcgagcaccggatcatccccgcgagtgcggggcaaacacgagtttcctgccctccaactcgacgccacgcggatcatccccgcgagtgcggggcaaacacgagtttcctgccctccaactcgacgccacgcggatcatccccgcgagtgcggggcaaacttcttcgatggcgcggtggtcaggggcggtgccggatcatccccgcgagtgcggggcaaacatgaaggcagacgaaccggaatgcgactgcgacggatcatccccgcgagtgcggggcaaaccacattcaacgacgtgcatatcgtcgacggcgcggatcatccccgcgagtgcggggcaaaccgatagttcttcacgaattgtgttaggccacacggatcatccccgcgagtgcggggcaaactcggagaacgccaccagcggctctccgggaaccggatcatccccgcgagtgcggggcaaaccggtgtaggaacacgttcacgccgtgtatgagcggatcatccccgcgagtgcggggcaaacggcacgatcagtgcggggctggtgaccgcgaacggatcatccccgcgagtgcggggcaaacgtatgcaggcaacgggaatttcttcggacggtacggatcatccccgcgagt

SEQ ID NO: 572 - DNA, 22281 bp, synthetic construct
  source 1..22281: mol_type = other DNA
  misc_feature 1..22281: note = Synthetic
ccccccccccccggccgtcgagaagccggaacccatcggcggtcgactcacccgcctcaaggcgaaactcgccaagtcgaacaatccgttcggcaaggccctgttcaacatcctcgccaaggacaacctctccgaagcggactgggaggatgtcgaagacacgctcctgctcgccgacgtcggcgccgaggcgtccgaacagctcgtcgacgatctgcgcaccgacgcgcgcgtcaccggcaaggccgacccggccgaggtacgcgccgccctcaaggagaagctgctcgacctggtcgggcgcgacacggaccgtcgcctcaacgcggacaagccgggcgcgaacacgccgggcgtcatcatcatggtgggcgtgaacggcaccggcaagaccaccaccgccggcaagctcgcccgcctgttcgtctccgagaacaagaaggtcgtcatgggcgcggcggacacgttccgcgccgcggccgcagaccagctcgaaacgtggggcgcgaaggtgaacgtgcccgtcgtccgctccgacaaggacggcgccgacccggcgtcggtcgcgttcgaggcgagcgccaaggccaaggaggcgaacgccgacgtgctcatcatcgacacggccggccgcctgcagaacaaggcgaacctcatggacgagctcggcaagatccgccgcgtcaccgagaagaacctgcccgtcgacgaggtgctgctcgtgcttgacgccaccaccggccagaacggcatgacccaggcgaaggtgttcgccgaggcgatcggcatcaccggcgtggtgctctccaagctcgacggttccgcgaagggcggcatcgtgatttccgtgcagaaggagctcggcgtgccggtcaagctcgtcggcctcggcgaaggcccggacgatctcgcgccgttcgatccggaaagcttcgtggacgggattctcgcctgaccccgatgcctgctcccaggcggtttcgcgggccgtttcgcgggccgcgattaacaatcgcgtaacctgccgtaacgcaatcaaaaccatccgggcgttcactatcgaaccgttagcccccatgagggggacgacgaacggaacagagccgggctgctcccagcggcccggcatagatgtgaaagagagggaggtagacatggattccggaaacaccgcatggatattgacttccgcgtccctggttttcctcatgacacccggtgtcgcgttcttctatggtggcatggtccgtgcgaaggccgtgttgaacatgctgatgctcgaggcggccgcgctgtcggtcacgatggtcatctggaccctgtggggctggtccatcgcctacgccggctctgacgtcgccggcatcttcggcgatccggcctccggcttcctgctgaaggattcgatggtcgccaaggacggcgtgttcaccacgaccggcctgaacgccaacaactacccggtctccgtggacgtggccttccaggtcgccttcgcgatgatcaccgtcggcctgatctgcggcgccatcgccgagcgcgtcaagtacagcacgtggatgatcttcgtggcgctgtggctcaccttcgactacgctccgctggcgcacatggtctggaacaagggtctgctgtccggcacgggcgcgatctccaccgccatcggcgcggccgcgcatgacttcgcaggcggcaccgtcgtccacatcaacgccgcagtcgccgcgctggtgatcgtgctcatcatcggcaagcgcaagggcttcgccacgcagccgttccgcccgcacaacatcccgttcgtgatgctcggcgcgttcctgctgtggttcggctggttcggcttcaacgccggttccgcgttcgccgctaacggcaccgccggctacgcgtgggtctccacctctgccgctgctgccgccgccatgctctcctggggcttcaccgagaagatccgctccggccactacaccgcgatgggtgccgcctccggtatcgtcgccggtctggtcgccatcactccggccgccgatgtcgtctccccgctgtggtccatcgtgctcggcgcgatcgccggtgtcctgacctgcctcgcctgcggcctgaagttcaagttcggctacgatgactccctcgacgtcgtcggcgtccacggcgtcggtggcttcaccggcaccgtgctcatcggcttcttcggcgaaggcaccggcctgttcgccggcggcgactggaagcagctcgtcgtgcaggtcctgatcgcgctgtgcgccatcgtctactccgccgtgatcaccggcatcatcgccttcgcgctggagaagaccatcggctggcgcgtcaccgaggcccaggaggtcggcggcatcgacctcgccgatcagggtgagcgcgcatacgatttcgctggcaccgccagctccgtcctcaaggaggtgaggtgagatgaagctcatcaccgcaatcattcagccccataagctcgacgacgtcaaggaggccctcgcggccgccggcgtgcacggcctgaccgtgtccgaggcgaacggctacggccgtcagcgcggccacaccgaggtctaccgcggtgccgaatacaccgtcgacctgattccgaagatccgcgtcgaggtgctgagcgacgacgccgacgccgaaacgctcgtcggcgtgatcgtcaaggccgccggcaccggcaccatcggcgacggcaaggtctgggtggccccgctcgactcggtgacgcgcgtgcgcaccggcgagtccggttccgccgcgatctgaccggtaccgtcggtccgatcggaaccgacggttcgctcggacccgacggccggatccgatgacagacgtccctccttcaccggtgtgtgtcgcattgccgggaaggtcgggccatcaatagagccaggtccccgcacgccgccctcgtggccgtgcggggacctgtcgtataaggctcgtcatgcggttttcggggagccgaccgcggttgacgtttcacggaacgcacggctgcacacaccacatcacatcacactcccgcaacagaaaaggatggcggcatggccagcgcggtcgatggtttgaaacaacggttcatggcgatgagccagccggacgcggacggcgtctaccgcgacggtgcgggcaaacgcaaggcgcgcaccgcactcgcgatggactgcctcacccgcctgtggggcgaggcgaagagcggcgtcgacttcaccgtgcccgaccacggcatcgggctggccgccgtcggctcgctcgcccgcgggcagatcggccccagctccgacctcgacctcgtgctcatctacgacccgcatgcgctgaacgaccagcagctcaacgcgttcgccaacaaactctggtacccgctgtgggattccggtctcgacctcgaccattccgtgcgcacccgccagcaatgcgaatccgtcaccgaccatgacctgcccgccgcgatgggatggctcgacgtggagcccgtcgccggcgacatcgacctcatccgcgccaccgccgactccatcctcgaacgttggcgcaaagccgcgcgcaagcggctgcccgaactgctcgcatccgccacgagccgactcgacgagttcggccgtctccaatacatcaaccagcccgacatcaaggagtcgcgcggcggcctgcgcgattccgtgctcatctccgcgctcgccgtgtcgtggctcgcggaccgcccgcacggcgcgtacgacgacgccgtcgaacgtctgctcgacgtgcgcgactgcatccacctcgtcgcgaacaaagacacgaacctgctcctcaccccctatcaggacaaggtcgccgcgatgctcggcctcgccgacccgacactgccgtccggcggcgaacgcgaggcgaaatccatcgacgacatgcagacgctgctcgcgcgcatcggccgccgcatcgcgttctcgctcgactcgaccgcctcgcgcgccgagcattcgctcacgcacgagcgccctcgtttcgcgttcttccagatgatgtcgcagcgcgccggcggccatcgcgaggcgccgaagttcgagacggtcgcgccgggcgtcgccgtacacgagcgtgagatcgtgctcgcgccgggcgccgatccgtcgcgcgacgccgcgctcgcgctgcgcgtcgcgctcgcctcggcgcagcgcgcgctgccgatcaaccccggtacgttggagagtctgcgccgctgcccgatccacagcaaccggtgggacgccacgacgcgcgacctgttcgtgcggctgctcgcgtccggcccggagctcatccgcgtgtgggaggagatcgatttcgtcgacattccgggcaaatggatgccggaatggttgggcatccgcaatcgtccgtcggtttcggccgcgcaccgctacaccatcgaccgtcattccgtggaggtcgtgtcgcggctgacgcgcgagatcggattcccgtcgcgcgccgaccgcgacgcggccgcgggggccgcgcgcggtgccggcgtcgccgcggacggttccggcgtgccgcggtatgacgacacgcatttcacggcgctgctgctcgccggcatcctgcatgacatcggcaaacgttccggcgtggccgatcacgccgcggagggcgcacggcacgcgccggtgatcctcaaacgcatgggctacgacgcggatatcgtgcgcatggtgacattgctcgtgcgcgagcatctgacgttgagcgagttcgcgaccggccgcaatccgaacgatccgaacaccggttccgatttggcgaaccagttgcgccatgatccgatgctgcttgacatgctctatgatttgacgcgcgccgacggttcgtcgctgggcgccacttcggaggaggccatcacgaagaagtacgggtggagcacgtggcgagagacgctggtcaaacagatggtcgccgcgacccgctaccacatgtgagccgccgcgtgcggaccgtggattgggccgcacgcggcggctcgggagggaatcgtggtggttcaggaacgaaccgtgatccacgcgtcgccgtgggcgcgcagggcgttgaacagggcgcgcagaccgatgaacaccacgttgagcaccacccacagggcgatcatgcgcgcggcgggcgtggtgagcacggcgccgtccagcgcgttcacgccgacgagcgcgagcaggtacgcgcaggcggtcgtgcagcaggcgccggcgaggtagcggtagtcgcccgcgccgatgaggatgccgtcgagcgcccacatccacccgcacaacggcaggaacacggcctgcgtggccatgccgatcgtgatgagcgtctgcacgtcggcgctgggggagaacaacggcgcagccacgaagcccgccacggccatccccacgccgatcatcacgccgcatgccgcgccggcacgccccgccgccgcggtcatcgcgcgcgcctcgcggaaccgccgcgcgccgatttcggtggcgacgagcgcctgcccggcgacgccgatcgcgtccagcatgttcaatacgaaattccatgacgcgttcaccgcctgatacgcggcgagcaccgtgacgcccatgcgcgccgcgagcatgaccgtcgccacgaggcagacgcgcagggcgagcgtgcgcacgaacagcggcaggccgtcgcccgcgctggtgaggatgccggcgaggcgcggacgcaccgacgcgccttccgcgcgcgaccacaggatcgccggaaccgtcaggaagacgcccatgaaccattgcgcgatcagcgtggccgcgcccgaaccggtgatgccccagccgaatccgatgacgaacagcagttccagcaccgtgttcacgattgcgccggcgatggctgcggtcagggtgatgcgcaccttctgcaggccgcggaagatgccgttcgccgcgtagacgagcagcatgccgggcaatccgaacacgacggcttcgaggtagcgttgcgcctggtcgagcaccggcccgctcgcgccgagcgccgcgcacaacggccgtgcggcggcgaacagcgtggccgatacgacgacgccgatgatgagcgccagccacatgccgtcgatgcccgcttcgaggccttcgcggcggcggttcgcgccgatgagccgcgccacctgcgaagtggtgccgtaggcgagaaagacgcacaggccgacggtggtgaggatgatggtcgatccgatggacagtcccgccaatgccgcgtcgccgatatggccgacgacggccgtgtcgatgaggatgaacgtgggttcggcgatgagctggccgaacgtggggagcgccaacgcggcgattcgcgcgtaggtgctgcggctgttgctcatgtggcgctccgtttccttggtttccgtggttgttaacctgccgttcagatgcgattaccacggtgttacgtgttgcgcaagtcggtgtccatggtggaaaaagtaatccacaggttatccccaacttatccaccgagttatccccatagtgtggataacttggtggattttcgggcgttttcgggggtgaaaatgtggataactttttcttatccacatcggtttcggcgtgtcgtaaggctttagggggtgtttgtggataacagtgtggataactttgggctatccacatatctagttttccacagcgcgcggcgaccgtatatctgtggtgccgggtcgatgtggataaccgggcgcgtgtgttggacgttacgtgttgttcaccgtgtggatggtcgtgtgggtcggcgtgtgggtcgtcgcgtgccgcgcggtcgtggtgcgtgtggcgtatgacgccgtggcggcatcgtgatgcgtgcgtggcgtggcggcgtcacggcgtgcgcgtgtggtgcgcgcgattatcgtgcgcgacgtgtcggaccgtcgtgcggcgcggcgtgcgtgtgtggtgcgggcgcgtggtgcggttgacgtgcgcgacgggcgcggctcttcccgcgcgtacgctcacgtccaccgcgtgtccgcatggtggcgctgcctcgctggggcaccacgcccattccttataatcgttgcgtttacgtagaatatgcggcaaacactcccgcaacagagaaacgggaggcatcggaagaagattggatagcagtggctctcatcgtgcagaagtacggcggctcgtcggtcgccgataccgattcgatcaaacgtgtggccaaacgcgtcgtcgaaacgaagaaaaaaggcaataaggtcgccgtcgtcgtctccgcgatgggcgacaccaccgacgatctcatcgaccaggcgctcagcatcgactccaacccgcccgagcgcgagatggacatgctcatgaccgccggcgaacgcatctccatgagcctgctcgccatggccatccacgcggaaggcagccgcgcgcactccttcaccggccagcaggccggcttcttcaccgacgcccgctacggcgcagcgcacatcaaggccgtcaagccggaacgcgtgaagaacgcgctctccatcggcgacgtcgccatcgtcgccggcttccagggcatcaacgcgaagggcgacgccaccacgctcggccgcggcggctctgacacgtccgccgtcgcgctcgccgtcgcgctcggcgccgacatctgcgagatctacaccgacgtggacggcatcttcaccgccgacccgcgcatcgtgcccaccgcgcgccgcatccccgcaatcggatacgattcgatcctcgaaatggcgtcctgcgggtcgaaggtgctcgcgctgcgctgcgtcgaatacgcgcagcggttcaacatgccgctgcacgtgcgctcctccttctcgcaccggccgggcacgctcgtcgtgccggacggcgtcgacccgcgcaccctgccgaacctcgactgaacccgccgggcgaacccgcgaccaacccttgcacttgtgcactctttgcactgaaccgaaagcgacataccaatgagcaacaacaacgaacaatccatgggcgacctgttcccggacctcggccccgaggcgccggtcatctccggcatcgcgcacgaccgcagcgaggcgctcgccaccgtgcgcggcgtgccgaacgagcccggcatggcggcgaaggtgttcgccgaactcgccaccgccggcatcaacgtcgacatgattgtgcaggcaggctcctccgccggcaccgcggacatctccttcaccgtgccggaagcgtccgtcaaggccgtcgagaacgcgctgattgacaaccatgacgtgctcgactacaagtccttcgacgtggacacgaacgtcggcaaggtcgcggtcgtgggcgtcggcatgaagacccactccggtctcgccgccaagttcttccaggcgctgagcgacaagggcatcaacgtgctgatgatctccacctccgagatccgcatcgccgccctcgtgccgctcaaccagctcaacgacgccgtcaaggccctccacaccgcctacggcctcgacgccgacaaggtggaagccgtcgtctacggcggcaccggccgctgaatcaggcgcggtggtgacgagcgtgtatgctcaccacgcccgcgtgttctgcctagatgagcgttacacttgacagtgctaattctcaataagagcggacatgttagccgctttgattgctcagcagtcttcgtgctgttaggggcggggtcatacccgccccgttttctttatttcggtagtattgctcattaacgttgttctcagagaagagggtgaaatgggtgcgaaacactaccgtgttggcattgacgtgggcttgaattcggtcggtttggccgctatcgaggtcgatgacgacggcatgccggtgaagattctcaatgcgcaatcggttattcatgacggcggcgtggacccgaatcagtcgagcaatgccacaggggaaggtagtttggttagtcgatcaagttcatcccggaaagatattgccgggcgaacgggtagtcaaacgcgtaaacggaatgcgggaattgcaagaagagtacgccggacgcttcgcaatcgttccaaacggctcaaggaattggacaggaaactgcaacaatcggggtatccgattgtggtccctgaatcgttgaatgcccatgatgagtggacgattcgggcagagcttgctaccgcgttcatcgaggatgagtctacgcgcaaggagaacgtttctattgcgttgcgtcatatcgcgcgtcatcgtggatggcgtaattcattccatggcgtggagtcgttgctgaccagcaatccatattcggaattgtatgacgttctgaggaagcgcgctgaggagcggatcggtcgccctctgaagacagaggtaactccggcgcagttgattgttgctgtgagtgcatgcacggatggagtcatgacgcggataagaacaacgcggaagaaggggaaaatacgggtaggacttctgcaaggtaaattgatgcaggaggattatgccaatgagctgaagtgcatttttgaaatgcagcatgttccccgctcagaatgggagccgttgttcaaagaggttttccatgtggaatctcctaggggatccagtaaacgactagtcgggaaagacccgtttgatgacggccagtatcgggcattgaaagcttctctggtattccaacagtaccgtatcgcagcagtgctggtaaatctccgtatcggtgacaatcgccggaacagaccattgactgtagctgaaaaacgtaaggcgtttgaactgcttgttgccgattcacatactgaaatcagttgggcagacgtggccgagtgcctgggatatgcgaagagtcagcttgtcggtgtgggtaaaactatcgatgacgatatggatcgcatctccagtgaccctcctcgaatagtgacgctgcagcggattcgtgaagccaaagggtccatcgccgattcattacggatgtggtggaaaagcgtttcagaagagtcgcgcgaagcgatgattgaattgctgtctaacgctgagggttttgaagatattcatgatgatgcggtgatcagttttgttgactctttgagcatggatgagctggctggcttggactccattggcctgccgattggtagagcggcttatggggctgaaacattaaggaagttgactgatcggatgctgatgaccgatgaggacttatatcaagcgcggaagtcactgttcggcgttactgattattggcgcccgccggcaacccatatcggcgctccgattggcaacccctctgcggatagggtagttaagatcgtcaaccaatggttgatgaggtgtgaagagcgttggggcaagccggagtccgtgcagattgaacatgtgcgttcgggatttgcttctattgctgccacgcgcgaatatgagcgtggcataaagaaacagagtaaacgtcgttccgagctcgctgaagaattgcggacaggcgggtatatcgatagcaggagcaatattcgcaagcttgaagcgttgaagcggcaaaagaatatggatgatcgacgtcaacatatacagcgccagaatagtcagtgcttgtactgtgggtgtgagattacgtttgacacttgtgaaatggaccatattgtttcgaggaaaagtgctggtgcttctaatatcaaagcgaatttggcggctgtctgtagagaatgcaatatctcaaaatcggacattccgtttgccaaatgggctgagtcggaagttgctcggcgtccagaggttagtttggggaaagcgcttgctcgtgttgataatatgttacctgattgtactggcaaggcatgggacaattttataaaggaaataaagagacgactgagacaaaccgaagaggatgaaccgattgatgatcgttccatcgaatcggtggcatggatggcccgtgaattgcgtagtcgaatcgactggcattataacgctgcacgatatcaagcgaaaactgaggaggagcttcccgaagtctctgtcacggttcgagtattctctggtaatatcactgcttccgcacgtcgggttgacggctgggggaaaaagattcatttcttcggaccgagaggcaagacgcgtctggatcgtcgtcatcacgcggttgacgcgacggttatcgctttgatgcggccatcagttgctcgagtactggcaatacgcgattcgtggtgtgatgcccaaagggtggagagccgtttgaatgtaggtgagcggccaggagaagactatccgtaccaaggggatgacggctatgaactgtttcaacaatggtgcatcggtatggaaactctattgaatctattgaatgacgcccttgaccataaccgtgtggttgttcgtcagcagatgcgtttgaagttgggtaattccattgcacatgatgctaaggtcaatgcattgcggcgtgtgcgccttggcgaagcgatggattccgacttgatttacagggcttccacgccggcgttgtggtgtgcgcttacgcgtctgcctgatttcgatgcggcgaagggacttccagcgaatagtgcacggcatatcgttgtgcatggtgtcgaatacgccgccgacgacgagataggattctttaaaaagactgcggcacagaaaaagactgcggcacaggttgcagttcgtggcggttcggcgaaaatccgttcggcgattcaccatgcgcgcgtctatcgttggtgggagcagaatacgaagggcggacgcaaatattggtatggcatgattcgtgtatttcaagtggatttgctgcggtaccaacgtgaggatttgttctctgtaccattgcctcctcaatcggtttcgatgcgatggggcgagcagcgtaccgtgcaggcggtacaggcaggtaacgccgagtatcttggatggcttgttgctggagatgaaatccgcgttgattattcagcattatctgatgatagtgctttgaaacaattctccgattggtgtgcgtgctttgattcttcaactattgcatgtacctcatgggttgtaactggttttgaggatcccagcagaattgtacttcgtccaaggattctgtcatctgaaggtttggaatccttcggcgggtcgttacctcctgagattactaagttaattagcggaaagggttggagagctaccatcaataaaatcgggaataataatgctcctgtagtgattcgtcgtaatgctttgggcgaaccgcgttggcactcgaaatcgggattgccatgttcgtggcgctgggccgagtagggaatcatcatgcaaagccagtggcgggtcatcgattgcacggagatggcagggcgtatctcctacacgcgtggcaatatgcgtgtgaagcgggatgatgccgatgaaacggttgatgttccgctggcgcagacggccgtggtgttgcttggtctgaaggtgtcatgctctgcggctgtgctgcatgagatggcgcgttatggcgtatcggtcatgttgtgcgactggcgtggagtgtcggatgcggcgctccacgcttggaccgatactccgactacggtcacccagaggcaacttgcccaaacagatatgacgttgccacgcaggaaaaacgcttggggtcgtatcgtccaagccaagattcgtgggcaggcagcttgtctggatggtctgggtcttgatggaggcggattattgcgtagcatagctgcctcggtgaggtccggggacccaaccaatcgcgagggacatgcggcgcgtgagtactggaaacgcgtgttcccctccgatgaaggattcagacgaattcccggcgaaggcgtgggcaggaacgcgcaacttgactacgcctatatggtattgcgcggattcgcggtgaaagccgtgatttctgcgggcctgattccctcattggggatgcaccatcataaccgtggtaactacttctgcttggcggatgacattctggagccgtaccgtccggcgattgaccggcgcgtggctgagctgcgtgccgatgacgctttgtccgatggcggcgtgaaacgtcgtcttgtggaagcggtcaaccagcagctcaatggtgctgggctgacgattcccagctcgctgaatgatttcgcccaacaatatggcttgtattgcgagggtcgtatcgacagattaccggtgcccgagtatgcgggtagcatatgaagacggatgaggacagtggcggcatgtggtgcctggtgatgtttgatttgccggtgaagaccaagcagcagcgcagtgcggccaccgagttcagaaacatgctgttggacatgggatactccatggtgcagtattcggtctatgcgcgttacacgcctacgcaggcaggtaatcgtgcgacggtgaaagcgatcaaagccgcgttaccggagcgcgggtatgtccgtgtgctgcatatcagtgaccaccagtgggcgtcggcgttgcgttacgccaatctggaaccggaggatgaggtggagacaccggagctgttcacgcttttttgaaggtgaaaagtgccgaaagcggcagaaaatagcccctcttgaacggctatcaagcttatcaagaggggtgaatgctaattcccaaccgactggaacgactgggttgaccactcccaagcttatcaagaggggcgaatgctaattcccaacatgatttcgtgcaggcgcaggggcgttccaagcttatcaagaggggcgaatgctaattcccaacatgatttcgtgcaggcgcaggggcgttccaagcttatcaagaggggtgaatgctaattcccaacgaatccgttcattggtggtgtctccttgtcaagcttatcaagaggggtgaatgctaattcccaactgagtttgtccatctgctgccagaactccaagcttatcaagaggggtgaatgctaattcccaacgggaattggaccgtccgaccatgcgccgcaagcttatcaagaggggtgaatgctaattcccaaccgacagctgctgcgccgtccgtcaccaatcctcggcgaggaggaattcgtcgatgcggcggtgctcgatgccgtcgcgcgggcgcaggatcggatccatcgagaccacggtcttcggatagttgtccggaatgtccctgaacactccgaactcgcgttccgcggtcttgtcgctgtcgatgagatacgtcacctgcacgtacctgcgtcgttcgcctttgtcgaagacgaaatcgacctccttgccgttgacggcgccgacggtgacggcataccccctacgcaacccctccatggcgatgatgttctccaataccccttggatctgggcgagcccgtcgccgacaatcgcgccgcgtagcccatggtcggccacatagtatttctgcagcgtcttcagcacctgcttgcctgtcaggtcggtgcggttcatgcgctccaacaggaatgcttcccgacagtattccagatagttgatgaccgtttgcgcgctgacgtcgaggcgctccgctttgagatatgacgcgatggcattcgcggatatcatgttgccggtgttctgcatcgcgaacatgacgatgcgttccagcaatgccacgtcgcggatccgatgacggcggaccacgtcgcgaagcactacggaacggtagatatccgtcagatacgttcggcgactctcctcattccagctgccggtgacgatgaacggcatgcctccttccgtgaggaacgcctggaatgaggagtctgttccgagtcgctttttcgcctcgacgaattcggcgtatccgaaggggaatacctcgaactgcacgtatcggccgcccagatacgtggcgagttcgccggacagcaatgtggaattcgatccggtgatggtgacgtcagcattcgtggtcgcgcgtagggaattgaccactttttcgaatccgtgcacttcctgcacctcatcaaggaacacgtacggcttgccgtcgatggagttgatacgttccatgagatatgcgtggagcttgtcgggattatggtatttggcgagcgagtaatcctcgaagttcatcgaaatgaactgttccgcccggcagccttcggccacgagccggcgttggatgagtcgcagcatgtccgacttgccgctgcgtcgcagaccgacaagtaccttgatgacatcggtgtcgacaaacggcatgatgcggtcgagataccgcggccgatcaactaaggctctggtttcttgcatgcaagaaattctatcaggttttccagagttcttcttctatggaagaagaactctggaaaatgatgtgaatttcttctgtgaaagaagaaatgtctgaaccgattaggtcggttgctgactcacggtgatcaattcgtcgatttcgagtagtcggcgaggtgctgcacgcgctccagactgtgccacaaatgctgtctgtgcgggagtgtggagagagagcgctccacactccctgtgagggcgatgtctatgcgcttgtgtggagcgtttgctccacacggcatgcaatcgccgttctcaagccgttgtgtggagcatcgtcgctccacacaagcgttcgtgagcctcgatgtggagcacgtggcgtgcgggagcagtgcgtgggtgacttacgcggggcagatagtgggttaacgcaagggctcaaacacccgaaatcgtggatttacagcgccaaatggacgaaatggaggcttccaaacgggtgtttggcgctgtaaatccggaataacggtgtaaaggaccggggaatcgggaatagctggggattatcaggacggggatagtgcccagtcatgtcacccagtcccatcagccccgccgcagactcaacccgcagctcgtcacacccactgttacggggaatcggagacgggctaagtacagtccgtctccgattcccgatcaagccaagccgtcaagcagcaagcacgctacttcttggtgatgtagccgagcgccttgagcatttcggcgcattcgagcgcgccaccggcggcgccgcgcagcgtgttgtgcgcaagacccacgaacttccaatcgaagatggaatcctcgcgcagacgcccgatcgacacgcccatgccgccctcgtagtccacgtcgagcttgacctgcgggcggtcgtcctcggtgaggtactggatgaagtgcttcggcgcatgcggcagacccaactcggcggcacgcgacgtgtagttcaccaggcggtcgaccagttcctccttcgtcgccttcttgccgaagttgatgaacacggtcgcggtgtggccgtcgagcacgggaacgcggatgcactgcgaggtgatgcgcagcggtccgtcgaacggcacgatctcgcccttggcgtcgtccacgtggccgaacaccttgagcggttccttctcgctcttcgcctcctcgccggagatgaacgggatgatgttgcccaccatctcgggccagtccttgaacgtcttgcccgcgccggagatcgcctgataggtgctcaccaccacctcgtgcggctcgaactccttccatgcggccagcgccggcgtgtacgcctggatcgagcagttcggcttgacggcgatgaatccgcgcgtggtgccgagacgcttgcgctggtgttcgatcaccgcgaaatgctccgggttgatctccggcacgaccatcggcacgtccggggtccaacggtgcgcgctgttgttcgacacgaccggcgtctccgtcttcgcgtaacgctcctcgatcgcgcggatctggtccttcggcatgttcacggcggagaacatgaagtccacgcccgcggcgaccttctcggcctcgtcgccgtcgaccacggtcatgtgcttgacgtattcgggcatcggcgtcgacatcttccaacggtcgccgacggcctcctcatacgtcttgccggcggaatgcgcggaggcggcgagcgtcgtcacctcgaaccacggatgattctccagcagcgtgatgaaacgctggccgaccatgccggtcgcgccgagcacgccgaccttcagtttttcggacatatcgaacctcgttggtgtagatggacgggattgcacacgtatcgttcaatcctacggaatcgcggcccgcgcggcgtgtgcgcttccaaatgatggccgacgcgcggacggtacaccgccgtcgcgccgcgcttgcgcacgtttgcgcgaacgtgcggacggcgcggtagtctgggagacatgtcgatagcatcacaggaagcgcgcaggcaactcgaccggatcgtggcgttggggtacccggatgtggcggacatgagcgccgccgcgttccgcgcgctcgccaacccgctcatcacggcgttgcaggattccgatctcggcgcgaacatcctgctggtgccgacgcgcgagctcgtctcgccggaatcgttgatcgcgcgaacgtccatctaccgtatggccggattcacgacgatgcctccgcgcgacatcgcgagtttcctgccgcaggacggtttcgagccgccggagggcccgttctatctggtcgtggacccgcataccggcacgtgctacgtgaaccgtgagccggatgtggcgcgcaagctcatcgactccgacgaacgtctgccgctcacgttggaggaagggcttgccatcgccacgcagcatccggaatggctgttggagaagaacggtttcaatctgctcggatcgcgttcggcggacggccgcgtgccgagcatctggatgagccagaacgcgccgcgtcttggtgcggtctggccgaattcgcgccacacgtggctggggaacgcgtactgcatcgcccgtcgcggcgtgagcctgttcatctgacgcgcgattcccggtatcccggaatgcttaccgctgatatgcgccgcgggtagactgaagtgcggatgatcgttcatccgtaagagtaagagcgaagatgatctgcacgagatgcggtgccgtcaatgagggcggttacaggttttgttcggaggacacacgacggagggcggcgcggccgaccgtcttgtcaccagggattggggcatgttcgattttggcgcgggaggtgaaggcgccacctgcggcgtgggcatctccgcggccgaacgaggcggaatactttgacacggactcgttcaaggcggcttggaagcagaagaaggcggatgccaacgcccgtacgttctctaccgtaatccgacgctgtatgacaagacgtcggtgaaggtgacgacggcgaatgacaaagacaatccgttcgtgccgtcatcaggcgaggatggcgatgacggcgatgtgagtttcaagccggcgccgagcgacgcgaatgcgtactattttgtcgaatccaccgacggattcgactggtcgtccttgcctgacgcgcaggtcgacaccgggtcggagcagtaggattcgtgagcccgtataaccccggcggttcggtctcaacctgtgcgaatcagacggctatctgcgcaattcgggtacgaacctgcgcagttcgggtacgaacctgcgcagttcgcatatgaacctgcgcagtgggttgctgaagagcggctgtccgcaccggttcgtggatttccacattgttggaattccaacgtttccgcatcggcaatccagctgctccgacggctctttcagcaccccactgcgcagattcgcgtccaaaccgcgcaggttcgcccggatactgcgcaggttcgccctcaaaccgcgcaagttcactctcaaaccgcgcaagttcgcccatcctacccggttaaggcaaccccctaccggcggaacgccttgcgtgcggcggcgaacagcccgtatccggcggcgcccaatgtggcggtgaggccgagcagcaccggcgggcggcgcagctcgttgcgcaggctcgcgccatccgtcacgcaatggtcctcgaaccatacgcgcagctcgttgcccgaataacgcccgaccagatcgccccatgtgagcatgtgcgtcacataatcggccggatcctcctcgtggaactcgaacaggcggataccgcggtagcgtgacttcggcccgtagcattcgaacccacaggtcggcgcataccccagatcgatgccgtcctcatggcccacgaacgcgttcttatggtcatgcccgcagaacagcgcgaaatatccgcccgcctcgcgcatcgcggccacttcgcccacattctcgtcggcgcagccgattgcctcgcccaaccgcgagccggggcggcacttctcctcgtcgagcacatagcaacgctccgcatgcgtgcgggcgccctccaccgcgttcggcgtccatgcgggcacttcgcgcagcacgtcatagaactcctgcggcggaatgtgctggaatgctatggacggcaccgggcgcccgtcgccgttgcgcgcggcgagttcgcgttgcacgtcgcccagccaagcgatcgcctcgggggagggggtgccgtaaccgtcggagtcggccaggtcgagccgacgcgggttcgtggcgtacagcgggtattgcgcatcgcgttcggcgggcgtgttcttgtccgcgtagtcgccggaattgatcatcgtcacgctcatcgcgacatgccccgagccgtccgaggcctcgatcggcagcgcgaacgtgcccggttcgagcgcgagcgcgtcggaaccggcctgcgggttgaggcagccggggaattcgcggtagatgtcgtcctgttcgtcggcgaggatgccgcattggaagtcgtggttgccgtaggtggcggcgaacggcacgcccgcgttcgtcatcgggccgaggaacgcggcgaacgtgtcgcgcactttggtgcgcgtgtcgtccatgagttcgtcgagcgtgaccacgtcgtcgacgggcggcatgtcggggttgcggcgttgcgccatgcgccggcgcacgccctgcagtttcgcctcgatctccgtgatgacgcggacgcgcgcgcccggctcctcgccgcggcggcgcaggaacgtgtcgatgtatgcgggatcgtagccgcggatttggtcgccggtgaggacgacgagatcgggatcggcgacgtggatcgcctcttcgatgagacggatcgtgtctttgtcgacatcgggcttgtcctggatgtcggccatctgcagcacgcggaacgtgccgttcttgcggaatcgcagtgtcatggctcccagtctagtcgtggtgaggtgaagacaggtggagaacccgggggagcccggggcgcccgcgaagcgccgctacatggtgagaccggcgaggcgttggggcgcggcgtagctaggatgggaagttgcgcatgttacatgtgcgtaaacggatacgtcgccggaatattcggcgtggaatggccgccgggagacggccacgcatcaagcaaaggaggaacgatgggtcaggatcaatcatcggtattcgatctcgcggctgtggccgcggcgtccaacggagggaacaacgacccgctgctgcctcccgcacgcttcatcggcgagccgcagaagccgagcaagatgccgtacaccaagtacgtcgcctacgacaagcaggtaccgttcgacttcccggagcgcacctggccggagaagaagctgcgccgcgcgccgcgctggtgctcggtcgatctgcgcgacggcaaccaggcgctcgtcaacccgatggattccgagcgcaagctgcgtttctggaacctgctcatgtccatgggcttcaaggaggtggaggtcggtttcccgtccgcctccgaaacggacttcgacttcatccgcatgctcatcgaacgtgagctgattccggacgacgtcaccatcgtcgtgctcacccagtgccgcgagcacctgatccgccgcacctacgaggcgctcaagggcgccaagcgcgcgatcgtgcacttctacaactccacgtccgtgctgcagcgcgaggtcgtcttccgcaaggacaaggaggacatcaagaagctcgccaccgacgcggccgaactgtgcaagagcctcgaatcggaggccaagggcatcgacctgtactacgagtacagccccgaatcgttcaccggcaccgagccggagtacgccgtcgaggtgtgcgacgcggtgaccgacgtcatcaagccgacgcccgaccatccgatgatcatcaacctgccggccacggtcgagatgaccacgccgaacgtgttcgccgacgaggtggagtacgtctccacgcatctgaagaaccgcgattccatcgtgctgtcgctccacccgcacaacgacgagggcatgggcgtggccgccaccgagctggccgtgctcgccggcgcggaccgcgtcgagggctgcctgctcggcaacggcgagcgcaccggcaacgtcgacctcgtcacgctcggcctcaacctgctcacgcagggcgtcgacccgcagatcgacctgtcgaacgtgccggagatccgcaagaccgtcgagtactgcaaccagatcaagatctccgagcgtcacccgtacgcgggcaacttcgtgttcaccgcgttctccggttcgcatcaggacgccatcaagaagggtctcgaggcccgtcaggtggcggcggaccgtgccggcgccgatcttgacaagttcgtctggctcgtgccgtacctgccgatcgatccgaaggacatcggccgcacgtacgaggcgatcatccgcgtgaactctcagtccggcaagggcggcatggcgtacctgctcaagacgaaccacaacctcgacctgccgaagcgcctgcaggtggagttcgacaagatcgtccagaagtacgcggatgagacgaagaaggaagtcaaggacgaggacatctggcgtctgttcaaggacgagtatctgccggtcgagcagtcgggcatgacggccgccggcgtggtcgtcggcgacacgcacgacgcgacgctcgccccgtggggccgcctgaagctgctcaaggtggcggtctcgtccggcgaggatggttccgacaccgtgctcaaggcgcgcgtgctcgaccgcggagtgaacgtcggcgcggacgagcctcgcgagcgtgagatctccggcatcggcaacggcccgatcgccgcgttcctcaacgcgctgtcgggcatcggcatcgacgcgtccgtgatggactatgtcgagcacacgatgtccgtcggcacggacgcgatggccgcctcctatgtcgaggcgcaggtcggcgaggatgcggacgcgcagatcatctggggtgtcggcatcgattcgtcgatcatcacgagctcgc

SEQ ID NO: 573 - DNA, 21482 bp, synthetic construct
  misc_feature 1..21482: note = Synthetic
  source 1..21482: mol_type = other DNA
cgtgatcgactccgacatccaagccgacgaggccgagcggctcgccaaccagcagtgaccgggccatcggcggggtcagagtgatggttccctggggaatcgcacccccgttgatgtctctgcgtcgctaagtgcgcgccgaaacgacaagtgcgcgcacttaggaacggaaaatccgtggtttgcgtcgctatgtgcgcgcgtacttcgtttcggcgcgcacatagcgacgcaacggcgatatgccggcagacgccccggcgcgaaacgccgtgatatgaacgccctgagacgatgagccaccaacgagcggaaggacaccatgacatccgaatccagccatgacgtgacagacgtgatacgctccgcggcgcggacgctgcatgacgccgacatcgacacgcccgagcatgatgccaagttgttgctcgccgaagcgtgcggccgcgacctgcgcgacatagacaaggcgatgttgatgggggagcctctggacggcctgccacacgagcatgcgagttttgatgccccggatgccggcgccgcgagctccgacagctccgccactgcgggcgatgccgtcaccacggcgctcgcccgattccacgccatgatcgctcggcgggccgcacgtgaaccgttgcagtacatcacaggccatgccccgttccgctacctcgacctggaagtcggtccgggcgtgttcatcccgcgcccggaaaccgagaccgtggtgcaggccggcatcgactggctcacgcgcgaacggctgtccaccccgcgtatcgtggatttgtgcgcgggcagcggcgccatcggactgtccttggtcaccgaggtgcgcggcgcgcaggtgtgggcggtcgagaaggtgccgcgcacctatgactggacgatgcgcaactggcggaggatatcacgtctcgacccactggccgccgataattatcatctcgagctcggcgacgccaccagcggcacgacgctggcccagtttgacggcaccatcgacatggtggtcacgaatccgccgtacatccccgaagcgcagatccccgaacagcccgaagtgcgcgaccatgatccgaaggcggcgctgtatggcggctccgccgacggcacgctgataccggagcggatcgtgatgcgagcggcgggattgctgcgccccggcggcgtgctggtgatggagcatgacatctctcaggggccgcggctggtctccttcgcacaggccaacgggttcggccaggctcataccggcgacgactggaccggccggccccggtacctgttcgcggtcagatcctgacccaggatctgatgccgtggccgggccgagccgggaatccgggcacggcatccggcctgtcagcgcgcgtaatcctgatatgcgctggcgtccgcgtcactgatcgtgcgaatcggccgcgcgggattgccgacggcgacactgtgcggcggaatgtccttgacgaccaccgagccggcgccgatcacgcagccctcgccgatcgtcacgccaccgaccaccgtcacattgccgccgaaccagcagttcgacccgatcacgatcggcttgccatactcgtagtcgtaatacgacccgtcagccgcacgccgcacgttgcggtcctggaaccggatcggatgcatcggcggcagcagctcgtccagtaccgcggctcggccggcatggtctccccgaggcagcgcgttgaaccgggtgcacaagtcgcctgcgcgctctcgcatagcggagagctcggggtcggcgggattgtagagtttgccggcgagcatttcctcgcgctcgcgggcggatacggtcgtgtctctccgccgtaccgtcacatgaggcccgtcgtcgccggcgccggccagcgccaagtcgtggcgcaatggtgcaatgggaagccgtgtccaggccggcccgcgcgacgcgggggagagcgaacccgtggcgtcgggccatgcaccggcctaccatcggtgtggcaggacgtgccataatacttggatagcggtattcggatacgcgcggcggcatgtgaccgccgcgatgggcgtgatacgcgatacgggaggtctgatgagtgcggttcgcaaggtgaatgaggaatccctcgccgaggcggcgtcggtcatcgcaggcggaggcctggtggtcattcccaccgacacggtgtatggcgtggcctgcgacccgcgcaacgaggccgcaatcgaccgcatctatcaggtcaagagccgcccgcgcttcaaggcgctgcaggtgctgctggcatccgtcgaccagttggacgggctcgggctcgacctgccgtcgccactgaatcggctggccgcgcagttcctgcctggtgcgttctcgccgatcgcggtggcccgcgaggactgcacgctcgccacggtcagtgccaccccgcagggcaggcgtacgcagggcatccgcgtgccgaattcggctctgaccctgcgcatattgaatgagctcggtcctcttgccgcgtcgagcgcgaaccgttccggcgacgaaagcgcacagacggtcgaagaggccgtgcaggcgttcggcgacgatgtgcagctatatcttgacggcgggccgacgcaaggccatgtcgccagcacggtggtcgccgctgaccctcatgagcgcgacggcatcgtcatcctgcgagagggcgtcatccctcagcccgtcgtgcgcaaggccgtgcacatgaacggtggtggtctgggcgcatgaggatatatctgctgatcgccgccatcgcaggcggcgtcacctggctggtcacgccgctgattcgccatgtcgccatccatatcggtgcggtcggagaggttcgtgcgcgcgacgtgcacaccatcccgacgccgcgcatgggcggactgggcatgctgatcggattcgcgttcgcaatgatctactccagtcgcatcgcattcacgaccggactgttcgagaacaacaaccaggagtgggtgatcctcgccggcgcggtgctgatatgcctgctgggcatggctgacgacctgtgggatctggactggatgctgaagatggccgggcagctgctgatctcggtgttcgtggcgtggggcggcctgcagatcatatcgctgccgatcggctccctgatcaccgccagccccagtatctcggtgacgatcaccgcgatactgatcgtcgcgtcgatcaacgcggtcaatttcgtcgacggcctggacggcctcgcggcgggcatcgtcgccatcggcggcgtcgcgttcgccgcgtactcctacatcatcgcgcgcaattcgccgtcctacgcctcgatggcgacgctgatcgacgtggcgatggtcggcatctgcatcgggttcatcctgcacaactggcatccggccaagctgttcatgggcgactccggctcgatgctgctcgggtatctcatcacctgcgcgtcaatcgtgatgaccggccgtctggatccggcgtcgatccatgccagcgtgtacctgccggtgttcatgccgatcctgctgccgatcctggtgctgttcctgccagtgctggacatgtgtctggcgattgtgcgccgactcagccacgggcagtcgccgatgcacccggaccgtatgcatctgcaccaccgcatgctgcgcatcggccacaccgtgcagggagcggtgctgattctgtgggggtgggcggctctgatcgcggtcggctcgatcatgacgttgttcttcaaggtccattatgtgctcatcggcttcgtcatcgccgtggtgttgctgacggtggcgacgatgtacccgtatctgaagcgtcgcctgccggagatcgccgcggagaaccagtcgtatgcatccgcgcggcgacgggcacgtcattcgtttgacgaaagcggtgacgggaaaaaacggcgcccgtgacctgccgatgatgatggtcgagaccatgttcgtgtcgcattcgtcgcattacgctcatatagtgaatgcatggctacaaattctgaagcgaatatgcaatcctatgctcctgtccccccgattttctccaagctgggcctcgcgtatgacgatgtgctgctgctgccgaacgagacggacgtgattccctccgaagtcgacaccaccactcatctgacccgtgagatcaccatgaaggttccggcgatctccgcggcgatggataccgtcaccgaatccgagatggccatcgccatggcccgcaacggcggtatcggtgtgctgcaccgcaacctgtcgatcgacgaccaggcggcccaggtcgatgtggtcaagcgctccgagtccggtatgatcaccgacccgctgaccgtcaacccggacgtcacgctcgccgacctcgacaagctgtgcggcaagttccacatctccggcctgccggtcgttgacgaggagaaccgcctcgtcggcatcatcaccaaccgcgacatgcgcttcatcccgtccgaagactacgaccacctcaaggtcaaggacgtgatgaccaaggagaacctcatcactggtccggcgaacatctccaaggatgacgcccaccgtctgctcgcccagcacaaggtcgagaagctgccgctgatcgacgacaacggcaagctcgccggcctgatcaccgtcaaggacttcgtcaagaccgagcagtacccggacgccaccaaggatgagcagggtcgtctgcgcgtggccgccggcgtcggcttcctcggcgacgcctggcagcgtgcctccgctctgatggaggctggcgtggacgtgctcgtggtcgacaccgccaacggtgaggcccgtctggcactcgacatgatttcccgcctgaagcacgactccgccttcgacggcgtgcagatcatcggcggcaacgtcggcacccgctccggtgctcaggccatgattgaggctggcgcggacgccgtcaaggtcggtattggccccggctctatctgcaccacccgtatcgttgccggtgtcggtgtcccgcagctcaccgccgtgtacgaggctgcccaggcctgccgtgccgctggcgtgccgtgcatcgccgacggtggcatccactactccggtgacatcgccaaggccctcgtggctggcgcttcctccgtgatgctcggcggcacgctcgctggctgtgaggaagccccgggcgagaaggtgctcctgcacggcaagcagtacaagctgtaccgtggcatgggctccctcggtgccatggccccgcgcggcaagaagtcctactccaaggaccgctacttccaggccgacgtgacctccagcgacaaggtcgtgccggaaggcgtggaaggcgaagtgccgtaccgcggaccgctgaacgccgtgctctaccagatgctcggtggcctgcaccagtccatgttctacatcggcgcccacaacatcgccgagatgccggagcgtggcaagttcatccgcatcaccgacgccggtctgcgcgaatcgcacccgcacgatatcgtgatgaccaccgaagccccgaactactccggcttccacaacaactgatcggttgatgcccgctagcttgcgctagttaggggttgattccttgtgaaaagggtctgcttatgcaggcccttttcgcgtatgtggctcgagatagcttgtatgcgctggggtatagtctgaactgttcttgtaataacgggtgacatgacgaaaagaggcttaccatggtcgacagccatgatgcagaaacttacagcgcaaaggattcgcgcctgatttggattgactgcgaaatgacgggcttggatatcttcggcggcgacgaactcgtcgaggtgtccgtagtgcccactgactttgacctgaatgtgctggacgagggcgtggattacgtcatcaagccgtccgagaaggccgtgaaccatatgaacgatttcgtgcgccagatgcacacccgttccggcctgatcaacgagtgggagaatggcctgagcctggccgaggccgagcagaaggtcaccgaatacgtgctgcgcttcacgccggaaggcgtgcgcccgctgctggccggcaacaccatcggctccgataagaagttcctcgaccattacatgccgaacctcatgagccacctgcattaccgcagcgtggatgtgagcacattcaaggagctcgcccgccgctggtacccggccgtgtacgagaaccgcccgccaaagaacggtggccatcgtgctctcgcagacatcatcgagtccttggacgagctgcgctactaccgtaaggcgtttatggctcccgcccccggcccggacgatgccgcatccaaggccatcgccgccgacatcgtagccaccagcatcctcaataagtagtccgccgtacttggctcccctccctgaggggagtctagagaggttgatatgcgccaaaccgaagccctggccattctgaacgccggcgcgaacgtgttcctgaccggtgcgcccggtgccggtaagacctatgtcttgaacgagttcatccgccaggctcgggccgacggcgccagtgtagcagtcaccgcgtccacaggcatcgcctccacgcatatcaacggccaaaccattcattcgtggagcggcgtcggcgtggccaccgccctgagcgccagcctgctcaaactcatcaaatcccggcgcaaacgcaagattcaggccacggacatcctcgtcattgacgaggtttccatgctgcacgcttggctgttcgacatggtcgaccaagtctgccgcgaagtacgccgtgatccacgcccgttcggtggcatccaggttgtcttgtccggcgacttcttccagctgccgccggtttcggtgtccgggcgcaaccgcgacctcatcgcccccacgcccgaattcatcgccagtcgcgaacggtatgcccgtgccggcttgaaccccgaaggcttcatcaccgaatcgctggtatggcccgaactcaacccggtgatctgctatctgaccgaacagcaccgtcaggataccggcgaactgctgaccgtgctcaccgacattcgcgaaggcgacgtgacccagtccgaccgtgacgtgctcgtcactcgtctgggcaaactgcccgagcccggccaggtcgccgtccacctgttcccggtgaaccggcaggccgacaatctcaacgacatgcgcctgaaccagatcatgcttgatccacacgagttccacgccgagacagcaggccctgccaacctggtcgaccgactcaaaaagaacatgttggcccccgagcgattgatactcaaggaaggcgcggctgtcatggccctgcgcaacgacaccgatcgccagtacgtcaacggctcgctcggcaccgtgcgtggcttcgcacaggagaacaagggcggctggccgatcgtggaattcgagaacggcaacatcgtcaccatgaaacaggccacatgggagatgatggacggcgacaccgtgctcgcctccgtcttccaggtgccgttgcgctgcgcgtggggcatcaccatccacaagtcgcaaggcatgacgcttgaccgtgcggtcatggacctgaagcgcaccttcgcgccaggcatgggatatgtggcgctgtcccgagtcgaatcgctgggcggcctctatttggccggcgtcaacgaacgcatgttcctcgtctcgcccgatgccgtggtgctcgacggcgacctgcgcgaagcctcggccgcggcctccgaccagttggccgatgaaggtgcaaacgcgttcaaacccgccgagccggacgaattcggtgccaatcccgacgatgacttcgcccaggacgcgttgttctgacatgattcatgttgtgtcgctaagaggatttgcgctatactgatacagctaattctcagtaagagtggacctgatagccactttgaatgctcagcaggcaactgctaggggcgagccatttggctcgccctgtttcgtacagttacaatgttcaagacaatgatgtgcattgtagctacggtgaaaggtgttttatgcgggggaagcgttaccggataggaattgacgtcggtttgaattctgtgggccttgccgcagtagaagtgtccgatgagaacagtccagtgcgtctgttgaatgcgcaaagcgtaatccacgatggtggtgtggatcctcagaagaataaggaagcgattacgcgaaagaatatgtcgggtgtcgctcgtcgcacgcggcgtatgaggcgtcggaagcgtgagcgcttgcacaagctcgatatgctcctcggcaaatttggataccccgttattgagccggagtccttggataagccctttgaagaatggcatgtaagggctgcgctggctacacgatacatcgaagatgatgaacttcgccgtgagagtatttctatcgcattgagacatatggcaaggcatcgcggatggcgcaatccttatcgtcaggtggactcgctgatcagcgacaatccatattcgaagcaatatggcgaactgaaggaaaaagcgaaggcgtacaacgatgacgcaactgctgcggaagaagagagcactcccgcgcagttagtggtggcgatgttggatgctggatatgcggaagctcctcgactgcgttggcgtaccggttctaaaaaaccggatgcggaaggctatttgccggtacgtttgatgcaggaagataatgctaacgagctgaagcaaatattcagggtccagagagtgcccgcggatgagtggaagccgctgttccgtagtgtgttttatgcggtgtctcctaaaggttcggcagagcagcgtgtcggtcaggatcctctggctcctgaacaggctagggcattaaaggcttctttggcttttcaggagtatcgtatcgcgaatgtgattacgaacctaagaatcaaggatgcttccgcagaacttcgcaaacttactgttgatgagaagcaaagcatttatgaccaactcgtgtcaccttcttcggaagatatcacatggtctgatttatgcgatttcctcggcttcaagcggagccagttgaaaggcgtgggtagcttgaccgaggatggagaagaacgtatatccagccgtccgcctcgattgacttcagtccagcgtatttacgagtcggacaacaagattcgtaaaccgttggtggcctggtggaaatccgcgtctgacaatgagcatgaggcaatgattcgcctgctgtctaatacggtggatatcgataaggtgcgtgaagacgtggcgtatgcttctgcgattgaatttatcgatggattagatgatgatgcgttaaccaaacttgactccgttgatctcccctccggtcgtgctgcatacagtgttgaaactttgcaaaaactcactcgtcagatgctgactactgatgatgatttgcacgaagcacgtaaaacgctgttcaacgttacggatagttggcgtccgccggcagatccaattggggagcctctgggtaatccatcggtcgaccgtgtgctgaaaaacgtcaaccgatatctcatgaattgtcagcagcgctggggtaatcccgtctcagtgaacattgaacatgtgcgctcttcgttctcgtcggttgcctttgcccgcaaagacaagcgtgaatatgaaaagaacaatgagaagcgttcgatattccgcagctcgttgagtgaacagcttcgcgcggatgagcagatggaaaaagtgcgtgaatccgatttacggagattggaagccattcagcgtcaaaatggacagtgcctgtattgcggccgtacgattacattccgtacgtgcgaaatggatcatatcgttccccggaaaggcgtcggctctacgaacacgaggaccaatttcgctgcggtatgtgccgaatgcaatcgtatgaaatcgaacactccatttgcgatttgggcaaggagcgaggatgcccaaactcgaggggtaagccttgctgaagctaaaaagcgtgtgacaatgtttactttcaatcccaagtcatatgctcctcgggaagtgaaagcgttcaagcaagcggtaatcgcaaggcttcagcaaacggaagatgatgctgccatcgataatcgttccatcgaatcagtggcttggatggctgatgaactccaccgccgtatcgattggtatttcaatgcgaagcagtatgtgaattctgcttcaatcgatgatgctgaagccgagacaatgaaaaccacggtgtcggtgttccaaggccgtgtcacggcatctgcaagacgtgcagctggcattgaagggaagatacactttattggccagcaatcaaagactcgtctggatcgtcgtcatcatgcggtggacgcttccgttatcgcgatgatgaacacggctgctgcgcagacgttgatggaacgtgaatcattgagagaatcgcagcgtttgattggtctcatgccaggcgaacgttcatggaaggaatacccctatgagggcacttcacgctatgaatcgttccatctttggttggataatatggacgttttgcttgagctgcttaatgatgcgttggacaatgatcgaattgctgtcatgcaatcgcagcgttatgtccttggtaattccatagcacatgatgccacaattcatccgctcgaaaaagtgccgttgggctcggcgatgagcgcggatcttattcgacgtgcttctacaccggccttgtggtgtgctttgacgcgtttgccggattatgatgaaaaagagggtttgccggaagattcacatcgtgaaatacgagtgcatgatactcggtattccgctgacgatgagatgggattcttcgcgtcgcaagctgcgcagattgctgtgcaggaagggtctgcagatatcggttcggcgattcatcatgcccgcgtgtaccggtgctggaagacgaatgccaagggagttcgtaaatatttctatggcatgattcgcgtattccaaactgatctgctacgcgcttgccatgatgatttatttaccgtgccgttgcccccgcagtctatttcgatgcggtatggcgagcctagggtggtgcaggcgctgcaaagcggtaatgctcagtacttggggtcgttggttgtcggtgatgaaatcgagatggatttttccagtctcgatgttgatggtcagattggcgagtatttacaattcttctcgcagtttagtggagggaaccttgcatggaaacattgggttgttgatggattctttaaccagacgcagttgaggataagacctcgataccttgctgcggaaggattggcaaaagcgttttctgacgatgttgttccagatggggtccagaaaattgtgacaaaacaaggatggctacctccggttaatacagcaagtaagactgcggttcgtatcgtaagacgcaatgcttttggcgaaccgagattatcgtcggcacaccatatgccgtgctcatggcagtggaggcatgagtgaatcatgcaaaaccagtggcgtgtaatcgactgtaccgatcttgacggctccatctcctatgaacggggaaggatgcgagtcgtcaagaacgatacaggggagtgcgtggatgtgccacttgctcagattgcggtagtgctactgggattgcatgtgcgatgttcggctgcggtattacatgagatggcacggtatggcgtgtcagtcatgctctgcgattggcgtggtgttcctgacgctgcgctgcatgcatggactgacatgcctaccacagttaccacgcggcaattggcgcagtcgaacatgtctcttcctcgcaagaaaagtgcgtgggcgcgtattgtacagatgaagattcgtggacaagctgcttgcctcgattcatcaaaactcgaaggtggaggcttgctacgaggtattgcagcctctgttcgttcgggtgatccttccaattgcgaaggtcatgctgcacgtgaatattggaggcgaatgtttcctcaagatgagaaattcagaaggattccggggcagggttatggtcggaatgcgcagttggattatgcctatatggtgctgcgaggattcgcggttaaagcggtgatagcagcaggattaattccatctttaggcgtgaatcatcacgggcgcggcaattatttctgtcttgcagatgatctgttggaggtatataggccggcagtggattacagagtctcactgctgaatgatgaagactcgttgcaggagaaggcagtaaagaagcatttggtagatgctgtgaatcaacaattcaacggttccggtttgactataccgagctcattgaatgattttgcgcagcaatttggtttatattgcgaaggcaaaatcgacaggttgcaggttcccgaatatgtaggcgagtcatgaaacgcgatgaggacagtggcggcatgtggtgcttggtgatgtttgatttgccggtcaagacaaaacggcaacggcatgctgcaactgtctttagaaatatgttgctcgacatgggatatggaatggtgcagtattccgtatatgtgcggtatacgcctacgcaatcgggtaatagggcgacggtcaaaatgattaaagacaatctgccagctaatggcttagttagaattttgcatattagcgatcatcagtggtccacggcggcccgattttcttctggaaaacgtgagattgaggaagaaacgcctgactttctcacgcttttttgaacgtaggagagtctgaaaagattgaaaaatagcccttcttgataggctatcaagcttatcaagaagggtgaatgctaattcccagctattgttcgggtgcgatggtgatgatcacaagcttatcaagaagggtgaatgctaattttgaatgctggaatgcttgggttgatttggctgatttagctgtgatggccgctgcgggaatggcccttgcgcggttggcggcagaggttgcggcgcggattgcggcactgattgttgtgccaattgcgtctgcggtgaaaaatatggcgacggctgtgtctgactgtttatcggcggatgttccggctcaggttgtggctggaatggagaatattgcggttgcgccattgtatgcccctgccccttcattgccatttcattggcgcatggcgagggctgaaaaccaagatgatgaatcctgcatgagttatccgtgattcctgtgcgttggtacagcgcggaaggttgagcagccgacatatgcaggcttgtcggttcacgcgaatatctttaaacctatgacttccaatacccttcgtatgtcaaccatgttcctgcgcaccctgcgcgaggaccccgctgatgccgatgtcgattcagccaagctgctgcagcgcgccggctatatccgcaaggccgcacccggtatctggacctggctgccgctcggtctgcgcgtgctgaacaagatcgaggccatcatccgcgaggagatcaacggcatcggcgcccaggaagtgcacttcccggccctgctgccgcgcgaaccctacgaggccacccatcgctgggaggagtacggcgataacatcttccgtttgaaggatcgccacgaggccgattacctgctggcccccacccacgaggagatgttcacccttctggtcaaggacatgtactcctcttacaaggacctgcccgtcaccctgtaccagatccagaccaagtaccgcgacgagttccgtccgcgcgccggcctgatccgtggtcgtgaattcgtcatgaaggacgcctactccttcaccatcgatgaagaaggcatgcgcaaggcctactatgacgagcgcggcgcttacgagcgtatcttccagcgtcttgacctgaagtacgtacctgtgttcgccatgtccggcccgatgggcggctccgcatccgaggagttcctggctccgatgccgatcggcgaagataccttcgcgctggcaccttccggcaaggcatggaatgtggaggccctgagcactccggaactaccggaaatcgatgcttccaccactcccgccgcttccaaggaagccaccccggatgccaagaccatcgataacatgatcgagcgtgccaacgccgaccacccgcgtactgatggccgtgaatggcaggcttccgacatcctcaagaacgtggtgatcaccgtcaagcaccctgaggatgaagagcatgacgagccgtggcgtgaagtgattgtcgtcggcgtgcccggcgaccgtacggtggatatgaagcgactggaagcccagttcgcgcccgccgaacttgaggaagccactgaggaagacctgaagcagcaccccgaactggtgcccggttacatcggaccgatggtgcttggcccgcaggccgaggctgctggcgtgaagaacccggttcgctacctgatcgacgcgcacgtggtcaagggttccgcttggttcactggtgccgatgagaacgaggtcgactactacaacctggtgtacggccgtgacttcaaggtcgacggcgtggtggaagccgttgaggttcgccacggcgacatgagcccggatggttccggtccgttgagcttcgagcgtggtgtggaaatcggccaggtgttccagctgggtctcaagtactccaaggcactggacctgaaggtgctcgaccagaacggcaaggccgtgccggtgtggatgggctgctatggcatcggtgtttcccgcgtgctggcctgcatcgccgaaacacaccacgacgaagccggcttggcttggccgtccgtgattgccccggccgccgtgcacgtggtggccaccggcaaggacgccgtggcgtttgaaggtgccgagaagctggtcgccgagcttgaggccaagggccttgaggttatttacgatgaccgcaagaaggtgtctccgggcgtcaagttcaaggatgccgagctgatcggcgtgccgctggtcgccgtggtcggccgcgattacgtcaacgacggcaccatcgaactgcgcgaccgcaacggcgaaaacaaggtcgccgtgcccgccgccgaagccgccgacgcgctcgccgagcgcttcgccgccctcagctgagtcccacttactcagcctcggcgttaatcgcatcaagcgccattctgtccagtcgcagaatggcgctttgttgtggataaccgaaacttatccacattcttaaaatttcaactgcgtcacagtatccacatttgccagttgcccttgtgcgcttcaaacgtcatgcctcacagtggaggtaccgctggggcgtgcaagccggcaatgaagccggagacaggctccggcggtccacatccaaacaacaggccagcaggccgaggaaaggaccgatcatggcaaatcaacaagcagcagtgaccgtcaccggctttgtggccggtgatccgacactaggcggaaccgagagtttccgcgtgctgacattccgtatgggcagcacccgcagtcgactcaacccgactaccagacaatgggaggattacggaaccgcatgggtgggcgtcaaagcgttccgtgctttggccgtgaacgccgccagttcggttcgccgcggtgaccgcatcattgtggtcggctcactcatcaccgagcagtggaccaatgagcaaggcgaaccgcgcagtagaaccgttctcgaagccaccaacattgggcatgacctgaccttcggcaccacgtcgctgatcaagccacagcgtgccggtaatgggaacggaggcaatggtggcaacggtaacggcaatgccaacggtgccgtcgaaggtatggatggcggaaacgggcaacgagcatcgtcgccgtacgttaggccaacgcaatatggcgcgggcggtgccgcatccggtgtgggtattgacccgtatgcgacctcgtcggaatctggccccgtcgaatttggggtcacctccgattccggccaatcgccgtcgccatcaaccgagtccgcggccgtggccgatgccgtcatgtcgcaaccggacgccgacaccaatcaaccacagcccgtggcccaacaaacctacgtcgacggtttcgccgaatcttccaatcccagtgattccgaattctgagtgccaaccatacatcatgaaaaaccgctgtgttcgcctgtaatcgaggcaaacacagcggttttcctttacataacggggattaccaaatacgcacacggtccttgggcgcgagccacatggcgtcgccttcggtcacgccaaaggcatcgtagaagaggtccacgttgctggcgatgccgttggtgcggaattcggccggagaatgcgggtcgatctgcaggtactgttcggccagctcgtcgcggttcttggtgcgccagatggaggcgtagctcaggaagaagcgctgcaggccggtgaatccgtccatttcgggggcggtatcgagcagtgccttgatggcggcgggggagccgtcttctttggcgtcggacttacctgccgccttgccgagcgcgaatgcatacgccttgagcgcgatgttcacgccgcccaaatcgccgatgttctcgccgatggtcagcgcgccgttcacgtgcggtgccttatcaggctcgtcagcgtacttctcggccagctgcagcggcacaaagctgttgtactgggcgatcaatgcgccggtacgggcctcgaagttcttgcgatcctcgtcggtccaccagttgttgagcttgccgtcgccgtcgtactgcgaaccctgatcgtcgaagccatggccgatctcgtgtccgatcactgcgccgataccgccataattcgccgcatcctcggccttcgggtcgaagaacgggggctgcagaatcgcggccgggaacacgatgacgttcatgctcggctcgtagtaggcgttcaccgtctgcggattcatcagccattcgtccttgtcgaccgccttgccgaccttggccagctggtagccggtctcgtacaggttcgcggccttggcgttctcggcgggcagcgcatccgcggagacactcagtgccgagtaatcgcgccagtggttggtgtagccgatctttggcgtgaacttggagatcttctccagagccttggccttggtgtcttcgcccagccaatcggaattggcgatggacacgcggtaggcgtcaatcagattggcgaccagctcttccatgcggcgcttcgagctttcggggaagtgcaggcgcacgtattcgcggcccacatcttcaccacaaatgccgttgaccaggctcaccgcgcgcttccaacgatcgcgctgcttcttggcaccggagagcaccttgccgtagaagtcaaagttggtggtgtcgaagtcgcgagacagggaggaggcgaagcccagaatcatgtgaacacgggcccacagcttaaggtcggccagatcggcctcggcccagaacgcatcaagaccagtgaggaagctcggctcgtgcacaatgacgcgcgcgaacacagacttgaaatcaatcggctgagccttggcggcttcggtggcgtcataagcggtctgccaagcgtcgatccaagaaccgagatcgaagtttttcagcgtggcggccagatcggcgtaatcggtggggttgtaggtcttcaccgagtcgcgcgtggccacattgtcccaatggttggcggcgatcttggtttccacggcaaggaagtggcgggccatgccgagcgcggcttcgctgggaaccgtggcgggagcattgctctcgtcatcgccggtgttggccggcagttcatcgccaccgttggattcggcggcgggcgcgtacccggcgttcaccagctgggtggcgaccatcgccacgtatgcttcgcgcacggggacgtagtggtcctcacgatagtaggcttcgtccggcaggcaaaggccggcctgctcaaggtgggcgatattgcggtccgggtcgccggggtcgccgtaaacggccaagccgaacaggtcggggccgccggctgggttgatggtgccgagcacgcgcgtgagagcggccttgtcgatggcggaatcgatgaggtcaagctcatcgcggatcgggtcaaggccggcggcctctatggcgtcggtgttgaggaatgagcggtacagggcctcagacttgacagccgggcagtcgtcggcgtcgaggatgtcgcgtacttggttttcggcgtcttcggcaagcttgtcgaaggagccgtagcgcgaacgatcgtcgggcaatcggtaggtgtcgatccatgggccattcacgtagcggaacaggtcgttggtcggcttgatgacggaggagaacgatgccgggtcgatgcccgacgtcagcgtttcggtttcgttggtcatggccctaagcctaatcgcggcgggggagaagcgttgatggtgcagatattgcgttatgggcattgcgctgtcagtgaactagacagattgcctaattgtggtgatggttcaaattagacaacttgtctatcatagtatgtggaatctgaacatggaccttgagctaaggagttacgatgagcaatccgaacgaggaccagtggaatggccagacgggccagcccaaccagagccagccgaaccagccgaatccggcgggtcaaccgggccaaccgcagtatggtgcgtatgacagcaatcatggcggccaatatcctccgcaaggtgcgccgggagcgcaagacactcagaatcagcatgcgcagaacggccagccacaaggcgaaccgaaccagaacccgtactacggcccgtacgcctacaatccgaactatggcccgaacggccagccggcatgggggccggacggtcggcggtatcaggcggacggccaatcgaatagccaagcggacgggcagccgaatggtccatggggcgatcaaagtcaacccggctggcagcagaccaactggtatgtcggcaatttcagtccattccgcctgatcgaggaatggctgccggaaaaagccaagaccaagattcgcatcatttacggcgtggtgggcgtggccgccatcgccttgggcgctgcgctgttgctggtgccgaacaagacgctggctttggccgcattgttgctcggcgtgtatttcgtgatttccggcgtggtgcgcatcgtcagcgctctcgtggagccgggtctgccgggcggctggcgtgtgctggacgtgttcgtcggcattctgctgacctttggcggcgtggtggttgtgcgcaactacggcatgaccggtcagacgctggcattactcattactttgatggtcggtttcggatggattatggaaggcgtgctgtcgctggttgaatcgtggcgtatcccgcattccggctgggccatcgcctatgccatcatctcgattatcgccggcttcgtggtgctgatgagcccgctgagctccgccgtattcatgattatcttcggcggatgcgccatggtggtgatggggattacttcagtgattcgcgcgttcactttcggcaagcgtcgcaagtaatctcacgcttcatgcaaccagtccccagacaatcaatccaaagcgcccgtgcaggctatgtgctgccgggcgctttttctcggccttggctattaatgggctgcgagtggatttcaggtaggcttctggcggttgacctcgggctggtctagagttgagaacaagtctcaacaaggtagaaagaatctcatgatcgaactgaaaacccctcgtgaaatcgaggaaatgaagccggctggtcgttttgtcggcggcattctgaaggaactgcaggagaccaccaaagttggtaccaacctgctcgaaatcgacgagttcgtccacaagaagatcgtggaccgcaagggcgccgaatcctgctatgttgactacgctcctgacttcggcaccggcccgttcgcccactacatctgcacctccgtcaacgacgccgtgctgcacggcgtgccgtacgactacagcctgaaggacggcgacctcgtctccctcgatctcgccatctctgtggacggctgggtggccgattccgccgtcagcttcgtggtcggcaaagacccggaccccgaagacctgcgcatcatcaagtgcactgaggaagcgctcgccgccgccatcgacgtggccaagcccggcaaccgtctcggcgacatctccaacaccatcggcgacgtcgcgcgcgaatacggctacccgatcaacctcgagttcggcggtcacggcgtgggccacatcatgcacggcgatccgcacgtgccgaacgacggccgcgcccaccacggctacaagctgcgcgaaggcctggtcatcgccatcgaaccgtggttcctcaagaccaccgacgagatcttccaggatccgaaggacggctggaccctgcgtgcctccgacggctcgcgcggcgcccactccgagcacaccatcgccatcaccgagaacggcccgatcgttttcaccgatcgcaccaacctctgatcggcgtttggcgtatggtaggtgcctgattggcctgtgatgggcgatcagcgtctcattagccgtccgtctgttcgcggttttcccgcgaattcgagacgtaacaagccgaagtgcgtttgctttgatagcatgagcgcacttcggctttcgtgtatcgaccggcattcgccagcggtaacacagaagacatagagtaccgaacactagtgttcgcgaacgcgtgaacgttaatgtttggggtaagtggttcatgaagaggaaggtgcgcgaatggcaacggcacaacttgatgtcgattcgaacaagttcaacctgcccgtggttaaggctagtgcagggccggatggcatcgtcgtttccaaactgcgcaacgatggctgggtaacgcttgatcccggattcctcaccaccgcgcagtgcgaatcgaaaatcacctacatcgacggcaagcattcgattttgcgctactgcggttaccccatcgagcaactgtgcgagaactccgattttctggaggtggcgtggctgctgcgccacggcgagctgccgagcagggctgagtatgagcagttctgtgcggacatcaatcacaagacgatggttggcgaagacttccgtaccttcatgggttcgttcccgcgctccgctcacccgatgagcgtgcttgcctccgccatcaatgcgctggccacgttctacccggacaccaccgatatttctgacaacgaccagcttgatgaggccgccaagatcatcatggccaaggcccgtacgattgtgtcgtacatcttccgccgtcgtcgcgatgagccgatgctgtaccccgattacgcgcgcggctatgtggacgacttcctgcgcatgtgcttcgctgtgccgtacgagccgtttgaatccgacccgctgtatgtgcatgctttgggtcgtttgttgattattcatgccgaccatgagcagaactgctcgacctcggtggtgcgtatcgccggttccgcccacgcca

SEQ ID NO: 574 - DNA, 20163 bp, synthetic construct
  misc_feature 1..20163: note = Synthetic
  source 1..20163: mol_type = other DNA
gggtggacggacctctggtttgccggttgtcgcgccagtggcatggccggttggctacgttcggaagggataaccgctgaaagcatctaagcgggaagccttctccaagatgaggattccttgacactgttatggtgttgtgaccccccatgtggatgacgtggtggataggccgggtgtggaagccgtgcgagcggtggagctgaccggtactaacgggggaacggcaatcccattacacacttgttgtgtgtgtggttggggtgttgccggtgatcgtcggatggcatggaatgctggtcgatctgcgatacaagtgagtgagagaatgaatggttcgcgtccgctgtccggttcccggaccgccgcccccacgcgggtggccgtgtttggttgctggtgtggtgttggggttttgcggtggtcatggcccaggggtgacgcccggttactttccgaacccggttgctaaggcctggcgcggtgatggtactgcactcgatagggtgtgggagagtagcacgccgccgcaatatttctttgtttggcccggagggtgtttgccctccgggcttttttgtattcccgggttgggtttgcgcgtgtggttccgagcgagtggggcgggttggggagtttccgacacactccgcccgggatgacggggaggggttgtgttgtcatcctgaacgcagtgaaggatccttcgccattgcacgttgaccgtccatcgtcggtccagtgacttcgtcttcacacctctacaggagcgccacgatgtccttctcgatgtcctcaggcttggtggtcggtgcgtagcgggctgtgacctgtccctcgcggttgacgaggaacttggtgaagttccatttgatggcgtcgcccaacgtgccgcttttctgtttgcgcagccagacgtagagcggatcggcgttcccgccgttcacatcgatcttggcgaatgtggggaattcggtgccgtaattgaggcggcagaaagcgccgatctcctgatcggattccggagcctggttggcgaactggttgcaggggaaagccagcacttcgaagccttcatcgtggtgggcgcgccggagcgcctccagaccgtcgagctgtggggtgaagccgcatcgggtggccgtgttcaccaccagcagcacctgcccgcgccagttcgcgaggctggtgctgccgccgtccgcggtcgcgacggtgaagtcgtagatggaagtcatagccgttcctttccccgcaaggtagtccgtttcctccattatgcccgcttgagcaatgattggtgggcgtctccagtgggcgtctccagtgggcgtcttcagtgggcgtcttcaggatcagccggggatccttgcgatgatggcattgagctgattgaacgattcatcgacctgatcggcggcctgccgtccctgctcaaccagatcggcaatctgccgggtgtgcggctggggtagcgcgtggatcgacgtccgcacgcggctcagcaccgcgccggcgtccgccatgtcctgtttgaccgacgcgatcttggggatggacagcgtgccgttcgacaggctggcgcccgatagcagatcggtcaggctgaagtcgatcagcgtgccctgggcggcgctgtcgatcttgggcagcgcgttgctcgcggcgtcggcgcccgcatccagcatgccgcgcaccgccgctacatccgaaccgtagtacggcacccattcggccgcggcccacaatgggccctgcgtttcgtcgcgagcggcgatgatgtgatcgcccgcctggtccagctgggcgagggcctgtttgatgtcgttgcggtcatatgatgccttcgcttggctcgcgtattccccggcttgccgagcctcgttgatcacgcgctgcgccgagcgccacagcagcgccccggagagtcccgcggccagcagcactgcgaccagcagggagacgatgattgcaggaatgcggttgtgtttgcccatacctcaaatgtaccgtgagcgtgcggcgctggctacgtcatccggtggcgccgagatcgctctacgtcatcctgagcgacttgtcgtgccatctgtgtcatcctgagcgtagcgaaggatccttcggctcagtgcgaagtggccaaggatccttcgctacgctcaggatgacgtaatgcggactgctcaggatgacgaacccgctcaggatggggaacaagccgatctgctgatcctcctatcatgaatcccatgacagttcgcattgctcccatcgagccgcagtggttcgagcagaaggcacaggtccagtcccgcgcgtggcgggccctgacgcagggcaacatcccgcaggagatcgtggatgcgatcacccccgaattcgcgctcacgttgacgcgcgcgcacgccgatgatcccgatcaggtcacgctggtcgccctggatggcgatcaggtggtcggattcgcggaactgctgcgcacgccccgccagccgatcgatcggccggacgctgcggaactcgcctcgctgtacgtggcaccggatcgccatcgccggggcattggacgcgcactggtcgaggccggcaagcgtgccatcggcaacgatcgccttgccctgtgggtcaatgggttcaacgcaaacgcccgggatttctaccgtcacatcggcttccacgagaccggtatcacccagactgaggacgttggcacggagtttgaaatgatcgactacgatgccgatcatgacgacgaagccagtggccgcagggcgctcattgtggtggacgtgcagccgacgttctgcgagggcggcgagctgggcgtggccggcggcgatcaggtcgcgcagcggattgcctcgtacgtgcaggcgcaccgcgccgagtacgagtatatggcgacgacgcaggattggcacatcgaaccgggtgcacactggtccgattcccccgactacgtggatacgtggcccgtgcacggcaaggccggcacgccgaacgccgagctgcatccggccatcgcggcgcttggcattgctcatcatttcaagaagggccagtacgcggccgcctactcggggttcgagggcatcgaggacaacacggatcgcatccaatcgcgcgatgaagtggcaaccgcgcagtccgaaggccgcaccctcgccaacgcgctgaaggcggcggatatcagtcatgtcgatgtggtcggcatcgccgaatcgcactgtgtcaaggaaaccgcgatcgacgcggcgaagctcgggttccgggttaccgtgttcgaggatctgaccgtgccggtcagcgaggagctcggcgtcgccgctcgccgcgagatggccgcggccggcatcgccttgctgcacagtgacattctcccgcgctgagcatggtttccgaactgtcgaatcggcatcacctgagaccacacttcaatggcttcgcggggtccgatcagccgcgtggctccagcggtcgggcgcgcggcatcatgctcatcgcgctgatcgtcctcggggtactggcgttcaccatcgttgtcatgctcgaagtgcaagcgggcgatgtgacgcccgaggcgttccgatattaccggtatcagatattcgcgatcatcggaggcggagtcgtgctcgccctcgccgtcctgtacagcgtgctgttcgtgcgcggggagaggacatggtggtggtcgctgcgagtcgtttgcttcgttctgttttccgcgatgtgcattgtgggtggatgcgttgatctggaccattggaaccgggacaatgccgaagggccgttggatgcgaccgcgacggtgctgtcctggacgtaccgcgaggagaccgaggaccgtgtcgcctcctacacgctcagggtggtgatgccggacagtgccatccgcgaatgggagctgagcgaggcggtgggcaatggcatgaacccgcggtatggcgacaagatcgatgtgacctattaccggctgaccaacataccggtggcgatagatctgcaataaccgggttttgcggcggtcggcatgatcgcaacacagaatcatgatttattgcgccttcggggttagcatctcccggagctccacgagccgcacgttttcatcctcgctggcgattcgggagagcttctcggtgaagccactgagggagaacagcatcagctgaagttcctggggcttgagcttggcggcccgtgttcgcagcagatccagcatcgatggatccatgggcgcgctccggaacttgcattcccctgcgatcgccttgagtccggtccggtccagggccacgacgtccatttcatccgttcggtcccaccatcggccgatgcgattgacgcggaacggcagcatgccttggagactttccctcatgagccatgccgcgcacatgcgctcgaaggcgcgggatgcgtagtcatgcagcatcgggcgcatgttttcctcccagacgccgtccacatcgccgctgtccagagccgaacggttcggataaacgaacgtgtaccagaaggagaagtagtcgtccgcgaggcggtagatgccccgcgtgcccttggtatgctccgcgggtttggcggtgacggggaattcgcgttcgacgatgccgacctcgatgagggatgacaggtagaatcccagcgcggtgacgggaatgagcgtgtgggtggcgatgtcgttgagccgggtgtcgcccagggcgatggctcgtatgatcgtgctgtatttggcaggttccctgaattcctcgcgcatgaggatttcaggttcggagtacagcgccgagccgcgtcggaggatgtatcgcttgacgttgtccccgaggccgcgttccgggtcgaaggtggccaggtattggggtacgcctcccaggatcgagtatgccaatgccttgtcctcgtcggagtacccggggaagaatcgtatggcgtcccagtatggcatgggcgtcattttcatgatgcccgtcgcgcggccgtataggggcgccttttcggagagcagctccttttccatgaagctcatggcgctgccgcacagcacgatcatcaggttcgagtgccgtagtttgtggtcccagaggttctgcaggattgaggacagcgagggatcggagcgcaccagataggggaattcgtcgatgatgaccaggcgtcgtcgtccattcgcgggctcgggcaggtcggtcaggtcgccgagcgccgtctgccagtcggggtattgccggaggtatttgccggccggggcgccttcctcgaacatgcggcgcgagaattcggtcagctgctcctgtctggtgccggtttgggcggaaaagaacagggtcggcttgccatgcgcgaaatgcgagagggtctcggtcttgccgatgcgtctgcggccgtagaggacgatcagctgcgcccgctggtcctcgtagctgtcgtgcaggaaacggaggtcgtcgtcacgtcctatgaatgccatgcgtcgatcataatatatgatcacgactattataagtacaacaattatagacatgactatataaaaataggagcaggttcctgtccgaaaacgttgaatagtaagcaaattgaacagacattggatatttaaagtctgttgaatactcataaaatcaggtatcgtgggttatctgtggtgatgcttgtccgttctagtattcgctgatcggttgggtgtccagcagcacgcggcgcaggatggcgcgcccatatgatgggccgtccgggtcggacagatgattgggagaatggcgcagcccatcgtgcgtctatgctccttcggcatgattcgcccggggcgagggtgacgttgattttttgatccatgacggctatcctgcttgggaacgtccggaaacgccattcatgtgaaacgtcgtgggcctcccggaattgcttttgattcgatatgcgccgtcaccttggcggccgctctgaaagccatggtgacatgatcgatctgtattcatttcagcactacgacgatctcgcatcgtcgttcgcctccggtcgcgcctaccgtccctccatggcgttggcgcgcaggtcgaaggtcgatcgcgaccatggcgacagtgcatggtgggatgtgttcgagccggcttatcaatggatcatgatggaaatggacagcgcggtcggttgccggccatcgtcggatgcggcgcccgtctgggcttgggcgcgttgggtggatgcgcgggggcgggtccgtgtgaagccggatttgcggtatacgggttttcgtggtgcgtatcccggcttggatttggtgcatctgcgggtcgacgagtcacgcgtgctgctgactgatttcgattgttttcatatggtgttgaatgacacgtcgtgcatcccgcgtgatctgccgggggatgatgccggcgactggttggacaggcatcgggaggagtccgaggagtggaagcgccgcaactggcatgacaacgtgatcgtgccccacgatgccatgccggttgcttggattcaggcgaccctttgggagatgcgcgaaggcgatgtcgtggatgtcaggcgtttcccccggtggtggcggttgtagatccatggcctggacaggcagacccatgtgctacactggcattgctaattctcaataagagcggacaagatagccgctttggattgctagcagttttactgcaggggcgggattcatcccgccccgttctatttgtgcgctatacttgcataaaaataatattgtcgtgtgctcagagaagagaattatgtccggaaaacagtacagggttggaattgatgttggcctgaactccgtcggcttggcggcaattgaagttgacgaggatggcatgcctgttcgcatactcaatgcacagtcggtgattcatgatggcggtgttgaccccacgaagaataaggaagccatcacgcggaagaatctttccggcgtaggacgtcgagcgcgccgtatggtgcgtcgccgtcggcacaggcttgcggagctggataccatgctgcagcagttgggttatcctctcgtggatccggaaactctgaccaagccttttgcccaatggcggattcgtgcggaacttgctgaccatttcattgagaatgatgatctacggcgtgagtccattgctcttgcgatcagacatatcgctaggcatcggggctggcgcaacccctatcatcgtgtggattccctcttggctgagaatccgtactccgtgttgtatgacgagttgaagagcaggattgaggagtatgtcggggatcctattccgtctggcttgactcccgcgcaattagtcgaagaggcgttgaaccgcggatacgcggaacctccaagattgcgtaccagtacgaaacacggacgtggcttactgcctgaaaaactcatgcaggaagataccgcaaacgaattgaaatgtatcctatccatgcaacgagtcgatggtgacgagcaggaaaaaattcttcgcatggtatttttcgctgtgtctcccaagggatcggcggagaaatatgtcggaattgatcctttggaccccttgcaaaagcgtgcgctgaaagcgtcactggcatttcaacgctatcgcatagccaatgtagtgaccaacctcagggttcaaaccggtgacggtcagcgaccattgaccgttgaggagaagaaccgcgtgttcgctttactgactgatgcagacgtgacggatgtggaatggattgatgtagccgaggcgcttggcgtgacacgtagacagattcttggcgtcggacgattgattgaggacggtgaggaacgcattgcttccaagccgccacgtatgacgaccgtgcagcgtttgaaggatgctgatagaaaaatcgctaagccgtttctggaatggtggcaatctgttgatgacagcgcacgtgaatccatgattcgtctactgtccaacaccgtcagtttcgaaacggttcgggatgacttgacgtatgcggatgccattgcattcattgacactttggacgatgatggattgctgaagctggacaccatcgatcttccttccgggcgtgccgcctatggtgagaaaactctgcgggcgctcactgaccgcatgctgaacaccgatgaagacttgcatgaagcgcgcaagtcagtattcggggtgtcggatacatggcatcctcccgttgatccgattggagcccctctaggcaatccgtcagtggacagagtgctgaagatagtcaatcggtggctgcttgcgtgtgtcaaacgttggggtgctccgcaaagcatccagatcgagcatgttcgttcgggcttcgattccgtggcgacagcacgtcaatatgagcgacgaacggggaaacgtagcgaatatcgaaacgttcttgcaacaacgctgaagagtgatgagcatttggaccgcatacgtgatgcggatattcgtaggattgaagcgatacaacggcaaaacggcgagtgtctgtactgcggtaagccgattgcgttcagtgcctgcgagatggaccatatcgttccgagacaaggcgttgggtctacgaacacacgtaccaatttggcagccacgtgcatttcctgtaaccgttccaaatcgaatacaccctttgcgctttgggtgcaaagcgaagctgctcggaatcttggcgccagccttgccggtgctgtgaaacgcgtaaatcatttcacgcgtgaggtgcagctctatgatgccggagcttggagaaacttcaaacgcgaagtggtcagtcggctgaagcaaaccgaagctgacgaagcaatcgataacaggtccatcgaatccgtggcctggatggccgacgaattgcaccgccgaattgacggatatttcaatcgtaatgataaattcgatactcaagttgcggtccatgtttttcagggacatgtcacggcatccgcgcgtcgtgccggcggcatcgaaggtggaatccacttctttgccacgaagcataagacgaggttggatcgcaggcaccatgcggttgatgcatcggtcattgccatgatgcggccatctgtggcgcagacactgatggaacgtgagtctttgagggaagcacaacatatagccggtctggaccgcatgaaacagagctggaaggcgtatccgtcagcaggatgcgtgggatatgtcccattccagcaatggaaaaagacaatggataagttgcttgcattgcttaacgatgccttggatgctgaccgagttgtcgttcgtcagccgacaagactatctttgggaaattccgttgcgcatgatgccaccattcatcctctgatgatggagcgtctgggggatgccctggatgtcgaattggtacgtcgtgcgtctacccctgcgttatggtgcgcgcttacccgtcttcctgattatgatcagaaattcggtttgccaaggaacgagcatcgtaccatttcagtgcatggtgaagtgtatggtccggatgatgaaatcggtttcttcaaatcgtctgcggcacaaatcgaggtgcgaggaggttctgcggatattggttcggcaatgcaccatgctcgtatctatcgatgctggaagaccaatgccagaggagttcgtaagtactggtatggcatgatccgcatctttcaggtggacttgttgcgagcaagcaggcaggatttgttcacttacccgttgcctccgcagtcggtatcaatgaggtatggtgaagtccgtaccgtacaggccatacaaagtgggaatgctgagtacgttggttggctatgtgtaggtgatgagttgcatgttgacctctcgaaggaggtacttggcggtcaaatcaaagattttgctggttggtgcgcagctcagggcataccgggaatcgcaaattcgtgggtgatcgatgggctatttgcagaggccaaattgcggttgcatccccgtacgttggcttcggaaggcttggtgaagttccgggatatccagccaatccctgatggtgtggtaaaaattgttagcggtgcaggttggctgccctcgattgacgtgctgggtaggatgggcccagctgtcattcgtcgtaatgtattgggcgagcctcggtggcattcgagtaacggtttgccgtgttcttggagttgggctccggaagaagaaggctgattgtcatgcaaagtcagtggcgggtcatcgactgcaccgatctggatggtggcatcacctatgtacgcggcaatatgcgtgtcaagagagaagggcaggatgctgttgatgtacctctggcccagaccgctgtagtgttgctggggctgaaagtgagatgttcggcagcggtattgcacgagatggctcgctatggcgtatcagtgatgctgtgtgattggcgcggtgtgccggaagcggctctgcacgcatggtcggaattgccgacgacggtcactgccagacagcttgctcaggtggatgttacgttgccaaggaaaaagaatgcatgggcctgagttgtacaagcgaagattcgtggtcaagtagcgtgcttggatgagctgggactggaaggcggcggcatattaagaggcattgcctccactgtacggtcaggcgatccgtcaaattgtgaaggatatgcggcaagggaatactggaagcgagtctttcctcatgacaaagggttcaaacgcatacccggtacaggtgtcggtcgtaatgcgcagttggattacggttatatggtgcttcggggattcgccgtcaaagcggttatcgccgcagggcttattccctcattgggtatgcaccatcggaaccgtggcaattatttctgcttggctgatgacatgcttgaaccataccgtcctgcggttgatcgtcatgttgccatgctgaagtcgtctgattcgttggaagatcgatctgtgaaacgacgcttggtggaagccgttaaccaacagttcaatggtgatgggttgacaataccgagctcattaaacgattttgcccagcagtatgggctatattgcgaaagcaaaatagacagactgacggttccggaatatctgggtacgccatgaaaaccgacgaggacagtggcggtatgtggtgcttggtgatgtttgaccttccggtgcagacgaagcggcaacgccatagcgctgtagagttcaggaatttgctgctcgacatgggctacggcatggttcagtactccgtatatgtgcggtatacacccactcaggctggtaaccgtgcaacggtgaaggccatcaaggacaatcttccggctcagggatccgttcgtattctgcacatcagcgaccatcagtggtcgtcgtcattgcggttttccaatctcagacaggaatccgaaagtgagacgccagagatctttacgcttttctgaacgtgaaaacctgtggaaacggcgaaatatggcccctcttgagcggctctacagcttatcaagaggggaggatgctaattcccaacacggttgctggcgattttgctcttggacacagcttatcaagaggggaggatgctaattcccaactattcggcgagttcgatgtgcgcggtgtacagcttatcaagaggggaggatgctaattcccaactgtcagtcgagcggcgcggggagggtggacagcttatcaagaggggaggatgctaattcccaacttgggcgacgctggcgacgtggctgccaacagcttatcaagaggggaggatgctaattcccaacttcgaatccttcttctggaaggtcgcgtacagcttatcaagaggggaggatgctaattcccaacaagcttctcgccttgccttaccggctgaacagcttatcaagaggggaggatgctaattcccaacttgcgcgcggggtagatgagcgttccggacagcttatcaagaggggaggatgctaattcccaacagttctccggtaggtccgcgcaggatatacagcttatcaagaggggaggatgctaattcccaacgggtagccggtggtgttgggcacgacctacagcttatcaagaggggaggatgctaattcccaactactggtcgccgttgatgtggccgagatggcagaaaggtgttcgctgggcgagcagacgacgatcatgtccccaaattgcgtggtcgtgctgaagtgacgggactgtttggtactcagagtcggctcttcctttcccgattgggtgtttcctcggcattcgtcgccggtttgggatcagtgtacggccgttgtgaaccccgtgttttccagcaatgcgacgatgatcggcgtgtagtccgtgcgcacgacgagctgctgcagatcccgcgcgtggcggtggggccagacgagcagatcgatggtcctgccgcgcttggggaacagattcagcggcgcgctcagcgtgatcagggtatggcgtccgtcgagcggtgtgaagtccgccgtgtacgcgtgttcccggccgacgggtcgtttcgcccgggtgggatcgggcttcgcggccgcttctgtcaggtacgccatgccggacatggcgctcgtccggtcatcggtggggtcggccaatcccatgacgatcgcccgccccgtgccgacgggcagcgaatgccgggacgtgcaccggtacagtccatcagcggttcgcgccaggtccccggtcgccttcaggacctcgaacacgcgcgcggccgcgtcggcgtacccgtccgtcccgccgtaccatgacgccatgcccggctggatcgcgccgatgccgcggagccagtcgacggccctgtgcctgaccgtgttgccggacagcccgtaggagccgccgtacccgtcgtcgaggcagtaggcctgcatccagaaccgcagcgcggtgtacgtggtgcgggccatgaaccgtgcgtcatcctcgccggcgatccgcatgacgcccagatcgccggccatcatgtgcagaagcctaacgggcatgggtctcgccgatccggtccagcagcagacgcgcggagcgcgagccatggtcgccgccggcgaatttcccggctccgccgatcccttccgccgcgcgcaggcgcagggccagatgggccgcgatccatcgcgcgccggatccagacgggccgttcatcgccgccgccaccgatccgggcagcgtcagggcgttcaacggaagcgcgccgccaagctcgcggcgcagtttcccggcgtgtttcatcgtcgcgtcgtttcccggcgcgggcttgggtgtggttccggccttgctggccgggccgtttccggggcgtagcgccgcgtatcgttcggtcggcacgtagaacgcatggtcccagacctcgccggcgatgaggttgagattgccgtaggcgccgatgggcaggatgacggtcgtttcggtttccagacgggacagggcgaacagcaggctttcgttgaccgtgtcgatgggcccgtccagcacaagcacgcccgctgctctcgcggcgagcatggcctccaatgccgcggcgtcgttccagtccgcgggaatgccggcgtgggacgccggcgcccccgcgatcgcgtaggacagcgcgttcgcgatggcgggggcgaacgccgaatccacggcgaggagattggcgcatcccacggtcgccgccaatcccgtggcaagggcctccaccgggcagtcgccgtcgacggcggtcacgccatggagctccaggttgcggcggatggcgtcggcgggggaaccgccggcgtcctccacatcacgcgcgcggtaggggaccggggtcattgacggtgtcgcggcggctgcgcctgcgccggccacggccttcagcccgatcctcaatgcaacgtcctggtcgatccgcgcgagggcctcgtccctatggcttctgacccgttcaagttcctgctcgagcctgccgatgtcctgccggatcctcgcgctgcgttcctgaaggggcttggcaagctgctcgagccggtcgttggcttcggcgcggcgccgcgcggtttcctcgagatcgcggatctgcgcgcggcgtttgtccgcctccgcgtccaggtccctcagcgcctcgctgcggcagcgttccacgaatccgggattgcgcatgagctcgtcgcgcacgagcttggccatgaggtcgccgtcgggcatcatggcgcgcgacacggcctgccggagttcggcgatctcccggtcggagaccttcatcccgacgtacctgtcgagctgttccggggcgtcgagcgcggcggcgatcatccgggcgatgtgcggctcgtccagatcgcccatatcggccgcgcggtcccggaagtaccatcgcacgtattcggcggcgtactgcgacagcgggcggaccaggacatcgccgtccggttcaggcgctgtcgcgccgtcgtagaggtagcgcggattcgagccgttcccgcgatgggactcgtggaccctgtttttgtccaggacgcagtgcttcgcgcccagccgcgcgtcgggcctgatgcgcaggatcccgccggaccagtcaagctcgtcgcggtcgatcaggatcgcgtccagccggtcgccatgctctccgtacacgatgaacactttcctggtaggcgtgcccccgtgcctccatcccagggcgagcctgacgcgcatggcccgctcgtcgtgaacgtccgggcagtcgatcacctcgtagaaatcgggggtgcgcccgtacggtcgggtgtaggggtcgagcagccaggggcgtctggggtccttctggttcgggcaccacttgacgaagacgaagtcctcggcgttgcgcctcagctggctgatgatgtccgggttgtacatggtcctcggattgtccgggtctgaccatccctgctgcgccctgcccggcgcggcgttgtcgcgcagcacccaccggtacgatcctatgccgtcgagcgtgggcagatagtccatcaggcgcagcaggttgtccacgtcgcccgacggcgtcagctgcacgaggcacaccgacgcgcgcgtgtattccgaatcgttgagccataccatcagcgtcccctttcccttttcctttcccgtgcgaccgccaggccgcggcaggccgcattgccgacgtcgaagcccatccgtttgagcgcgaccgccatgcccgcgctggtcgggcggatcacggtcggcggctccgcttgttccccgccggcaccgggttccggaccgtcggcatgggccgggtcgaacgggtggagatcgtccggccgggtgcggctgatgatgaccgaggtccacggcatgcgcgcatccggtttgaggaacaggcagaacgattccaattcggcgcgcatccggcttggtcgggtttggggaagccggcggaagccgaccagcccgacctcgcgcgcgttgggcagatacgcacgattgtcgaccacatcgtccatggcatcgtcgtccgccagatagggggacgcgtacacgggcgtggcgttcaggaacaggggctcgtccgcgccggacgtcctcagactcggcggccacgccagacgggcggccctgtcgaactcggagaggcaatagccgtaaccgcccagccagtcatcggcccggtcccaccgcccggacgccgacgagacgcggacccgatggacggtcaggtttcccgggccgcggaccctgccgaccttggaaaccagatcgaaccgggacctcatgccgcgcgggtccgcctgcccggacaccacgtagtagtcctcgccggactgcagcgccgacccgatgggcaggtatctgccgccgttgacgccgaagacatcggagaagatcagaacgccccggcactcctgcgcgcgccccacgtacctccaccagcgatccgggatcgttatgcgacgccgggggtcccggatcgggtcctcgaacgggacggccgccccgcgtctcatggccaggtccgcaagggaatggccgacgccgtccaccgtcatcgcgtccttcggcgtcaggacgcggcggaggtatgcgcttgcgcgtctgcgcacgccgacctccaccccgaacatgccgtcacggggatcccgcctgagcgtcatcgccagcgggggcacctgcgtgtccatggaggcgtcgcccccggcctgatacaggacgcatcggtgcgcccactcatcgtcacgggcatggcggaaataatggatcggcgaacgccgccgcgcccgctcggcgaccgggatgacgggacggttgcagtacgggcacgcgaatttcaccgcggacgggatctccccgtggaaccgctcgttcgtctcggcgacgctcgtgagcaccggcgccatggtgggaaccagccgaacggcgctgtccatcgattctccctccggtctgggtgcggatcatatcccacaatcatacggccatgcccggcgtccgggctgtctgatcgaggccttcagaacacctcgatgtcccgcgcgagcaccgcgatcgcgtccgcccggtgctcgacccaccaccgcgggtcgttcatgcacctgatccggcgcagcagctcgtcgaacccgtccagctccccgcccgtggcgtgcccgcgcagcgccctggcctggccgagcgcacgccggcggatggcctccgcccgggagaccaggggctcgcggccctccatgggcgcgcacccgtcgagcaggttgctctgctcgtcggcgcccttgcggcaccagtcgcacgccgtggaacggatcacgcgcacccgcgcctcgaacatgcgcgtgggcaggctgtacgggaccttctccccgtgcccgcaccagtggtagaccagacggcactcgttcgccaccacaacctccttggaacaacagttcgacaaacatttgttctaagaatagaggcgggaggagacgaaaaccgtcttcactccccgccccaccctcaccccttcgcctccagcttccggctcctgaacggcggcgcgcccctgaggatgtacacgcactcgtcggtgcccagcagggccagctcctcgggcagcatgagctcgcggcggatggtcttctcgctcacggaatgcgatctttcgtcgcggaatcgatattgttcgcttaacaagcaaaactcagaggcaccctagcctgccttggccatggcgatggcattttccggcggaacctgtcgtcttggcaaagacatctgttatacgtatacttagaatgcatatacgtataggtagggaggtcccaatgccgacggataaactcaccctcagcgtggacagccaagcggtggccaagggaaagcggtatgcggcggcctccggtcgcagtctttcgtcgctcgtcggggattatctcaactcgctggatgaagtccgctccttggggggactgccaccgctcatccaggaactgatcgggatgggcgtgggcgctggggatgcgcatgcggacgaaaaggatgactatcgtcgtcatctcgaggaaaagtacctatgagactcatgctggacgtcaacatcttcatggacgtcatcctcaggcgcgaacctcactacgaaaactccgcactggtgatggggctgtatgcaaaccaggaattcgatctgtttatgccggctcatgcggcggccacgatcatctatctgacggccaggcagaccaatcacgcagtggcggtccaggcgctgtcacgatgcatggcggtcgctcacatagccccgttggatgaatcggcggtgctgagaggcctgtcatatgggttcaaggacacggaagacgctttcgtggcatctgtagcggtaggtgccaagtgcgattacattgttacgcggaatgtcaaggactttgccaagtctcccattcccgccatatctcctacggagttgctgaacaagattcagtctccgctggacgcagtggggatggagtaacccccgggtcgtatcaaggcactggagcgacggcgcaatgggcgatgcgtgatattacgttgcactcgtccggtttcatgcatgagggatattcgcactcgtcgcaattcatggggcgggtgtggaggggttccgcattcgcatggcccgtgtgataatggaatcacccgggacaaggaggctcccaaggtcggcacggcgctggcacatagccgacttgcgacttgcgaagcactgcggtatccggtatggttggtagtacacaggtccgcagcaatgtgagacttccaggagccgggggtaatcccccggcatttttcattttcagggggtgtcatggctgaaatctcgatcttcgccgacgagagcggcgagcagggatttcagtccaagtactacgcgctgacgctggtgttccatgaccagtccgatcccgttacccccatgttcgaaggctatgaacaaacgctccgcgacgcagggctgccggacatccccatgcacgcctcaccgttgttgaacgggcatgacgcctatcagcacctcggcatcagccagcgcaagcgcctgctcacctactttctgtccatgctgttcaaactgccggcacaatacgtgacgctcatctaccgaaaggccgattatgcaaccttggaacagctgggcgcacgcatcaagcgcgacatcgtcaacatcgtgttcgatcatctggcgctcttccagagcttcgacgccatcaaggtgtactacgacggcggccagagtctcgtcacgcaggccattcacggcgcgatcaaatacgcgctctcgaaacaggccgtcgtctaccgcaaaggctcgccgaccgactaccgtctcgctcaggtggcggatttcatctgcaccatcgagctgacctcactcaagtacgagaaccgcgagcagaccgcgaccgacgaacgtttcttcggatcggcacgcgccttcaagaagaactacctcaagaaggtgcgaaagcatcggttggctgcttagtgacgatcccgtaaattttttctcctcgatggccccggctcatcatcccgatgaatcgaggccatcggcgtatgcgtcccgcggacacggtcctccctacgcgacgagccgtccgaagtcacccaagccgatgacatggctatgcctgatggagaatgcctcatcgccgccgtagaccataaagcggccttccgtcggcacgtccatcatcggggcgagatcctcgagggtcgcgaacgacttcggattgtatgtggcggaggatttgacctccacggcataccgtggtctgccgccctgctccagtatcgcgtcgatctcctttttgttgctgtcgcgccagtagaacagcagtagctcgcgtcccagagcctgatggcgcttgatgatttcgaccatcactgcgttctcgtacaagctgccgcggtattggctagagaacgtgtgctcctcggtgtcgatgccgagcagattcgccgccagaccggtgtcgcggcggagtcccgttgcgaaatgggcgatccgcgatattgcgttgcactcgtccggtttcatgcatgggggatatttgcactcgtcgaattccataaacgcccaaaatgcgcactcgtcgcaattcgtgggggatgatgcggaggggtgctgtgcccgcacccagtgcgataatggaaacacccgggacaaggaggctcccatggttgagaccacaaacttatccgcattgctgccgttcggtgccattttcatgttcgttgggctgatattcatactggtcggaggctttctcctgtggcgtgatcgcaagctggccgcgcgctgcacggcatccacggtcggcgaagtgacgcggatgatccggcatgtggaccgcgacagtgacggcacctccgtcacatggagccccgaggtcgcgtatcaagtgggcggcgtggagtacacggtgtcctcgtcgatctccaaaggccggcctagcgcgcacgtcggcgatcggatgacggtcggctacgatccgtacgatcccgcgaccgcgtatctgccggaggagaagtcggagtcgttctgccggctgttcatcatcatcggcgtggtcaccttcgccatcggggcggccgcggcgatcgcctggctgttcgtgtgagtcgggaaaggggcgatcatggtcattttcgaggacgagttcatggacatccagtccggcatggtcgctttggccctggaggcggccggcgatgcgaacgtggaggtcgtatac

SEQ ID NO: 575 - DNA, 18621 bp, synthetic construct
  variation 10137..10143: note = n is a, c, g, or t
  source 1..18621: mol_type = other DNA
  misc_feature 1..18621: note = Synthetic
ggcctggtcatgcccgaatgcggcggcctcgacctcaaactccccggacgccaataaccagtaggaacaccccccgaaaccaacccacacaaacacccgaagagtcgtttttctcgtagataatcctgatttcgggaaagctacgagaaaagcttgcgctacaaggcctatttgcgccagtttttctcgagctcagggcaaatctcgagattctcttgcgctgtgcagtgggcgctgtgcagtggggttgcacaaggatatcccgaatttcgatcgcggccgactcgtcagtgaattaaattcagtgaacacaattcgggagcatcactcaatcacgtgtgaaacggaccactggtatacgccgttcaggtaaacgcaggtcaattacgcgctttcagtcggccagacgcagccaaaccgaggtgtcctgcggcagacgaccatcatcggtgagcgggccggatgcgagcagcacgtcgcctttcggcagcgcggcgggggtggcgccgaaattcgtgatgttcgcccagccgttcgcgcggcgatacgcgatcacaccgcccggctggccgtcggcaccatcccgcaggccactcggccgatcttcggcaagccaagtgcatctcgtgtccacggtctgcagctcgtgccgcagcgccagcacccgccggtagaaattgagcatcgacccggcatcggcgtcctcgacatccacggcgaaatccttgaaccacttgggctggggaagatgcggttcgccggtcgcgtcgtcggtcggctcagctgccgcctcaccagcctcaccagcctcaccacccgccgcgctcccgtcggcggcgcgcgccggcgagaagccgaacgagccgccgtggccgaactggtcgcccggccggtccaatatcggcgcatccgagccaacccacggcagcggcacgcggcacccgtcgcgtcccttggtggactcctcgcgatcgctgcgcagcggccacggatcctccagccgatcccacggaatgtccggcacctcgaacagacccagctcctcgccctgatacacgtacgccgagccgggcagcgccatctccagcatgagcgccgcccgggcgcgcttcaatccgagcggtcggttctcgacataggtgcgtcccatgcgcagcgcccaatcggcgctgatctgatgatattcgggcgtcggcacctgcggcagcgcgtagcggctcgcgtggcgatgcacgtcatggttgctcatcacccacgtcgaggtcgagccggagcgctgtgcgcacgccagaccttcgctgatcgccgcatgcatcgcatcgaacgtccaatcggctttggcgaactcgaagttgaagatctgccccagatcgtcgggcgaggcgtacaggtactgccgttcggggcgcacccacgcctcggccacggcgaaacgcggcggatcgtagcggttgaacacctcgcgacgccactcatggtagatctcgtgcacctcattgcgatccagcaccgggtgcgagccgtccgcgggcatgtcgttggtgctcatcacgccgtaatcgtccagatcgtcgcgatcaagatccttggcaagcgcctgcgccacgtccacgcggaatccatcgacgccgtgatcgcaccagaatcgcagggtcttcaggaagtcgtcgcgtacctcgcggttgtcccagttgaagtcgggctgctccttggtgaacatgtgcagataccattgtccgtccggcacacgcgtccatgccgggccaccgaaatggttcacccacgtggtcggcggttcgtcgccgttcggtcccttgccgtcgcggaagatgtagcgcgcgcgttccggggagccggggccggccttgagcgcctcctggaaccaggggtgcaggtgcgagctgtggttcggcacgatgtccaccaccaccttgatgccggcggcatgcgcggcgtccgtgagtctgctgaagtcgtccatcgtgcccaggcgcggatcgacggcgcgatagtcggccacatcgtagccgccgtcggccagttcgctcgggtagaacggcgacagccagatcgcgtccacgccgaggcgcttgagatacggcaccttttcggtcacgccgttgagatcgccgattcccgagccggtggtgtccttgaagctgcgcggatacacctgatagaccaccgcctgccgccaccacggcgccgggtcggtcggatcggcggtggttggcttggtcgcgcgcatcgcatcggtttcattcgtcatcatgcctgtccttcctgattgccgctgattgccgctgattgccgcattgacgatcatgcatgattatcgcaagccgtgcgcacaaaccgccactgcaaaaccaaggttgtgcaaaccaaggttgtgcaaaccggcgctgtacaaaccacggctgcgcaagccggcgccgcgccagccgaggctgccgcaagccgccggcgcgcaagccgaagcgcgtggcggggattgtagcggcaatgcgatacgctgtactgttccgttcatggtaaggaaaggggcgccacgatggtggatgcgcatgatgctgaggtttacagcgcgaaggattcgcgcctgatctggatcgactgcgagatgaccggacttgacatcttcggcggcgacgagctggtcgaggtgtccgtggtgcccaccgacttcgacctcaacgtgctggacgagggtgtcgatttcgtcatcaagccgagccagaaggccgtggaccatatgaacgacttcgtgcgcaacatgcacacgcgttccgggctgatcaacgaatgggagcatggcctgagcctcgaggaagccgagaagaaggtcaccgaatacgtgctgcgtttcacgccggaaggtgtgcgcccgcttctcgccggcaacaccatcggaagcgacaagaagttccttgaccattacatgcctggcctcatgagccacctgcactaccgcagcgtggatgtgagcaccttcaaggaactggcccgccgctggtatccggcggtctatgagaaccgtccgccgaagaacggcggccaccgcgcgctcgcggacatcatcgaatcacttgacgagctgcgctactatcgcaaggcgttcatggcgccggtccccggcccggacgagacggcggccaaggccatcgccgccgagatcgaggagaccagcatcctgaacaagtgatgtagtgaacaagtgacgtagtgaacaagtgacgccaagcggtcaccattcgcagacgtggccgccgatgattccgccggcgcagtcggcatgaatggcatgatcggcatgatcgctacgtcggcgtgagcgtcgatcagcggcggcgggcagcggtggaacgccaggtacgcgccggcggacggcagtgggaattcgatacgacagggacgatgcgatgagacaatccgaggcactcgccatcctgaacgccggcgcgaacgtgttcctgaccggtgcgcccggtgccggcaagacctatacgctcaacgagttcattcgcggggctcgtgcggatggcgccgatgtggcggtcaccgcgtccaccggcatcgccgccacgcatatcaacggccagaccatccactcgtggagcggcgtgggcgtggccacatcgctgaccgcgaatctgttgaagctcatccgctcacgccgcaagcgcaaaatcgaagccaccgacatcctcgtcatcgacgaggtgtcgatgctgcacgcctggctgttcgacatggtcgatcaggtatgccgggcggtgcgccacgatccgcggccgttcggcggcatccaggtggtgctttcgggcgatttcttccagctgccgccggtttccgtctccggtcgcaacaacgatctgatcgcgcccacgccggagttcgtggccgcccgggaacggtatgcgcgggccgggcgcaacccggagggtttcgtcaccgaatcgctggtatgggatgagctgaacccggtcgtctgctacctgaccgagcagcacaggcaggacgccggcgatctgctcacggtcctgaccgatatccgccgcagcgccgtgactcaatccgaccgggatacgctggtcacacgtttgggccgcatgcccgagcccggacaggtcgccgtgcatctgtttccggtcaatcggcaggccgacgggctcaatgacctgcgattgcgccagattccgagcgaagtccatgaattccatgccgaagccgcaggcccggtcaacctggtcgatcggctcaagaagaacatgctcgcccccgaacggctggtgctcaaggagggtgcggcggtcatggccctgcgcaacgacgccgaccggcagttcgtcaacggctcgctcggcaccgtgcgcggattcgtgccggagaccaaaggcggctggccgatcgtggaattcgagaacggcaacatcgtcacgatgaagcaggcctcatgggagatgatggacggcgagaccgtgctcgcatccgttcatcaggtgccgttgcgctgcgcgtggggcatcaccatccacaaatcgcagggcatgacgctcgaccgcgcggtcatggatctgcgccgcacgttcgcgcccggcatgggctatgtggcgctctcccgcgtggagtcgttggatggactctatctggccggcgtcaacgaacgcatgtttctggtttcgcccgatgccgtggtgcttgacggcgacttgcgtgaggcttcggctgccgcctccgaccggttggctgatgaaggcgtcgccgcgttcaagccctccgccaccgcgctcgacgccgcacacgccgcagatgacgacttcgcacaggatgccttgttctaatgtcctgcgtcagaagttcgttgattatgttgttggctccccttgtcaggggagctggcccgcgaagcgggactgaggggtagtgaattcgtcaacgattttctgacgcaggacactagctagctttgcattatctgcattatgaaaacgcgaagacttgagctatactgataccgctaattctcagtaagggtggacttgatagccaccttgaacgctcagcagttagctgctaggggcgagcctaataagttcgccccgttttcatatagctgcaatgcatacaacgatgttgtgtaagtagctgtgggaagaaaggttgttccgatgtcaggcaagcggtatcgggttggtattgatgtgggcttgaattcggtgggtcttgccgcaatcgaagtatccgatgatgatgccccggtgcgtctgctgaatgcgcaaagcattattcatgacggcggcgttgatcctcaaaagaatcaggaagcaatcacacgtaagaatatgtcaggtgtcgcccgccgcactaggcgtatgcgtcgccgtcgtcgcgaacgtcttcataaactcgacgttcttctgcgtcggtccggataccctgtcatcgatccggaaacgttggatgaatcgtttgaggaatggcacgtaagggctgaacttgccactcattacatcgaggatgatgagcttcgccgtgagaatatctccattgccgtaaggcatatcgctcggcaccgtggttggcgcaacccgtatcgccaagtggactcgttgctggctgagaatccatactccaaacagtatgaagagttggcgaagaacgcagaggcatatgtcagcggcttagccgatcaggaactgacacctgcccaattagtggtcgctatgctggatgccggatatgccgaggcaccaaggctgcgttggcggaccgggagtaagaagccggatgcagaaggctacctgccggtgcgattgatgcaggaagacaatgccaatgaattgaagcggatcttcgtaatgcagagaatacccaaagacgaatgggctcctttgttccgtagtgtgttttatgcggtatcgcctaagggatctgcagaacagcgagtcggaaaggacccgtttgacgtgaaccagccgcgggcgttaaaagcttcgttggtgtttcagcgataccgcatcgcaaacgtgattaccaatctgagaatcaaggatagttcggcagagcctcgcagactgaccgttgacgagaagcaaagcattttcggccagctggaatcgccgtcatcgcaagacatcacttggtcggacttatgcgacttccttggaatcaagcgcagccagctcaaaggtgtaggcacgcttacggaagacggggaggagcgtatctccagccgtcctccgcgaatgattacaccgcagcgcatccatagcgctgacggaaagattcgcaagcctttggctgcttggtggaagaacgccactgaagacgagcgggaagcaatgattcggctgctggccaacgtggtggatatcgataaggttcgagaagatgtgtcgtacgccacggcgattgacttcatcgatgggctgaatgacgaggcgctcacgaagcttgattccattgatctgccgtccgggcgagctgcatatggtgtggaaaccctgcagaagctgacccatcggatgctgaccaccgatgatgatttgcatgaggcccgaaaagtgctcttccaagtaacggatacttggcgtccgccggctgctcccattggcgagccgttaggcaatcctgcggttgaccgtgtgctgaagatcgtgaatagatatctgatgaattgccggcaacgttggggtaatccggtctcgataaacatcgagcatgttcgttcggcgttttcgtcagttgcctccgcccgtaaagacaagcgcgagtacgaaagaagcaatgaacgtcgttctgtgttccgtgactcgttggcggaacagctacgtgtcgaggaacacaaagatgctgttcgtgaatccgatttgcggaggatggaagccattcaacgacagaatggacagtgcttgtactgtgggcggaccgttgctttcagtacttgtgaaatggaccatattgtgcctcgaaagggcgtcggttccacgaataccagaacgaatctggccgcggtgtgtgcacaatgcaaccgcatgaagtctaatattcccttcgcggtctggtccagaagtgcgcaagcccagaaccatggtgtgagccttatggaggctaagaagcgcgtggcgatgtttacgttcaatcccaagtcatatgctccgcgggaggctaaggcattcaagcaggcggtggttgcgcgtctccagcaaactgaggaggatgcagccattgataatcgctccatcgagtccgtggcttggatggctgacgaactgcatcgtcgtgtcgattggtatttcaattcacagcgatatctgaattcttcttcggccgatgaggaagatgggaagatgtcgactgcggtatcggtgttccaaggacgcgtaaccgctgctgccagacgcgcgtcgggcattgagggcaagattcactttatcgcccaacaatcgaagacacgtttggatcgtaggcatcatgcggttgacgcttcggtgatcgcgatgatgaatgctcgagctgcccagatattgatggaacgcgaatcgatgagggactcccaacgcttggtggggcgtcttatgccgggagagcgctactggaaagagtatccgtacgagggctcctcaggctatggctcattccatcactggatggatggtatgaattcgctgctcggattgctcaatgatgcattggataacgaccgtatcgttgttacgcagccgcagcgttacatgcttggcaattccattgcgcatgatgccacgattcattctctcgaaaaggtgcctttggggtcggccatggaagcggatcttattcggcgcgcttcgactcccgcattatggtgtgcgttgacccgattgcctgattttgatgagaaaaagggcttgccagaggatccgagtcggcagattcgcgtgaatggcgttcattatcatgcggatgacgaaatcgggttctttgcttcaaacgctgcccagattgccgtgcaacaaggatcagccgatatcggttctgcgattcatcatgctcgcgtctatcggtgttggaagaccaatgccaagggtgttcggcagtacttctatggcatgattcgcgtattccagaccgatttgctccatgctcacaatgaggatctgtttaccgttccgttgctgccgcagtctattgcgatgcgttacggcgataccaaggttgtgcaggcggtgcagaacggcaatgcgcagtatttgggttcactggtcgtcggcgatgagattgagatggatttctctggagtgaagaccgatggccagatcggtgagtatctgttgttcttctcgcagttcggtgggggagagattgctggaaagcgttgggttgttgacggtttcttctctaattccagattgcggctgcatccacggtatatcgctgcagaaggactagctaaggcctttgaagagagtgccattccggacggagtgcaaaaaatcgtcgctggtcaaggatggcttccttcggttaacgtcgcaggagccacagcaatctgcaccatacgtcgaaatgctttcggtgaacgtaggttccttgcaaaaggtcatatgccttgctcgtggcagtggaagcatgagtgagctatgcagaaccaatggcgcgtaatcgactgtactgatcttgacggctccgttgcctatgaacgggggagaatgcgagtcgtcaagaacaatacgggagagtgtgcggatgtgcctcttgcacaggtggcggtagtgctgttggggttgcatgtgaggtgctctgctgcggtattgcatgagatggctcgatatggcgtatcggtcatgctctgtgactggcgtggcgtgcctgacgccgcgttgcatgcatggacggatttgcctactacggttacgacacggcaattggcgcagtcgagcatgtcgcttccgcgcaagaaaagcgcgtgggcccgcattgtgcagatgaagattcgtggtcaggctgcttgccttgatgcttccgggctcgaaggcggaggattattacgaggtattgccgctgcggttcgttctggagacccatctaattgcgaggggcatgctgcgcgtgaatactggaaacgcatgtttcctgaagatgatggtttcaaacgaattcctggacaaggctatggccgtaacgcgcaactggactatgcctacatggtattgagaggatttgcggtgaaggcggttgtgtcggcagggctgattccgtctcttggtgtgaatcaccatgggcgaggcaattatttctgtcttgccgatgatctgcttgaagtgtatcgcccggcagtggattatcaggtctcgttgctgagcaatgaggattcattgcaggataagacggtaaaaaagtatctggtggatgcggtgaaccagcaattcaatggttctgggctgacgataccgagttcactgaacgattttgcacagcaattcggtttgtactgtgagggcaaggtagatcgtttggcagtgccggaatatgtgggccagttatgaaacgcgatgaggacagtggcggcatgtggtgtttggtcatgtttgatttgccagtgaaaacgaaacggcaacgacatgctgcgactgtgttcagaaacatgttgctcgacatggggtacggaatggtgcagtattccgtgtatgtgagatatacgcctacacaagccggcaatagggcgacggtgaaaatgataaaagacaatttgcctgccgatggattggtgcgaatcctgcatatcagtgatcatcaatggtctactgcggctcgtttttcttcagggaagcgcgaatcgcgagaggagacaccggacttcttgactcttttttgatcgtgaaacagcgtaggaccgttggaaaatggcccttcttgataagctatcaagcttatcaagaagggtgaatgctaattcccagcatattcgcataataggaatcaccagccacaagcttatcaagaagggtgaatgctaattcccagcccgggttggcggggtcattggacaggttcaagcttatcaagaagggtgaatgctaattcccagcgatgccatgagcgcgataggccgggcgacaagcttatcaagaagggtgaatgctaattcccagnnnnnnngcttatcaagaagggtgaatgctaattcccagctgttcgcgggtatgcggccatccctcaccaagcttatcaagaagggtgaatgctaattcccagcctctccaacacgtccatgggattcataccaagcttatcaagaagggtgaatgctaattcgatggcggcgacgtgtatttcctttatgacgatccggtgatcggccccatcctgccgctgctgttcatcaccattcccgtgagggacgcggacgggacgctcggccgggaccggatcgcctgctatccggactatgagtatgaggagatcgatcctgtgggtatcggtcatgcggatgacgtggacgagggcgtgccgttctacaacgcgggcactgccgaggatgatttctgccatgtggcggatgtcagcgacccggacgggcatgatgctctgcaatacggcggcatgtactacgaggaaggaatgggttataccaactccgaggacaggcagtcgcgcatcgactgcttcagggctgcggagatcctgtatcggcatgcggcggggcgagggcatcccattggatggctgtgtctgggctatgtctactcttatgaccgttgcgaaggacggtactatcgctcgtatttcgacaattacggcgtagttccggcgaaaccggatacggatgtgctggcatacgaatgcttccgtcatgcggctgaagcgggtgtggccgaaggatgctacaagcttggcgacatgctgacggaaggcaggggatgcacggccgacgatgcgcaggcgctcaacatgtttctcaaagcgtatcggcacggacgcaaccagtcgccgcgcatctggggaagcgccgcgctccgactaggacacgcatatgcgaacgcgtgcggctgtgggttggactatgagcgtgcgcttcactggtatacggtcgcgcgcactggtctcgaactggaggtgcgcggcggcggagccgcatacgacggccgtttgtgggaggctgaagccgggatcatggacatgcgtcaggcgttgcgattggaaggggtatccgcacggagctgacgtgaccgctgcctggctgcgactgccccatgactaccatggaagcagggggtggtggtcatgatgatggatgaacaaggtcatgtcggcgatcatggcagcgatcgcggcagcgacgaggtcggcgatacgagtgccgctgtcaacggaacagtgcgcccggctgcggttgcgggggcgttttatccggcggatcgtgcatcgctcaggcatctgatcgatgcacagcttgactacggccgcgcactgctgcgtcggttggagccgacgcttccgaacgggtgcccgaaggcggtgatcgtgccgcatgcgggctatgtgtactcgggaacgacggcggcgctcgcctatgcactgctcgaacgcgggcacggcacagtgaaacgtgcggtgatcgtcggaccgacgcatcgcgtggccgtgcgaggcatcgcctgctcgacggcggccgcgttcgccacgccgctgggcgtggtgccggtggatgtggacggcgaacgcgcagcgctgggcatgtcgtcggacggcgagccgctgcgttccggcatgagcgcgcgctccgacgctcccgcaccggcgatgatcgtcaacgatcccacgcatgagcgcgaacacgcggtggaggtgcagataccgttcctgcagaccgtgatcggccacgacctgaccatcgtgccgctgaacgccggcgatgccacgccgcgcgaggtgggcgacgtgctgcgcgccttgtggggcggccccgagacggtgatcgtcatcagctccgacctgtcgcattatcatcccgaagcgtacgctcggcagctcgatgacgcgaccatcgaagccattgcgcacccgcagaagccgattcatccccggcgcgcctgcggggcgtatccgatcaacggattgctggatgtactggtcgcagggctggccgtagagctgcaatcgcgcgccgaccagcccggtcggccaatccagcccggccggccagtccagcccggtcgccgcgatgccggtgctgcggtcggcgttgaccgagtggctggtgctgaccgagcggccggcatcgtgcatgacgacggcaacgagcgtcgcgctgagcccggctgcgaaccgagcttcgatctgcggctgttgggacgcagcacgtccggtgacgacggcgcggtggcgctcgccggccagtcgcggcctgacatgcgcgatcccgacgagccggtggtggggtacgcctcgttcgccgtctggcagcatgccgccggcaccgacggcgacgctgccgacgtcggcgatcacccggcggtggcgcgcggcgccgatcgacggacgacgactcccgcgcaatccatcgaaaccgaagccagaccacaatccggtaccagagtcgaatcagaatccgaaaccgaacggcggggcgaggtcctgttgaacctcgcgcgcgcgtcgatacgcgaacatctcggcatcgacgagccgtcagacgacgcggtcgagacgatcatcgcacgacatccgtggctgcgcgagccgggagccagcttcgtgacgctgaccgagaacggacgtcttcgcggctgcatcggcacgcttgaggcgtacagatcgcttggcgatgacgtggccgatcacgcggtcgacgccgccagccgcgatccgcgcttcgacccgatcacagcggcggaatatccgctcatcgacgtggaggtgtcggtgttgggcaggcccgagccgatcgaggccgtgactccccaacagcggcccggggacgacggcatgaaggccggcgaaccggtgacgcgcccggtgcaatcccgcaacgagctggaacgcgcgctcagacccggcagggatggcctcatcctcgaagagcgtggcggacgccatcgccgtgcgacgttccttccgcaggtgtgggagcagctgcccatcccgcatgatttcgtctcgcatctgctcgccaaggctggactggctgcgaacctcgactggtcggacggcgaaatcgcgtgcgaacgctacgaggtgacggcctatgccgaacgctgacattgccgatcggaccgttgcagatcatcgtatcgccgatcatactgctgccgatcgcacgatcactggtcgcgcggccgatgatcgtacgatgaatgcccgtgcgctcggccgctggcagacgcgcttcgatgacggcaccggacgcgcgcgctgcgagctgtgcccgcgtcgctgcgtgctgcgccccggacagcgcggcttctgcttcgtgcgatcgaatcacaacggcaccatcgtctgcgacacgtatggccgcagctcgggattcgccgtcgatccggtggaaaagaagccgttgaaccatttccatcccggttcaagcgtgctgagcttcggcacggcgggctgcaattcgggatgccggttctgccagaactgggacatctcgcgcgcccgcgactatgaccggctcggcgtcgaggcgggtcctggcaggattgcgcgcgtcgcccatgatcgcggcatcgatgcggtggcgttcacctacaatgatccgatcgtgttcgccgagtacgcgatcgacacggcggccgcctgccgcgagcttggcattcacccgatcgccgtgaccgccggatacatgagcgcggcggcgcgtccggacttctacgcggcgatggatgcggcgaacatcgacctgaagggcttcaccgaggacttctactggaaaatcaccggcacgcatctggccgacgtgctcgacaccatcgactacgcggtcaacgaggcgcgcaccccggacggcgggcatgtgtgggtggaactcaccacgctgctcatccccgggctcaatgacgacgatgcccagctgcatgccgaatgcgcttggattcgcgatcatctgggctcggacgtgccattgcacttctccgcgttccatccggcctggaggatgcaggacgtgccgccgaccccgttcgcgacgttgaccaaagcgcgcgcgatcgcgatcgacgaagggctgcgctacgtgtacaccggcaacgtgcatgatcgcgacggcgacaccacatactgcccgaatccggattgccatgccgcgctggtggagcgcgactggtaccggatcgtcgccgaccgcctgtccgccgcgcatggcggcgacggtcattgccccgactgcggtaccgcgatcgccggccggtggtaattgggattcctcctcagcgcatctgactgatacgctgcccgaacgatcgcatggaaccgacgctcgcctcgtagcgtgccgccacaccgatcagcagcagaccggcgacgatcagccacgcccaccagaagtcacgcgagaacgcggcgatccacggccacaactgcgagaacgcgtgcacgacgagcacaaccgcccccatgacggtcggcgcctgccagcccaccgccacaccggccagcaatgccgccaacgccgcgacgaacaacagcgccacacgaatcgtggacggcgctatgagcggattccaggtctccaatagcggtgcgacgagcagaaacgccaaccccggccacaacgccgcccagctgcgcagatcgcggcgaagcatcatctgacggatgccggccgccagcgccgcggcaccgaacagcgcgcagaacacgtccggcggcatcgtcgcggtgtcgggccagcgcgtcgtgaacgacagtgtgacggtcgtcaccgcggcaatgagaccgaccgtccagcgaatcgtgttctgcggcggtctcggctgcggcttcgcgggcaccggcggatacgtggattgttgggagtatggatcgcgagtgacgaatgccgcggatgccggcgaaggcgcatacggatgcggcagcggctgcggctggtatgcggatgatgaactgcgtggcgcgatgcggcgcggaacatcgctcatccacgccagcacgacgaacgcgagcatcagcacgaaaccgacggtcgcggcgatgcggcgcgcgggatcggtcgcatcgtagacaccgatgacgaagaccatgagcagcagcgtggagacgatggcggtgatcgcgcgctgcgtgccgaatcgttcggattgtgtgccggagcgcgcggattgtgcatcgccgtgcagcgcacgcggcgcgcaggcaatgccgccgaggatcgccagtgcaccgatgatcagcacatccgcgacgatcataggcgtgtgcggcgggtccagagcgacggaaaacgcgaccggcagcgccccggcggcaaagagcgagtatgcgcgcagcggggcgtcggcggatgcggcagcacgacttgtgatcgcatgcaatgccagcgaaacggctgtgatcgccagcagaatcccgccggtgaccacgcccgtcagatcggctttgtcgaccgattccaagccgccgatgagcaccgcatcgaccgaccatgcgagcaatcccgcccacgtcaaaccttcggcggtggaccgcagccggccggtcagcgcaatcgcggcggccagtgcgagcgcgccgatgatgccgatcataaggattcggcccatctcgccgaatgcgtacgcaagggacgccaaggcgaccacgccgaacatcagcagcgtcacgccgacccacagcagcagcatctgagcgccggaacgccgcggggcgacgaatcgcgggccggtgggtggctgtgcgggtggctgcgtgggcggctgtgcgggttgctcaatgccgggttggttgggggttgactgggcgctatcggattggatgccggcatacgtatcctgtgaattgtgcgtatcgtgcgtatcgtgcgtgtgcggtggcgcctgatgcggcgatgcaatgccggtgtactcgtccatgattccccctcgacggttggcggccggtgataatggtcaattatggcagttgccgcggtcatgaagtgggcgtgggacggtcatgaagtgggcgtggagcggtcatggagcgtgcgtggggccgccgtgtgatagtcgtgacggcggcttcggcggtccggctgactgagtaggttggggcgtatgagttccaaagcacttcgcatgtctaccctgttcctgcgcacgttgcgcgaggaccccgccgacgcggacgtcgattccgcaaaactgctgcagcgcgccggatacatccgcaaggccgcgcccggcatctggacctggctgccgctcggcctgcgcgttctcaacaagatcgaggccatcatccgcgaggagatcaatggcatcggcgcccaggaggtgcacttcccggccctgctgccgcgcgagccgtatgaggccacccatcgttgggaggagtacggcgacaacatcttccgcctcaaggaccgtcatcaggccgactacctgctggcgcccacccatgaggagatgttcacgctgctcgtcaaggacatgtattcctcgtacaaggatctgccggtcacgctgtaccagatccagaccaagtaccgtgacgagttccgcccgcgcgccggccttattcgcggccgcgagttcatcatgaaggacgcctactcgttcaccatcgacgaggagggcatgaagaaggcgtactacgacgagcgcggcgcctatgagcgcatcttccagcggctcgatctcaggtacgtgcccgtgttcgccatgtccggcccgatgggcggctccgcgtccgaggagttcctggccccgatggccatcggcgaggacacgttcgcgctggccccctccggcaaggcgtggaacgtcgaggcgctgcacacgcccgagctgcccgagatcgacgcgtccggcacgccggcgatggatacccgcgacacgccggatgccaagaccatcgaggcgctggtcgatgccgccgaccgcctgtatccgcgtgaggacggccgcgcatggacggctgcggacacgctcaagaccgtggccatcacggtgatgcacgccgaggacgacgatcatgacgaaccgtggcgagaagtcgtcgccgtggccgtgcccggcgatcgtcaggtggacatgaagcgtctggaggcacagttcgcgccttccgagatcgaggagtccactgaggatgatctcaaggctcacccggagatggtggccggatatatgggtccgatggcgttcggcaagcagggagaggccgctggcatcgccgagccggttcgtttctttgttgatgcgcatgtcgtcaagggctccgagtggatcatcggcggcgatgagaccggcaagcatcgtttccatgcggtctacggccgtgacttcgaggctgatggtgtggtcgaggcggttgaggtgcgtcacggcgacatgagccccgacggctccggtccgttgagcttcgaacgcggcgtggagatcggccaggtgttccagcttggcctcaagtactccaatgcgctgggactcaaggttcttgaccagaacggcaaggcggtgccggtgtggatgggctgctacggcatcggcgtgtcccgcgtgctcgcatgcatcgcggagacgcatcacgacgatcgcggtctggcatggccgtcggtgatcgcgccggcgcaggtgcatgtggtggcgaccggcaaggatgcggctgcgttcgaggccgccgaacggcttgtctccgatctggaggcgcgaggcgttgaagtcatctacgacgaccgcaagaaggtgtcgccgggcgtcaagttcaaggacgccgagctgatcggcgtgccgctgatcgccgtcgccggtcgcgataccgtgaacaacggcacgatcgaagtgcgtgatcgtgacggcggcaactcggttgccgtgccggtcgccgacgcggtcgatgagatcatgaagcgcctgtaacaggtttcgcggccagtggcgttactgtctgtagctccgctggctgcttttgccgcctttggctgcggcagattgcggcagattgcggccgcgcgacatcccatgagggttcgtcgcgcggcctttttgcgtattgcacagctattgcatagactatgcgggcctatgcttcccttgtgctgtccgctgacgcagtccgctgcgcagtgacgcagtggttttcgcgtttttcgcaagatcgctgggtttttcgcagtcgagttttccacaacacgccgaagggtgggctctgcgtccacaatgcccttttgggctttcgctatcgcagttgatgatgcacagtggactgaccgcatgaaccacggttccggccgatggcagacgagtgcattcaaagcatcgccgagaacgccagtcagacgagatccctgagccgtggttcggtcgggccacacgtgccaaagcattagcaaggagatcatcatggcaattcaggacagcaccatcaccatcaccggcagagcaggcagcgagccaagggaattcggtcccaaggagcgatccatgtgctcattcaggctgg

SEQ ID NO: 576 - DNA, 18109 bp, synthetic construct
  misc_feature 1..18109: note = Synthetic
  source 1..18109: mol_type = other DNA
acgccatccgtcaggtctccgaggccatcggttccaacggttccacctccatgggctccgtctgcgcctccaccatgtccctgctggacgccggcgttcctctgaaggcccccgtggccggcatcgccatgggcctggtctccggcgaagtcgacggccagatggtctacaagaccctgaccgatattctgggcgctgaagacgctttcggcgacatggacttcaaggtggccggcacttccgagttcatcaccgccttgcagctggacaccaagctggacggcatccccgccgatatcctggccggcgccttgcagcaggcttatgaggcccgcgccaccatcctggaagtgatcgacgagtgcatcgacggcgtcaacgagatgagcccttacgctcctcgcatcatcaccaccaaggtttccgtggacaagatcggcgaagtcatcggccccaagggcaagatgatcaacgagatccaggagaaaaccggagccgaggtcagcatcgaggatgacggaaccgtctacatcgcttccgaagggggagaggccgccgaggccgcccgccagatcatcgaccagatcgcccatcctcacatccccgaggctggcgagaagtatcagggcaaggtcgtgaagaccaccagtttcggcgctttcgtcaacctgacccctggcaccgatggtctgctgcacatttcccagatccgcaacctggccaacggcgatcgcattgacgccgtggaggacgtgctgcgcgaaggcgacaccgttgaggtggtcgtgcagggcgtggacgacaagggcaagatctccttggctatccccggcttcgagaatgaagagggcaatggcggctcccgcggtggtgaccgtggcgggcgtggttcccatgaccgtggtcctcgcggcggtcgggatgaccgctcttctcggggtgaccggggtgaccggggccgttccatccgctatgatcgtgaggatcggggagatcgtgacgatcgccgttcccgctccgaccgtttcgacgaggacgaccgcgatttcgacgaccgtccttcccgctccgatcgccgtcctcgctcttcccgtgccgaccgttacgatgatgaccgtcgttccgacgatcgtcgtaaccctcgctacgaagaggatgaccgttccgacaggtccgatcgcgatgaccgcgacaatcgtggttaccgttccgaccggggtcgtgggtcccgcagccgtcgttccgactggtccgatcgctctgaccgtggccgctccggccgtggtcgcgctcctcacttcgaggaggatgagaactacgacgagtactgtgccgctcgtgaagagcgcacctcccgtcctcgtcgccgcgtccgtcgtgatttcgacttcgacgactaggcctgccaagccgctcggcttgacgctcgttgctaggcagcggcaagacttagacggcaaagcttagatggcaaaataaggcatcagcaacaaaatacagtgataaggctgaatacagcgataaagctgaagtaatgaggccgattcagaataaaggctggctccggaatcccggggccagcctttctgattactgtgctgagattacttcattgattgtttcaccgattacttcaaaaatccccgccaagctcagccgaagctgaaacctgacggggatccttttgaattcgaaattatcggaaccggaggctgcgactactcgcccaaggccttgtcgaccacggccgtcgcctcatccaacactttgtccaaggtctcctcggaatcgaaggactccgcatagaccttgtagatgttctcagtgccggaaggccgggcggcgaaccaattgttcttggtggtcactttgatgccgccgatgcgggcgccgttcccgggggcggtggtcatcttctgctcgatgggttcgccgccaagggtggtgtcggtcatggactcgggggtcaaggaggcgaacttctgtttctgctctagggtagtgggcgtatcgatgcgcttgtaccagctctggccgaagcgggccacctgctcttcatgcagctggccggggttcttgccggtcttggcggtgatctcggcggccaggaggtcggggatgatcccgtccttgtcggtggtccagacgcggccgttgaaacgcaggaagctcatgccggagctctcctcgccgccgaagccgacctcgccgttgaagagcgggtccacgaaccacttgaagccgacggggacttccaccagcttggcgttgatggaggctgccacgcggtcgatcagggaggaggagaccagggtcttgcccacgccggccccggcgggccaatcaggacggttgcctccgaaaaggtattccacgcagacggcgatgtaatggttggggttcatgaccccgctgcccgggcagacgatcccgtgccggtcggcgtcggggtcggtcccgcccaccaggtcatactggtcccaggcgccggcgttcagccggtcgaccaggcccttcatggcgtagggggaggaggggtccatgcggatcttgccgtcgtgatcgatggtcatgaaggaccagcgggggtccacttcggggttgaccaggccgatgttgaggccgtacttctcgttgatcagctcccagtaatgcacggaagccccgcccaaggggtcgatgcccaggcggacgccggagttcttgatcaggtcgaggtcgatgatgttcttcagatcgtccacgtaatgctcgcggtagtcgaaacgctcgatgaggtcggacttgatggcctgctcgtaaggcacgcgggccacgttcttccagttcggcaggagctcgttggcgcgggcggcgatggcgttggtcgtctctgcaggggccgggccgccggtcggcgggtcgtacttgaaaccgccgtcggtgggcggattatgcgaaggggtgaccacgatgccgtcggccaagtcgtccccggtgaagcgctgggtgccgtcagcggcccggttgtgtgtcaggatcgcatgggagacggtgggggtgggggtgaagttgtcgcgggagtcgatgcgcacgcgcacgccgttggcgaccaggacttcgatggcggtcttccaagcgggcaggctcaaggcatgggtgtcgcggcccaagtagagggggccggtgatgccggcggccttgcggttttcggcgatggcctgggagatcaccacgatatgggcttcattgaaggaggtcttcaggctggagccgcggtgtccggaagtgccgaaaatcacacgctcttctggcacgttcacgtcggggacaaggtcgtagtactttcctagaacctcatccacattgattagattttctggggtggcgggcatgcccgcattttttgcaaccataccctccattgtgccacgccaagcagacgctgatggtagcggtcaccggcgacgccagtcgcgttttcggtttcgaagacagtctaaaggctcacctgtccgagggtggaggcttctttgctggtcagaggaccgttatcgcgggaattagtggtccgagggtcgttggttctcgggttggctgatcgggaagtcgccccggtggtctttccctctctctgggtctcagggtctcccgggttcccggtaccctcctgagacccggactggccggctacattgatttgcggggcgcggacggtcagggcctggcggtccacggtgaagcggatatgctgggtcttctccagaaggtccccatccacttcggccaaggcgggcttctccagcatgatttcggcgctgcgggcctggtactgcttgaccgtggaatgcttggtgatcgggctttgctcagccttgcgggtcaccgtctgatggatcacgtcgatggccaggttgaaccagccgagcagcccgtgggtcgtgtccagggtctcgaaatcgagcagcccgtcgtcgaaggcggcgtcgggcatgagggtgaagccggggatgcgcccgcaattgccggccatcagggtgcggaaggtctcgcctttggtttcgtggatggacccatcggccttccgcaggatgatcgacccgtggatgcgggactcgaacaggtggctgatcgccccccagaagtaggccatccagctgatggcttttttcaggtcgggattggtgtcgtcgatcatctgggcgtcgaaccccaccccggcgatgatcaggaagccatgtttgtgctcagggtcgtcggaatccaaaagggccatacgtcccatgtccacccggcgcgagccgtgggaggtggcgatggtcatggcggcctccaggttgtcgaccggaatgcccatgttgcgggcgaagaggttgccggtgccgatggggacgatcccgaaggcgtgcgaagtcccggatatggccgatgccaccgtgcgcacggttccgtcgccgccgcaggccaccaccacgtccgccccgtgggccagggcttcttcggcgcaggcccggccatctttatccagctgggtgtcgatgaacatgatgtcgctgatgtgatggtcaaggcagaatttcttgatgaaggcgcgggtctcttcggcttggggtttggaagggttgatgatgaaggcgtaattcaccttatctccgtagcgctgctcggcttgcaccacttgatgccgccggcgcaggccgacgatcaggcccaccagcagggcgagcgatatcagtgccgccactaccagcagggcgatgatccatccacgactcataagtaatatttaagtaatattattatggatttttttgttttttcctgagaaacgctaaaatatttcacgatttcgcacaaagagccgctgtggaggcggaagtcccttccttttctccagcgttccccgatgttctccggggccgtctcccgtctgtgtttccagctattgtgtaaccatgcttgatattcaattcatccgtgaaaaccccgaagtcgtgaaggaatcccagcgcaagcggagcgagtccgtggacctggtggaccaggtcctccaggccgaccgtctgcgtcgtgacgccttggccgatttcgaatccacccgggccgaacagaagaagatgggcaaggccgtggccgcagcttcggctgaggagcgccccgccatcatcgcccagaccaaggaattggccgccaaggtctccgaatacaaggagaccgctgataaggcgaccgaggattacaccaccgccatgtggaagctgtccaacatcgtggagccggaggctcccgaaggcggcgaagatgattacgtggtcgtcaagaaggtcggccagatccgagatttcgcagccgaagggtttgagcccaagaaccatctggaactgggcgaaggcgtcgccggcatcgacatgaagcgtggcgtcaaggtctctggttcccgtttctacttcctgcggggggccatcgcccgcttggagctggccatgctgaccatgggcgtggaccaggccgagcggaacggcttcatcatggcgaccaccccgaccctggtccgccctgaaatcatggccggaaccggtttcctcaactcccatgcggaggagatctaccgtctgcgcgaaccggatgagcagtacctggtcggcacctccgaggtggccttggccggcatgcacaaggatgagattctggacctgtcccacggcccgctcaagtacgccggctggtcttcctgctatcgccgcgaggctggcgctgctggcaaggacaccatgggtatcatccgcgtccaccagttcaacaaggtggagatgttcgtctactgcaagcaggaggaatcctacgagcagcaccagaagctgctggccatggagcaggagatgctgggcaaggtcgaagtgccttaccgcatcatcgacaccgcggccggcgatctgggttcttccgccgcccgcaagttcgattgcgaggcttgggtccccacccaggagcgctaccgtgagctgacttccacctccaactgcactgagtatcaggcccggcgtctgaacatccgcgagcgtaccgaggacggctccactcgtcccgtttccacgctgaatggcaccctggccaccacgcgctggctggtcgccatcctggagaaccatcagcagaaggacgggtccgtggtcattcccgccgccttgcatccttatatgggcggcagggaagtgatcgagcctgccgggtgggaggcttagggcctgagcgcgcatactggtctatctatatgcatccatacatgccatgaatggtgcacacaggcctgtatacaggcgtatgtataccggcctgtatcagattgtgcgtgtcgaccggccttcaatggctttctttcagctataattgaaacctgtgcatagggaatggacgtatgagcctcctcatgcacactggacaggtgtccgagcggtcgaaggaaacggtcttgaaaaccgtcgagcgaaagctccgcgggttcgaatcccgccctgtccgccacagcttgctcgaagaagagagaaagagccctcagctcagccaggaaaccgacgccaaatcgccccctgacctggggcttcctgggggcttccttatccgccattgttttatcgccgagtcagtgccgattcatcgcttgtcgtttgccggccatcgccgttcggttaccacctgtcgtatccatcgtgcccccgggttttatcatatccagagtcgcggtgtcggctataacattcatatcccaacatatctcaatcatattccaagcatcttcgaggggaggcaaccatggcttcggtttcggacgggcgcccggcttccacgaaaaaccaggagccgctcgcgaaaaaggtcacgctgttcgagctcttttacgaccttgttttcgtctacatgatttcgcgggcgaccggtttgatccatcgcttgcatgagggcgtcatcagcccgctggccctggccaccttcactgtcgtcgtcatcgtcttcatcaattcctggatagttcaaaccgctttcaccaatcgatacggcaaagcatcgtggatccaaagcatcgtggatcgacgccctgtcctacttcgtcgatgccggcctgctgctttacctgtcgaacagcttcactgatgtggccgattaccggcctttcctcctggtcgccggcctgctgtccctgaccctcttcatccaatacggcataacccatatcctctccaaaaacggcatgacaaacagataaccctggccttctccggaatcctgcttttccgcagcctgactctcctggccggtggaatcctcaataacgcagccggcctgaccatcgccctgaccggcatcctcctgagctggatagcgcccggcttgaccggcaaatataccagccagtgtccgatcatcttcagccacctgctggaacgactgaccctgctgaccatcatcaccttcggggagaccatcgtggggatcgccgcttatttcctgccttcgaaattctccccgctgtccgtgctcgtcttcgccgtggtcgccctgctcttcgtctcctatgtgatcgagttcgaccagctgatcgatgaagacaggacgggggaaaccggcaacgccttgatctacctccattatcctatcctgttcggaatcagcctggtgaccgtttccctcaatttcatcagcgaaagcgaggcgaatctcctcgcggccgtctcctatcttttctgcgggatagggttgttttacctggggatttggctggctcgcagatataaccaagcccggcgtcctctgcctgccggcaaaggctggctgatggccgcttctgtggtggtctgctttggcttgagtctgatcggcaggaacgcgctcgccatagccgcgtttgccgccgtttgcacggggatcaatggcgtgattctggggacttgcaagcgaacgaaaagtgatgtatcataaaagtcggataattccaagtaagaatggtgctcgcattgcgaggttgccattttgaattctccgcattagcttttagcttttgcagggtgaggtttcggcctcacccctttttttattccttttttgttatgaattcataattcttattttatctctttccgccaagtaaacgtcaaggcattatgaatattttatgcgttactccccacgctcgtgttttaagagtaatcatgcaaactatggtaagcaagaaaactcaatatgtcgtcggtgtggacgttggcctcaattcaacaggtctcgcggcgattgaagtcgatgatgatggtgctcccatcaggattttgaacgccatgagcgtcatccatgatgggggtgtagatcccgcggcgaaagaagccgatagcagacttgcgacggctggagtcgctcgacgaacgagaaggatgcgcaggcgcagggctcagcgtcttgctcggcttgaaaccgttttgaagaattacgggtataccgaagtcgagcctgttctggaagaaccttttggcccttggatttgccgagcggagcttgcggatggattcatcgctgacgatgaagagcacagggagatgataggagccgctgtccggcatatcgcccgccatcggggatggaggaatccttaccagaaggttcaggccttgctcaatgttggagaggacggcctttctgaagaatatgctaatttgaagaaccgcatattcgatgaggtctattctcatgaggcggattatgagaatatcgatcaagttcctgattacacgcctgcccaattgattcgtgactatctggatagtaaccttggccgtcctgctgcaaggattcgtacgggtaaggcgggccctcgtaagaagcgatatgatgctgaaggcatccttcctcaacggatgagacaagctgattacgcctacgagttgaatcggattttctccatgcaaaaagtggatgaagacgaagccagggcaatcatcaaagccgtattcgaagctaaatctccaagaggttcagcggaaaaacgcgttggcaaggaccctcttaccggtaagatgcgtgctctgaaagcatctttggcttttcagcgctacaggattcttgctaccattacaaatctaatgattcaggataaggagaaggggaagcggcgtctttccatcaccgaaaagaatgatgtttataattatctcatctccattcagagcgatgaagaatctccgacttggcaggatatcgccaatgatgttctgcatatcgaacggtatcagttagtcggggttggcaagacttttgatgggggagagcgcgtatctaacgttccaccagtcttgcagagcgtcgtcgccattcacgagctttctgacaagaagctgcgagagaagcttgatgcctggtgggacgctgctgatgatggttctcatgaatgcatgattgagctattgagcaatgcggtagacattgaccgcattgatgaaaacgatgaacgttatgcttcagccttggatttcatcgatggacttgatgatgaagaactgacaaaactggatggcatcaatctcccttcgggcagggccgcatactcagctgaagctttgacgaagttgaccagtgccatgctgaatacagatgacaaccttttcgaagcgcgccaacggatttatcatgtgggaaatgactggcggccaccgcaaccgcagattggcgaaccgttagggaacccggctgttgacagggtgttgaaaatcgttaatcgatacctcatgagttgtttgaagcgctgggggcagcccagcagggtcaccatcgaacatgtccgtagcggcttcacttcggtgaaacaagcacgggagtatcagaaagagaccgatcggcgcgcaaaatatcgcggtgagattattcaagaacttaagcactgtggactgggcgacgttcgcaaatatgatattcgcaggtgggaagcggtacagaggcaagagtgccaatgtctttattgtggtcgcgaaatcactttcaagacgtgcgaaatggaccatatcgttcctcgcaaaggccctggatcgacgaatactcgaacaaattttgccgcggtctgtcccgaatgcaataggttgaagtcgaacatgccattcgcgacctgggcgaagaccggagccgcccaagcgcgaggcgtctcgcttgatgaagcgatcaagagggtgaaattcttcagtttcactcaagaccgtttgcctggcaaggctcagcataatttcagaaacgcagtgatttcgcggctgaaacaaaccgtcgccgatgagccgcttgacaatcgttccatcgaatctgtgtcgtggatggctgatgaactgcatcgacgcatcgactggtattttaaccatgaccgatacgaaaagaaagctgaggaggccccagctgatggcctaccggagaccagagtcgctgtttatccgggttctgtgacggcttccgctcgtcatgccgctgggcttggtggcaatatccacttcatcggagctaggtataaaacccgtcttgatcgcaggcatcatgctgtggacgcttgcatgatagcaatcatgcggccaggcattgccaagctcttggcagagcgtgagcaactgaggcaatcccaacggctcatggaacagattgaaccggatgagatgaactggaaggattatccgaatgagaacactcccggtttcgagaactttgccatctggcgggagcaggctcatgccttgcttgatgagatgaacgatgccctcaataatgattggattccagtcactcgctggcaacggttgcaattgggtaacggctccgcgcacaaagatacgattcatcctttgaagaaggttgaactttgtggcgagatatcagcctcggatatacttcatgccgcttcgcctgctttgtatgaggccctgattaccttgccggattacgatccggcttcaggacttcctgaaaaccctgatcgggaaatcaatgtcaatggcaaaattgattcaggttcagatttgattccgatttttgagtctaatgctgctcaaatcgctattcaaaatggatctgctgagcttggcgaagccttccatcatgcacggatttatcgttgctggaccgttcagaaaaatggcaaaaagaagattttctatggcatggttcgtgtttatcagcatgacttgttgaaggcgaagcatgaagatctctttacttatcccttaaagagatccactgtttccatgcgctatgccgagccgaaagtcgttgatgccatctatgccggaaacgctgaatatcttggatcgatttgtgtgggcgacgagctcgttgtaaaccttgctggtactgagcagaccggacaagtaggcgatttctgcaaagctttcgcagaagacgcttcagtcaacccggccgtcgtgaatcgatggacggttgatgggttcccagatcctgcaaagctgcggctccgtccttcaatgcttgcaggggaaggcttgaagaatacacctgatttaagtgaggattattctgattctctagggaaaatattgaatgataatgggtggcgtcctgcagtgaatgttttagccaagttgggagtcaaagtcattcgtcgtaatgcattgggcgaaccgcggtggaagtcgcgtgcgcatcttccaatctccttcagatggtcggatggtatatcgaaataaatgaggtgaattatgcaaagcgcctggcgggttatcgactgtacgaatcttgatggacagttgaaatatgcccgtgggcgcttggtcgtccgcaagtttgattcgggtgaagagaatcaagtcacggatcttcccctagccgatatcgcgatacttctcattggcctccgctgtaattgttcggctggcttactgcatcaatgcgctgaaaatggagtctgcgtgatggtttgcgattggcgaggggtgccaatcgcagctatgcattcctgggctacgacgcatacccggatcacctcccggcaaagggcacaggttgccatgacaattcctcggcagaaaaacgcctggggaaggattgtcaagaataagatattcggtcaagccgcctgcttggatcttcttggaatcgaaggtggcaactctcttcgtgggcttggagaatcagttaggtctggggatttgggaaatgtggaaggtcgtgccgccagagagtattggaaacgaatgtttcctggggaaaacggttttaagcggctccctggctccggggaaggtaggaacgctcagctcgactacggctatatggttttaagaggatttgctacgaaagcggtcatttctgcgggtctgaacccatctttaggggtgaaccatcatagcggagcaaattacttttgtctggtcgatgacttgattgaggtcttccgccctacggtagatgtaaaagttgcccgattaagtccagcgcagcaagtcgcggatcgggatgtgaaacattatttggtggaatccgtcaatcgtcagtttaacggctcagggttcactattcctagcgttcttaatgacttcgcccaacagtatggaatgtatgcggaaggcaaaatcgataaattacaagttcctcaattcgaggaggaataattgaaaaaggatgaagatagcggcggtatgtggtgccttgtcatgtttgatttaccggtgaagacgaagaaacaacggcatgatgctacggagtttcgtaacgttctgttggatttagggtactcgatggttcagttctccgtatacgcacgatacacgccaacgcagtcgggcaacaggacaacgattcgagtgattaagaagaacctaccccctcagggcaaggtgagaattctgcatattagcgatcaccaatgggcgagtgccgataaaatcgtgaatctaaagcctgacaagaaagaggagactccagatttgtatgtgcttttttgaacgtaaaaagcgctaaaaagcttgaaattttcccctcttgaaggattgctccattttatcaagaggggaagaggataattccaagccggccggcggcgtgggctccggcgcggaccattttatcaagaggggaagaggataattccaagcacaggatgatgtggttgtgcaggtggccccattttatcaagaggggaagaggataattccaagccgttgaggctgcggatgaaatcgagggtccattttatcaagaggggaagaggataattccaagctcttccgctgattattcggcaggccgtcccattttatcaagaggggaagaggataattccaagctgaatccaccttttgaaaacaagtacggccattttatcaagaggggaagaggataattccaagccccgtcgtaggcggtttccgcttcgataccattttatcaagaggggaagaggataattccaagcgtttcgggcaggatgcgccgaggccgtcccattttatcaagaggggaagaggataattccaagcttccgaattgtgagtagcgtggtcttctccattttatcaagaggggaagaggataattccaagcaagcctgcattggtcgtccaggcttccacgcctctgagtaggctcaggaccatcacagtggaggacggctatggaacaaggcgtcgaacaggtcgatcgcaaggaccgcatagatcaggtcggtcaaagggttgagacggaacccgggaaaagcgggagggggattttcgctctctctttcggggctttcgcttatggggcagcggaattcgtcatgatgggagtgctcacccaagcggcggcgagcacgcacgtcagcatccccacggccggtcattacatctccgcctatgcgttcggggtctgtctgggggccctcatcctggtcttcggccggcgggccaaaccgaagaacctgctcatctccttcatgatcatcgccctggttggcgacctcatagccgcctcggccccgaatttcgccctcctgctcgccggccgattcatctccggcctgccgcatggggccttcttcggaacggcgaccatcgtggcccagcggctggcggcccccggcaaagaggcgaggtcggtttccctcatggtcacggggcagaccgtggccaacatggtcggggtgcccctgggcactttgctgggggagaaggtctcctggaggctggccttcgcgattctggccttgtgggcggcggcgaccgcggtcctcatgctggcctggattccgcagttgaagccgattcccgacgcggggctgaaaggccagttccgtttcctcaagtcccctagggcctggttggtcctgggggctgtgcttttcgggaataccggcattttctgctggtggagttacgtttccccctggctgacccatgtgggcacgtactcctcggccgcggtgccggctttgatggccctggcggggttcggcatggtcctgggcgggttgaccgccgggagggtgtccgaccactgggtcccgggagggacagccgccttggggcagcttctggcgactgcgactttgctggtcatctttttcgacaaggggtcccggccgaccagcgccctcttgactttcatcctggctttcggcatgtttttcgtctccgccccgcaacagtatctgatggtcaaagtctcggaaggcggtggcgagatgctgggggccgccttgacgcagatcgctttcaacctgggcaattccttggggtcgatcatcggcggctgggcgctgatggccgccttcatggactatcattccatagccttggccggagccccgatagacctggtcgccgtcatcctcctcggggttttcagcgccaggtatgaaaaacataaacggctgcctcccattcgcggggtcgaagaggtctgatcatggatttttacctccggcgtcagctgcgcctgatggggacgagaatcgccttgtgccttcccgcggggcggacaggcgattcatccgccgaggatcttttggatcggaccgaagatcttttgcgctcgtatgagcggattttcagcgctaatgatgattcctccggcctcatgaagatcaatcgggcggcaggcaagcatccggtcccggtcgattcgccccagctgtatgatctgatccgtctcggccgtttccatagcctcctgcccggcggaaacctcaatatcgccatagggcctgtggtcaaactgtggcatatcggtttcgccgacgcccgcatccccgaagacggggccatccgcgaacgattggctttgaccgacccctccctgatcatctgcgatgatgataagcggacggtttttctggaaagggaggggatggagatcgacctcggctgtttggccaaaggatacatcggcgatcttgtggcggactccctcctttcgctcggcctgcgttcggccttgctggacctgggcgggaatatcatcacgatcggggagaagatgacggattcggggtcgcggccttggcgggtcggtctgcaggacccgggtcgagcggaaggggtctatgagcgggtcatcgatcttccaggggattctgggaaagcgaggaatcctagggaagcgggagacccagagaaggtgaggaacatagagaccccagggaaggcgtgggattctctacaggagccggaggaggatgccagcggtgggcctgtcctcaactcggtcgtcacttcgggggtctacgagcggaagctggtcgtcggaggcaaaagctatcaccatatcatcgatccggaaaccggccgcccccttgaaacggatatggagtccatcaccatccggtcccgcaggtccgtcgacggggagatctggacgagcatgctcttcgggaaatcggaccgtaccatcgcggatgttacgcgtaccatcaaccaggctggaggcgacgtgacctgtctggtcatgagaaggcctcacggtaaattgggacctgtagtaacaaggaggttcacgtgaaattcgtcgccatcgccgggaccaataagaccggctcgaccaatcgcaaactgatcgattacatcaccgaccggtatcggcggtcggaagcgggcgaagacgggccggaggtaagcttcgagaccctggacatcgccggcctgccgatcttctccaaagtggccgaagaagaagtcccgccacaggtcaaggacctggccgcggccatcgaatccagcgatggcgtggtcttcgccaccccggaatacgaccatgcggtgcccgccgtcctcatgaacgccctggcctggctttcctacggaatccaccctttctacaataagccggtcatgatcgtcggggcttcgtatgggaacctgggcacttcccgcgcccaactgcacctgcgccgcatcctggatgccccggaactgcacgccttcgtcctgcccagctcggaattcctagtcgaccattccttgcaggccttcgacgatgatgggaacctgatcgattccggacaagtggccaagctggattccctcttccgctccttcctggagttcgcccaagccagtaaggccgtgaccccccgcgcttacgaaaaggaggagatgaagcgctatgtgtatgtctccgaccctgattccccggtctatgggcgctgaggcaggggccatggcaagacccatggctggcggcgaggggtagcgccttaacgcctcctaagccggatccggatttgaggaagcttgattcgacgatcgaatcgacggccgggctggcaggccaataagccgataagtcggcgcatgggtcaataaccgaaattaaaaacgaatcaatgaacaaaccgacaacaaaacgcaaaggagcgatcatgaccttgaaattcgtggccatcagcggatccatcgacaagaaatcctataacaccaaactgctcatgttcatggccaaccatttccgccaagaggccgacatcgagatcctcgacatcagccaggtgccgattttcaacgaatccgaagacctgagcgagagcgatctcctgcaatacctgaacgcgaaaatcgccggctcagacggcatgatcctggccacacccgagcatgaccacaccacgaccccggccatgaagagcatcctcgaatggatgtcctacaagctgcacccgtttgtgggcaagcccgtcctcctggtcggcgcctcatggacgaaccaagggtcctcccgcgcccaactcgacctcaagcaggtactggaatccccgggcgtcaacgccgtcgtcatgcccggggacgagttcctcctaggcaactccatcgagaacctgcccgacgaaggcggtctgcgcgatccgaagaccgtggaattcctgaccaccgtcttcacgaaattcgtctcctgggtcaaagtcatgcaggccatgaaaggggagggaagcggagccggagccggaactggtgtaggtgccagtccagcgactgccgattccttcgagtccgaagacctggccgccagccaaccgattgataccaccatcgaaggtgtggatatgaaggccgacgactgggtggagcaagccgcggaaaagacccaagccgcccacggatcggactacgtgatgctggatcggggtgtcctgagcgtcgaccagctcaactggttcctcaacaccatgccaatggaactcacctacgccgacgacaacaaccagttcctctactacaacaatgctcaccaagatccagatactatgtttgctaaacgtgtgccacctcaatcaggtagccgcatgtcaaccgttcatggttctcttccaccagctcggatgaaaaatgtagagtgggttatcggaacacttcgcaacggaaaccaagaatacgtacgtacaatcgtcccaggttcacctgcaggcgttatcaatacccacaactaccaagctatgtactatcctgacggatcatacgcaggtatcaatgaaatcgtctttaatttccaaccatggctcgactggtacttaaaagaaactggtcaacgtttggttggaggcagcggaccattcgctcctgccactggaggccatggagacgcagatgctacttctggtgcttctgatgctggaggcgatggtggtcacggaggc

SEQ ID NO: 577 - DNA, 16043 bp, synthetic construct
  source 1..16043: mol_type = other DNA
  misc_feature 1..16043: note = Synthetic
tcgcagctgtatgccgtccatcatggcgaaaccggcctgcagcacgcgttcggcatccacgcctccaggcacatgccagcggatgttgagcgccatatcgacggtgtcgcgttctcgcgcctcgaaatagtcgtgggccgggtgcgccgggtcgagcgcttcggcgctcagggtcgaaaacatgtgcaccagttgcgggcgttcggcgttgatcgccacggtcctgcgccacaattcggcgatcaacggacgttcctcgcgcaccatggatgaggtgagatccaaggtttcgcggtcgtacatttcgccgagcaccagatcaagcagtccttctttggaaccgacgtggtggagcaccccggccttggtgagccccacctcgttggcgatgcgctgcagagaggtgccgtaatagcccagtgtgccgaaggagacgacggccgcgttgagaatcgcggcgcggcggtcggtgtcggcggtgccctcaaatgccatagttctcccttcgccgtctttcattgacgggcatcctcgtggtccatgattggtcttggaggaaagatgggataaccatacggttggtaggctgtaatttcaacacttatcggcgtgttgcgcgctgttgattgataaagtacctaccaaccggttggtaataaacagtcgccgatgaccgaccgctagccggaaacaacgaagtgcgaaacagaaacgaggaatccatgagcgagaacaccatcccgtccgtcaacgacctcaccctggaggagaaggcctccctcacctcgggtggcgacgcctggcatctacagggagtcgaagacaagggcatcccgggctatatgatcaccgacggcccccacggcctgcgcaagtcgctcgcctccgaaaccggcgccaccgacctgaacgattcggtgcccgccacctgcttccctcccgccgccggactcgccagctcgtggaaccccgaactcatccaccaggtcggcgaagccatggccgaggagtgcatccaggagaaggtggccgtgatcctcggccccggcgtcaacatcaagcgcaacccgctcggcggccgctgcttcgaatactggtcggaggatccgtacctggccggacacaccgccgtcggcatcgtctccggcgtgcagtccaagggcgtgggcacctcgctcaagcatttcgccgtcaacaaccaggagaccgaccgtctgcgcatctccgccaacgtctcccagcgcgccctgcgcgaaatctacttcccggccttcgaacacatcgtcaaaaccgcccagccatggaccatcatgtgcgcctacaaccagatcaacggcgtgcatgcctcacagaaccattggctgctcaccgaagtgttgcgcgacgaatggggcttcgaaggcatcgtgatgagcgactggggtgccgtgcacgatcgtgccgccgctctcaatgctgggctcaaccttgaaatgccgccgagcttcaccgacgacacgatcgtctacgccgctcgcgaaggccgcatcgcccccgaacagctcgaccagatggcccaaggcatggtcgatctggcgaacaagtcccgcgccgccatgagcatcgacggctaccgcttcgatgtggacgcccaccacgaggtcgcccgccaggccgccatcgaatccatggtgctgctcaagaacgatgatgccatcctgccactgaacccggccgcgaacatcgccgtgatcggcgaattcgcccgcaccccgcgttaccagggcggcggctcctcgcatatcacccccaccaagatgaccagcttcctcgacaccctcgccgagcgtggcgtcgccgcgagcttcgcccccggcttcacgctcgacctgaacgagcaggaccccgcactggcaagcgaagccgtcgaaaccgccaagggcgccgacgcggtgctgatgttcctgggcctgcccgaagccgccgaatccgaaggcttcgaccgcgaaaccctcgacatccccgccaagcaggtcgcgctgctcgaagccgtcgtcgcggagaacccgaacgtggtcgtcgtgctctccaacggctccgtcgtcaccgtgcatccctgggccaacaacgccaagggcatcctcgaatcctggctgctcggccaggccggcggcggcgcgctcgccgacgtgatcttcggcgaggtgagcccctccggcaagctcgcgcagagcgtgccgatggacatcaacgacgacccgagcatgctcaactggccgggcgaggagggccacgtcgactacggcgagggtgtgttcgtcggctaccgctactacgacacctatggcaaggccgtcgactacccgttcggcttcggtctgagctacgcgagcttcgagctgtccgacgtggccgtgtccaaaaccggtgccaataccgcgtcggtgagcgtgaaggtgaccaacacctccgatgtggacgcggccgaaaccgtgcaggtctacgtggcgccgggcaaggccgaggttgcccgccccaagcacgagctcaagggcttcaagaaggtgttcctcaaggccggcgagtcggcgagcgtgaccatcgacctcgatgagcgcgccttcgcctactggtccgaacgtttcaacgattggcatgtggaggctggcgagtatgcgattgaggtcggtacttccagccgcgatatcgccgccaccggcgtggtcgtgctcgacggcgacggcaaggccctgccactgaccgaatggtccaccttcggcgaatggcactctgatccgatcggtggcccgatcgtcgaggcgatgcgcgccaaaggtgagaccggcgaactggccaaactgcctgataacgacatgatgaccatgttcctcaactccatgccgatcaacagcctgaccacgctgctcggcgaacctggcaaagccatcaccaacttcctgcttgacgaatacgccaaagtagcgaagtaatcgcctgacatatgtcctcctctgttgatccggaggaggagaactgaagccgaggaggccagtccgcgaatgaaccggtgcggactagtctcctcggcttctttgttatgtgatatgcgacacgctgattgttgtagatgcaacagttgtatgtgcaacgtattaaggtgtgtggtgcgtgcatgatgaggaggcgcgaatatgacggttgactgcgattttgatcacgttccactgggagtggcagtgcgctcgttgaacaatatgattgctcgttatattgccgccacctcaacggatcagcagaaagaaaccaccggtgtcaatgctgagatcatcgtttttttggcaaagcatgaaggtaaaaacatctttcccaccgatattgagcgccgattctccaccacccgctccacagtgtgccgcgtattggggctgatggagagcaagggattgattgaacgcaagccggtggaacatgatgcgcgctgcaaagcgattgtgctcaccgacaaggccaaggccatcgccgaatccatgcgccggcacggcgaagccatggaacgcatgatgttggacggcatggacgagaacgaaatcgccgctcttaggcatggcctgaacaccatgcgcgcgaatctgatcgccaccggcaaaatcggcggaaatgtgagcgatgatgccgccaaatccggagggcagaaacttgtggaatgaacacaatgagaccaaaaaccacgaacaggaataggaaaggaaggaataggtatggcgtccacactcacggaacacgattccgctactcaagcggcgaactcgactggtaaacccaagaaaacgcatatggtacgcacactgcttggctcgctgcgcgaatacaaaaaggcgacactgctcgcgccgctgttcgttgccatcgaaggtgtgttggagatcgtcatccccaccgtcatggcatcgcttatcgacgagggcatcaccggcggctccatgcccgccattatcaaatttggtgtgatcctcgtgctgtgcgcagtgttctcgctggcgacgggactgctttccggccgtttcgccgccgtcgcggcagccggtttcgcgaagaacctgcgccacgacctgttcgagaaggtgcagggcttctccttcaccaacatcgaccgcttctccaccggttcgatcatcacgcgcctgaccacggacgtgaccaacttgcagaacgcctttatgatgattgtgcgtatgggcgtgcgtgccccgatcatggtcatcgtggcatgggcgttctcgtttcgtatcagtacctctatctcgctggtgttcctcgctgccattccggtccttggcttgggcctgatcggcctcgccatccttgtgcacccggtgttcgagcgtgtgttccacacctacgatgaactcaacaatgtggtcgacgagaacctcgccggcatgcgcgtggtgaaatccttcacgcgcgaagaccatgaggtcagcaagttcatgcgcatctcgcagcgtatttataaggacttcctcaaggccgaacgcattatgagcttcaacgcgccgctgatgatggtctgcatctacgcctcgatgattatgatcgcctggcttggcgccacgcagatcgtcgcctccggcaacaatgccgcgctgggacttaccaccggcgatctgaccgcgttggtgacctacgccatgcagatcctgatggcgctgatgatgctgtcgatgattttcgtgatgatcatcatctccatcgcctccgcggagcgcatcacccaggtgcttaccgagatcagcaccgtcaccgatcccgacaacccggttacgaaggttgaggatggatccatcgatttcgaccatgtgagcttccgctactcggacaacgccgaaaagcccgtgctcgacgatatcgacctgcacatcccctccggcgcgacggtcggcatcgtcggcggcaccggttccgcgaaatcctcgctggtgcagcttatcccgcgcctttacgacgtgaccgctggttcgctgaaggtcggcggccgtgatacgcgcgactatgatctgatcaccttgcgtgacgaggttgccatggtactgcagaagaacgtgctgttctccggcaccatcgccgaaaacctgcgctggggcaatccgaacgccacggacgacgagctgcgccatgcctgccagcttgcccaggcggacggcttcatccaggaattcccggacaaatacgatacctatatcgaacagggcggcaccaacgtttctggtggccagcgtcagcgtctgtgcatcgcccgcgcgctgctgaaaaagccgaagattcttattctcgacgactccacctcggccgtcgacaccaagacggataagctgattcgtgccgccttccgcaacgagatccccgacaccacgaagatcatcattgcgcagcgcatcgcttcggttgaggaatccgacctcatcattgtcatgcatgacggtcgcattcttgacaaaggcacccacgagcagttgttggaaagctgcgaggaataccgcgccatctacgaatcgcaaaccaaatcccaaggcaagccggaggaaccggcagcgctggaagcctcggttgaatcgatcaaatcgcaagaggaaggagacaatcgatgagtgacaagcagaacttcaccgggcgcaagccccaaatggcgaaagccgcgcccggcaccaccaagcgcatcttcggatacgtgttccaatacaagtggcgcgttgcagtcgtagtgctgtgcatcgtgctggccgccgccgcacaagccggctcggcactgttcctccaatcgctgattgatacgtatatcctgccgctggtcggtgccaccgaccccgactggatgccgttgatccgcgcgctcagcctcatggcctgcctgtatgtcgccggcatcgtggcggcatgggcctacaactggatcctcgtcggcgttgcccagcgcgtactcaagtcgatccgcgacgacatgttcgcccatcagcaggaactgcccatccgctacttcgatacgcatgagcacggcgacatcatgagccactacacgaacgacaccgacacgctgcgccaggcgatcacccagtcgttcccgcagatgttccagtcgatcatctcctgtgctgcggccctggcatccatgctgtggctctccgtgccgttcaccgcgttcgtgcttgtgttcaccgcgatcctgatcgtggtcgtgcgcgccatcgtctcgcgctccggccgctacttcatgaagcagcagtactggatcggcgacgtgaacgccttcgttgaagaggccgtcaacggccagaaggtcatcaaggtattcaaccacgaacccgccacacagattaccttcgacaagaagaacgaggaactgttcgaagcttcggccgcagccaacacttacggcaacatcaccatgcccgtcatcggcaacatgggttatatgttgtacgtgctgcttgccatcgtcggcggtattgccggcattgcaggctggggtaacttcggcctcgccggtgcgggcaccctcactttgggcaccatcgtttccttcctgacgctttcgcgctccttcatcaacccgatcggccagatctccatgcagttcaacatggtgatgatggcgttggctggtgcttcgcgcatcttcgcgctgatggacgagccggttgaggaagatggcggcaccgtcaccctggtgaacgtcgagctcggtgcggatggccgcaccatgaaggaagttgatcacgtgacaggcaactgggcatggaagcgcgaggagggcgatgacggcacgcgctcgctggccgccgcccacctgctcagtcccaaggccgccgaagtggcgaccaaggcgcgcgaacaggccatcacctcacctgacggacgcctgaccctgctgcgcggcgacgtgcgcttcaccgatgtgaccttcggctacaaccccgacaagcccgtgctgcatgacatcacttggttcgccaagccgggccagaagatcgcactcgtgggcgcgaccggtgctggcaagaccacggtgaccaacctcatcaaccgcttctacgacgtgcaggaaggccagattctttatgatggcatttccgtcaagggcattcgcaagcctgatctgcgtcgctcgctcggcatcgtgttgcaggatgtgaacctgttcaccggcactgtgatggacaacatccgttacggcaagctcgacgccaccgacgaggagtgcattgccgcggctaagttgaccaatgctgatggcttcatccgcatgctgccgcagggttaccagaccgtgctcgaaggcgacggatcgggcctatcgcaaggtcagcgccagctgatctctatcgcgcgcgccgccgtggctgatcctcctgcgctgattctggatgaggcgacctcgtccatcgatacgcgcaccgaggaggtcgtgcaggccggcatggataacctgatgaagggccgtaccgtgttcgtcatcgcgcaccgcctgtccaccgtgcgcaactccgacgtgatcatggtgcttgatcacgggcgcatcttggagcgcggctcgcatgatgagcttattgcgctgaagggcgagtattaccagctttatacgggagcggtggagctggactagtctcctttgtgataaggcgatagtgttaacccctcgcggcggaatgtgagttgtcaactcctttccgctgcgaggggtctttttgtatgtgcattgatgcttggctttgtaagtcggacaatggttcggaggagttcggaggctgggctgtcgcgtctagcggtcttcgaatagttcgtcggcgcatttgaccaagattgaatcgtctcgttggcgggcgatatcggccagttcctgcgtcttgacgaacaaggcaagatatcgttcgctatatcctttggggatttccgctcgtgatcgaagcgtgtcaatggtgtcggcaacgttgaggcgcgagcgccatttgcattcgccggcaatcagctggtgcgtgcgagtattgccggccagcacatcgatatcggtttgttgatgtgttttggggtcggtgccccaccattttccaaattgtgtggcgaggaatggtagtcgtttggctcgattggcacgcgataaccattgcgtgcataccgtttcgaactgttggcccacgtaagtatcgaatgcttcggtgaatgccgattcttcagctgcggcctctccgccgccgctttcaatcaggtcagtgttgtcgctgacgaagcggtaccagtatgcgaaaaacgggtcgcgaatgcggtattgacctttacgcgacgttgtcggactttccccaaacggcacaatgcgttcaatcagtcccagaccttcaagcgtggcaatgtatttgctgatcgctgagtactccacaccggaatgttcagcaatggttttcaatgtagaggagccattggcaatggcctgcaaaatggagctgtagagagccggttcgcgcagttcttgccttagcagcatgagtggttcctcgaacaataggcctgagcgtgagaagcacagctcaagcatattgtcgtggtagctcatggattcgtcgatttgtgacagatagtacggtgtccctccgaaggtcgcatagtattcgatgcactgggttgcgggtgtgttgggcaaaaaaagcgcagcatccgcgtagtcgaatggcagtagccgaatctgtgcagtgcggcggccatacagtgggcttttgcttcccaaaacattgctgctcatgaatccttcgttgctgccggagagaatcatggtgacattggtggttttgaatccgtgatcgatggcgatttgcagagccgaggggagggatttatcggcaagcgcggcataggggaattcatcgaatacgaacacgaatggcttgttgtcgtgcgcgcgctctgagacgaaatccagtgcgtccgaccatgttgcaaacgatggagaggttgcgggaaaactgaagaattcgatgacctttcgggaaaatccgcggagattgagtgcgttactttgctgcttcgcagtgaagtacagacatggcttgtcgcgaacgaactcatcaatgagtgtggttttcccgactcggcgacggccgtacagcactagcatctgaaagttaggcctggtgtacaggcgttccaacgtgtgcagttcttcggtgcgtccaacgaacattggtgtcctgtcctttcaagtggtgcaattaatctactttagattagtatactttaaagtatattaaatggacgtcttgtcccgcgtcatattgtctgtgctcgggctaaccatgccttcgcctgcgctgattctggatgaggcgacttcgtccattgatacgcgcaccgagtggttgtatatgtacaggtgcgtggttctgtaagccgaacaataatgtatcgaatgtggatttaccgttggttgtagtatgagcgtcatcaatgatgaaaaggcggtgcgctatggaaaatcaggtgagtgtagggccggggcggcaacgatgagtggcggtcttgacatgtttgatgaaacaggagccgtatcacgcgatgatgatcgctcgttaagcgatgatatagatgctttggcaggagaacgttctatgcatagtccggatttgctttatatgacagacgatgtgttgccaggggaagtggtattgcgtactcctgaggctattcaggcttattttggccgattgcttagtgaagcagagacctagtgtgggatatatgccgcggttttgatgctggctcttcctgatgagcaattctgattttgttcccgtcttggcacggtgtggttgaagtcccagcgtgctatactgaaacagctaattctcagtaaaagtggactagatagccgctttgaatgctaagcagaattctgcaggggcggtttttccgccccgttttctttttcgacggttctgagcaataatggatataccagttattagacgaaggggtttagatgaaacgtcgttatcgtatcggaattgatgttggtctgaaatctgtgggtctggcatgcatagaagtagatgatagcggcatgccgattaggattcttaacgcgcagagcgtgattcatgatggcggcgtcgatcctcagaagaacaaagaagcgattactcgaaagaacatatctggtgtagctcgtcgtactagacgtatgcgacgtcgtcgtcgtgaacgtctggaaaaacttgatgtattgctcaagcaatatgggtacccgattattgatcccgataccttgcatgaaccatttgccgaatgggtgattcgagcaaaagcggcggacgaatttatctcggatgaggagcagcgcaaagaagcagtttctgtggctatccgacatattgctcggcataggggatggcggaatccctatcatcgtgcggaatcgttgctaaatgaaaacgattattctgaacagtatgttcagcttctggagaaagctgaagattatcttgaccgagatcttccggacggacttaccccggcgcaaattgttgcagaagcactgtcagctggctatacgaaagctccgcgtctgagaaccggttccgttaatcgtgaggcacgtgagggtcttcttcctactaaacttatgcaggaagataatgccaatgaactcaaagatatcttttttatgcagcgtgtctccgaggaagagtcaagaaggcttcttttggctgtattttatgcgcattcgcctaaaggctctgcggaacatcgtgtagggatagatcccttcgaccacaacccgcgagcgcttaaagcatccttggtatttcagcgttatcgaattgcaagcatggtagcgaacttgtatattacggaaaatggttctcaacgtcccctgtctgtctcagaaaaagagacaatatacgataatctcactacgcagtcaacagaggaaataacttggtcagacatagctgaagtgtttggctggaaacgttcgcagattaaaggcgtaggtagcctgactgctgatggagaagaacgtgtcaccagccgtcctccgagactaaattttttgcagaatatttttggatgcaaagataaaaaacttcgtgtgaaactgattggttggtggaagaatactgaggattctgctcatgaagccatgatttcgctgttgtcaaatacagtcgatgtggacaaagttcatgatgatccatattacgagcaggcgattggttttatcgatcagctggatgatgaagaattgacgaagcttgacaccattgatttgcaatcaggccgtgctgcatattcgactgagactctgttgaaacttactcaccagatactaactactaccgataatttgcatgaagcgcgtaaacatatcttcggagtgaatgataactggcgtcctgctgcggagaagattggtgctcctgtcggcaatccggcagttgaccgtgtattgaagattgttaatcgctatctgatatgctgccgaaatcgttggggtgaacctgtgagcgttcagattgaacatgtgcgtgatgcgttatcttcaatagcggtttcagagaagaataagcgagcatatgagaacatgacgggcaagcgttctctctatcgagaagaattacgcagacaattgcgtggtgatgagcaaattgataggccacttgaatctgatcttcgacgcatggaagcgattcaaagacaaaatgggcaatgcctgtattgtggtcgtggaatatcgtttcggacctgtgaaatggatcatattgtcccgcgtaaaggtgctggttcaacgaacacaagaaataaccttgctgcagtgtgtgctgaatgcaatagggcgaagagtaatgttccgttcgctgtatgggcgaaaacgagtttggcgatatcccgtggagttgatctcaaagaagcaattgaacgtgtgaaagcatttcttttcgatcctcgatcgtattctccgtcagatcagcgagctttcaagcaagcggtgataatgcgtttgaagcagttcgaagcggacgatgagattgacaatagatcgattgaatctgtggcgtggatggcggatgagcttcaccgtaggattgattggttctataacgccgaacattataccggagctctagcacaagttaagcaagcggaacccgttaaagtaaatgtctatcaggggcgtatcactgctgacgcacgtaaggcgagcggcattgaaggtgatattcattttgttggtgctcgatacaaaactcgtctcgataggcgtcaccatgcggttgatgctgcagttatcgcaatgatgaatcatggtgtcgctatgacgctgtcggagcgtggttctctgcgtgaatcgcaatttctgacaggtttgcatgatggggaagtgtcttggaaacaatatccgtatccaggctctagcggttatgattcatatcagcattggcttggacgtatgaaagaattgctaggcttactgaatgaggctcttgactgtaatcgagtaaaaattctacaatggcagcgtatgtctttgggaaattcaattgctcatgacgcgacaattcatgcgttggataaatgtgaattgggaagtgctattgatgccaatactattcgtaaagcttccacgcctgcgctgtattgtgcgttgactcgtcttcctgattatgatgagacaaatggtttgccggaaaacccagaccgagtgatccatgtcaatggacaacggtttaatgcgacggatatggtgtcattctttatgtccaatgctgctcagattgctgtgcaaggaggatccgcagatattggatctgcaattcatcatgctcgtatatatcgttgttggaaagaaagcgcgaaaggtaaacgcaagtatttctatggcatgattcgtgtgttccaagttgatttgctgaaaagctctcacagtaatctttttacagttgcgttacctgagtctgctgtgtctttgcgatacggcgaagccagaaccatacaggctgttttgaacgggcatgctgaatacttggggtatctgctggttggagatactattagagtcgattttgctcggtcgtctatttcaggacagattgaagagttgatcaatttcttcgattctggtcatgatgaagattgcaatgcatataacagctgggtcgtgtccggattcttctctgaatcaaggcttaggttgcgtcctcagttattggctgcggaaggtataagtaatcttcaaaagtacaacaatattgaagttcctgaaggaatgtcaaaaattgttactgggcagggatggctgccgtctgttgatgcgattgcgaagttctttccacaggtagtgagagtaaatacttttggagaatcccgtgagaaatctcgacatgggcttcctacttcatggaagtggtgtaaataagataaagcattgtcgaatgcgaggaaggtatgcaaaatgcatggagagtagttgattgtacagggcttgaggggcgaattacgtatgttcgtgggcgaatcagcatacatccaaaggatgccgacttgcccacggaagtgcctcttgctcagactgcggtaatacttttgggcctaaaagccagttgttcaactgcggcattatatgagttagcaaaatatggtgtgagcgttatgctatgtgactggcgatcggttcccatttcggcaatgcactcatggagcgaaacacatacatatgtaacagcacggcatatagcacaggcgcagatgtcgttgccgcgaaaaaagaacgcttgggcgcgtatcgtacagagcaaaatacgtggacaggcggcttgtttagattctcagcatattgatggtggcggtttactgcgaggcattgcttcgcaggtaagatcaggtgatcctacaaatgctgaagggcatgccgctagagagtattggaaacgtgtatttccatgtgactgtgattttagacgtgagcctggaagcggattaggacgcaatgcccaattggattacgcatacatgattttgcgaggtttcgcggttaaagctgttatatctgccggtctttctccagtgtttggggtaaatcatcatggaagaggcaattactattgtcttgctgatgatctcatagaagtatatcgaccagctattgacttggcagtatcgaaacttgatgaagatgatgagctttccgatcgtgaagttaagcattatctagtcgaagctgtaaatcagcagttcaatgatattggattgaccattccgagctccttgaacgattttgctcaacaatttggattgtactgcgagaagagaattgaccatcttgaagttcctctttttgaggggaaatcatgaaagttgatgaggatagcggcggtatgtggtgtttggtgatgtttgatttaccggtacgcacaaaacggcaacgacaggaagctacgcagtttcgtaatttgttgctggatatggggtactcaatggtgcagttctcggtatatgctcgatacacgccgacgcaggctggaaaccgaacaacggtgaagatggtgaaagacaacttgccagcaaaagggcaagtccgaatattgcacatcagtgatcaccaatggtcgaaggcgttgcgtttttccagtcgaaaggtggatcaagaggaagaatctcccagcacgcttctgcttttttgaacgggaaaactactgtaaaccattgaaaatagcccttcttaacacgccatcaagcgtatcaagaagggcagatgctaattcccagcttgccgcgtcggatgtgagaaccttcttcaagcgtatcaagaagggcagatgctaattcccagctcaccacatgcagcagccagggcaccagtcaagcgtatcaagaagggcagatgctaattcccagcgccaagtcacgcatacgcttcgacaagtcaagcgtatcaagaagggcagatgctaattcccagcaacgtggcatcattggatgttacgtcgacaagcgtatcaagaagggcagatgctaattcccagcttgggttcgacagatagtcggcgacggtcaagcgtatcaagaagggcagatgctaattcccagcatcattggcttgttccttttagtgttgtcaagcgtatcaagaagggcagatgctaattcccagctgtaaccgaatgaatatttgattcgttgaggtccatggttattgcggttggaggccgtcgcgggttttgtgggttatttcgtttcggggccggggttattgcggtcggaggccatggttggttaggctcctttcaccatgcgagggacgtgtggtgaaaggaggtacctccaatggtacggaaaatcaaggcgaagacgatcctgcgcctggacgagcggggtctgtcgggccgcgcgatcgcgaaatcccagggaatcgcgcgccgaagcgtcgccgagacgctcgatgccgcgaggacggccggcatcggctgggccgacgtcgccggcaagaccgatgacgaggtgtacgccctgttgttcccgggcaggggcggacatgagagcgtgtacgaacagccggactgggccggggttcatcgcgagctggcgcgcgtcggcgtgacgttgaggatcctgcacggcgagtacatggacggatgccggcagaccgggaagccctatatgggttacgacaggttctgcaagctgtacgccgcgtacgtgctgaaactcggggtgacctcgcgtgtggagcacaaggccggacgcacgatcgaggtcgactgggcgggcaagaccatgcgcgtcgtcgatccggtcaccggggacgtcgcgaccgcgtacctgttcgtggccgtgctgccgttcagccgatacgcgttcgcggagcccgccctggatatggggcagaactcgtggctgtctttcgtcaaattgatgtgaacatcgtcggcactttttctgaacaccgtcggcgttcaaattgaacatggtcggcggttggttcctttgttttgttgtgtttggttatttcatgagcgagtgtc

SEQ ID NO: 578 - DNA, 13830 bp, synthetic construct
  source 1..13830: mol_type = other DNA
  misc_feature 1..13830: note = Synthetic
tcgaattcttgcggcggccatggcccaggtgagacgcccggtccctttccgaacccggaagctaaggcctggcacggcgatggtactgcacttgtgagggtgtgggagagtagcacgccgccgcattaaacgttggattgaggccttccggtcgagcaaagctcccggaaggcctcaaccatatccagaccaatgcaaatctatggcgtgtccacgtcgatattgagatatatttatttctgctaattctcaataagagcggacatgttagccgctttgattgctcagcagtttttactgcaggggtaggctttatgcctaccccgttttcatatcgggagattaatatccggttccgtgagtatgcttgtgccaacaagtgaatctcgatgtagagaagtggaagggaatctcagatggctaagcgatatcggattggcatcgacgttggcttgaattcagtcggtctatcggcaattgaagttgacgatgctgacatgccaatgaggattcttaacgctcaatcggttatccacgatggtggcgttgatcccacgcaaaacaaaacggcgattacgaggaaaaacatgtccggtgttagtcgccgtgctcgacgcatggttcggcgttgtagtaagcgtctgaatgctcttgatgatacgttgcaacgtcttggctatcccatcattgagagtgattcactcactcgttcctttgaagagtggcatgttcgggctgaattggctcaatctttcataaaggatgaggaacgtcgccgcgaggatatttccattgctgtgcggcatattgcacgtcatcgtggttggcgtaatccgtatcatcgtgtcgagtctttgattgcggataacccttattcaacgcaatatcaggagttgaagagcagagccgagagcaggcttgggcgcaacgtctctgatgggcttactccggcgcagcttgtttgtgccgtgctttcggcgggttatgatgaggctccgcgacttcggtccagtaacaaacacggcgaaggtcttttgccgcaacgtcttatgcaggaagacaacgccaatgaactgaagcgcatcttcacggtgcaaaggattcctcgtgaagagtgggagcctctattcaggaaggtgttctatgcggtatcgcccaaaggctcagctgagcgccatgttgggtgtgatcctttcgacgctagtcagccgcgtgctttgaaagcgtcacttgtcttccagcggtatcgcattgctaatgtgcttaccaatcttcggattcgtgagaacggtcaggaacgatcgttgaccatcacggagaagaatcaggcatttgcattgctcgcgtccaatgcccaggatgagcttacttgggcggatgttgctcaggagctggggtattccaggaatcagctccgaggcgttggaaaagcaacggaagatggcgaagaccgcatcaccagcacgccgccgcgtctgacgtcgatacagcgaatcgctggagcagacaagaagattgccaaaccgttgcaacactggtggcagaatgcctcagaatcgtcccaagaagcgatgatacgactgctgtccaatacggtggactttgatcaggtccgtgatgacatcgtatatgccgatgccattgaattcgttgatgcacttgatgacgatgggctgaccaagctggattcagtcgatttgcctgcaggccgagctgcctacggcgaagagacattacggaaactgactgagcgcatgctgaccacggatgatgatttgcatgctgcgcgtacagttctctttcacgtatcggattattggcgtccgccggcagatgccatcggcgcaccgcttggcaatccctctgttgaccgggttgtgaagatcgttaatcagtggatgcaggcctgtcaaaaccggtggggcaatcccgtatccgtgcagattgagcatgtgcgttcggccttcgattcggtagcgacagcccgagagtatgagaaccgtacagggaagcgaagcgaatatcgctccaatcttgccaagagcttgaaggaacaagagcatcttgaccgagtgcgtcacacggatcttcgaaggattgaggcgattcagcgccagaacagccagtgcctgtactgcggccgtatgataacgttccgtgactgtgaaatggaccatattgttccgcgtaagggagtcggttccaccaacactcgtgcgaaccttgcggcggtatgcgccgactgcaaccgtatgaagtcgaatactccattcgcggtatgggcgcattccgaagcggcacaggagcgcggcgtaagcctgaaggatgcgttgcagcgtgtgactcatatgcagcgtgacccgaaagcggatacgccgcagacatggcgaagcttccagcaggaagtaaagatgcgtctcggtcagaccgaaagtgacgagcccatcgacaatcggtcgattgaatcggtcgcatggatggccaacgagctgcatcgccgcattgattggcatttcaattcggctcgctatctggcgcagagcgaaaacgagtgggcgaagacagtcgtgtccgttcaggtgttcccgggcaaggtgacggcgtctgctcgtagagccagcgggctggaaggccggattcatttcttcggtgcgcattacaagacgcgtctggatcgtagacaccacgcggtggatgcctcggttatcgcgatgatgaggccttcggtggcgaagacgttgatggagcgagaatcgctgcgcgagtcccagcagatttcagatgcttggcgcattctgggtgaacgcgagtggaaagaatacccgtacgcaggatgcgaagggtatgagctgtaccagcagtggcgtaccagcatggaacttcttttggaactgctcaacgatgcgcttgatgatgatcgggtagtggttcgtcagccgatacggttgaaactgggcaattctattgcgcatgatgcaactgtacgttcattgcaaaaggtcgttctcggcagcgcgatggatgctgatctgattcggcgagcatcttctccggcattgtggtgcgcattgacccgtctgccggactatgacgagaaaacgggcttgcctgagaaccgagagcggcagatcaccgtgcatggcacgacgtacagagccgaggacgaaatcggtttctttgcatcgcaggctgctcagattgcagtgcgtggcggttcggctgacatcggatcagcgattcatcatgcacgtgtctaccgatgctggaagactggcgcaaaaggcgctcgcaagtactggtatggcatgattcgtgtgtttcaagcggatttgctgcggaacagcggagaggacttgttctcggtcaagctgccgccgcagtcggtgtcgatgcgctggggagagccgcgcaccgtgcatgcgatattggctgggaacgcggagtatcttggatggcttgtggcaggcgatgagctgctggtggatttctcgcgaggaaaaataaatgggaaaaacgccaaattcgtgaattggtgtaacgaaacaggcgccacggaagctatatatgaaagctggacgctggctgggtttgatacgaattcaaaattgaagttacggccgacggttttggctaaagaaggactttctaatgttcctgaacatgtcaaggtgcctgtagaagtcggcggtattctcggagactctggatggcgcccgtcagtggatatgacgggaacatatatgcctatcgtgatacggcgcaatgccttaggcgagttgcggtggaaatcgaaggctggtctaccttgttcatggcgatgggctaggtagggcatcatgcaaggccagtggcgtgtcatcgactgcagcacgatggagggcagaatctcctatatccgcgggaatctgcgggtgattcgggatggagacacggagcctacgaatgtgccgctggcccaagccgctgttgtgctactggggctgaaggtttcatgttcagctgctgtattgcatgagatggctcgttgcggcgtttcagtgatgctgtgcgattggcgaggggtgcctgatgcggcgcttcatgcgtggaccgatgtaccgaccacggtcacacagcggcaactggcgcagattgatgtaacactgccacgcagaaagaacgcttggggaagaatcatccaagcgaagattcgcgggcaggcggcttgtctggattccttgggaattgatggcggggggatgcttcgaggcatcgcatcatcggttcggtcaggggatccgtccaattgtgaaggatatgcagcgcgggaatactggcggcgcgtgtttcctgatgatggtggtttcaagcggattgccggcgaaggcaacggccgtaatgcgcaattggattacgcgtatatggtgttgcgcggttttgcgatcaaagcggtcattgccgcggggctgattccttcgttgggtgtgcatcatcgcaatcgcggcaactatttctgcctggcagatgacatattggaaccttaccggccggcgattgattttcatgtgtcgcaattgcgagctgatgattcattgtccgacagaagcgtaaagcgttggttggtcgaagcggtcaaccaacagctaaatggcacggggttgaccattcccagttcgctgaacgattttgcgcagcaatatggtttgtattgcgaaagccgtattgatcgtctgaccgtgccggaatatacaggctgtctatgaaaaccgacgaggatagtggcggcatgtggtgcttggtgatgttcgatcttccggtcaaaaccaagcagcaacgcagcgtcgccaccaaattccgaaacatgctgctggatatgggatacagcatggtgcaatactcggtgtatgccagatacacgcccacgcaggcgggtaatcgggcgacggtgaaggccatcaaagccgcattgccggttcaaggatatgtgcggattcttcacattagcgaccaccaatggtcgtcggcactcagatttgcgaatctgagacaggaagatgagatggaaacgcctgacatgttcacgcttttttgaatgtagaaaggcactgaaacagctaaaaatggcccctcttgagaagctatcaagcttatcaagaggggtgaatgctaattcccaacacgccgggtttggtgtcggagtgtcacgcaagcttatcaagaggggtgaatgctaattcccaacaacgccgccggatccacaagcctgaacgcaagcttatcaagaggggtgaatgctaattcccaacgttgaggggcggtggcgacgccggtaggcaagcttatcaagaggggtgaatgctaattcccaacactatccgggatgcgtcgcctgaagttccaagcttatcaagaggggtgaatgctaatttccaactcaacggtgttggcgtttattccagtggcaagcttatcaagaggggtgaatgctaattcccaacaatttaccaacaaccaatcggttgtgtccaagcttatcaagaggggtgaatgctaattcccaactgatcggtcggcggcgcgcgatttatcgcaagcttatcaagaggggtgaatgctaattcccaacccaacggcaatgttcgcgcggtatgcgccaagcttatcaagaggggtgaatgctaattcccaacgatcatgggcggagccggcgctgtcactcaagcttatcaagaggggtgaatgctaattcccaactagcaagctagcgggaccggtggaacgtcaagcttatcaagaggggtgaatgctaattcccaactgcgtatatatgggcgtacgcgcgtcgtcaagcttatcaagaggggtgaatgctaattcccaactttcggcgagcgccatgcgtgcgagccgcaagctttcaataggggcgaggatgtcaattccggtctacgatgcgattgatgggtatgacgctcccccagtcggcttcgccgacagccccctccaccgagggggccaggagggatgatagtgacgtcaccatgtttgtatgtagcccttccactcaggagctaagagtggaatagccggcttcgttgtcggttttccgcaattatgaatggtcttcggtctgttcgtctggtaatcgtaacgaatgcatgacgggtgcagcgtatgagccgtgcatgtctgaagccatattcacgtgtccactatctggatgaggcgctgtacggttcaggtcgtgtgctactgtgtcaatcatgatgtttatctcatgttgttgttgtcgataaccgacgccgccccacgtttgggcataaggcgagcggttgacgacgcataacttgagataaggtttctttttctgtttctctatcagcactcacagcatccaaaccatatgcggtggcgtatctgtatcagaacatctgcatcgaatgcaacctcgtttcaacgctcatcagcctgcaagccggaacataagccaatccaatcagttcatccaatccagcaagcgacacattcaccacggaaacgagaccatcatgaccgtccacaacaatctttccgaactcatcggcaacacgccgctcgtacggctcaaccacgtgaccgaaggcgtcaaggccaccatcgccgtcaagatcgagtacctcaaccctggtggctcatccaaggaccgcatcgcagagcgcatcatcgacgccgcggagcgttccggccagctcaagccgggcggcgtgatcgtcgaaccgacgtccggcaacacgggtgtcggactcgcgctcgtcgcacggcagcgtggctaccgtacaatcttcaccctgccggacaaggtcagcgaatccaagcgcgccgtgctgcgtgcgtacggcgccgaagtcgtcgtcaccccgaccgacgcgggccccgacgacccgcgatcctactatcaggtcgccgagcgcctcgccaaggccatcccaggtggcttccgccccaaccagtatgacaacccgaacggccccgacagccattaccacaccaccggaccggagatctgggaggcgacagaccacaaggtgacgcatttcgtcgcgggcatcggcaccggcggcaccatcagcggcaccggccgctacctcaaggaggtctccgacggcgcggtcaaggtcatcggctccgatccggaaggctccatctactcggcgcccagcgacgccgacgtccaccagtacgacatcgagggtgtgggggaggacttctaccccaaggcattcgaccggaacatcaccgacgacatcgtcaaggtcaacgaccatgacgcgttcctcatgacccgacgcctggcggccgaggaaggcctgctggtcggcggctcatccggcatggccgtggaaagcgcactgcgatacgcccgcgccaacgacttggacgaacaccagctggtcgtcgtgctgctgccggactccggccgcggctatctggagaagatcttcaacgacgactggatgcgtgagcacgggtacggggacgtcgttgacgccaccgcgcgcccttcgctcgccgcacagtacctgtaaaccgacgatcctacgcaacggaccgcaacagccaacccacgcttaccaaccaacagcatcgcacgaaaggcatcatcccatgaccatctccaccaacgccgcagcactgaacgccaccgccctcgccacccgcgccatccacgccgggcaggaacccgacccgaccaccggcgcggtcgtcacgccgatctacatgacctccacgttcaagcaggatggcgtcggcggtctgcgtcacggctacgactacagccgttccgtgaacccgacgcgcaacagcttcgacgcgcagctcgccgccgtcgaaggcgcgaagtacgcgctgagcttcgcgtccggccttgcggcgatcgacgtgctgctgcgttcgacgctcaagccgggcgacagcatcctgctcggcaacgacgtgtacggcggcacctaccgtctgctcgccaaggtgttcgtgccgtggggcgtcggccttgatgtggtcgacatcaccgacacggcggccgtgcgcgaggcgctggcaggcaagcactatgcggtgctgtgggtggagacgccgtccaacccgctgctcaacatcaccgacatcgccgccgtgtcggccgctgcgcacgagtacggcacgaaggtcgtggtcgacaacacgttcgcgtccccggtgctgcagcatccgctcgacgacggcgccgacgcggtggtgtattcgacgaccaagtacatcggcggtcattccgatgtggtcggcggcgcggtcgtgctcaacgacgaggagacgcgcgatgcggtcgcgttcctgcagaacgcggcgggcgcggtgccctcgccgttcgactcgtggctggacatccgcggactcaagacgctggagctgcgcgtcaggcagcacagccgcaacgcgctcaaggtcgcgcagtggctggaatcgcgtccggaagtggagcgcgtgtggtatccgggtctcgaatcgcacccgggccacgagatcgcggcacgtcagatgcacggcggattcggcggcatggtgtccgtgcagatcgcggccggcttcgaggcagcgaaacggttcgccggcgccacgcagatcttcacgctcgcagagtcgctcggcggcgtggaatcgctgatcgagcatccgggcgcgatgacccacgcctccgtggccggcaccacgctcgaagtgcccgcgaatctgatccgcctgtcggtcggcatcgaggacgccgacgacctgatcgccgaccttgagcaggcgttcgcggcgatctgaccggtcgcgatggccggctgcgatggccggttgcgatggccggccgtgtacgacgggtgatgacaggcggcatggccgtgccgcgatatgcggtactgttgtgaactatgacagatcaggcggcgctgggggcgcttcaacggtatttcggctacgattcgttccgtccgggacaatcggggctcgtcgacgccatactctccgggcatgacgtgcttggcgtcatgcccaccggcgccggcaaatccgtgtgctaccagataccggccacgctgctgcccggcatcaccgtcgtcatctcaccgctcatctcgctgatgcgcgaccaggtcgacgcgctcaatgacgtcggcatccccgccgcctacatcaacaccacgcagggcggcgacgaacagtcgatggtgttcgcgcaggccgcgaatggtgacatccgactgttgtacgtggccccggaacgtctggagacggaccggttccgcaatttcgccgcgcgcgtgccgatttcgctggtcgccgtcgacgaagcgcactgcgtgtcgcaatggggacaggatttccgctcgtcatacctcggcatcggcgagttcatcgccggactgccgcagcgcccgaccgtcgccgcgttcaccgcgaccgcgaccgaacgcgtgcgccgcgacatcatcggcatcctcggcctgcgcgagccgcaagtgaccgtcaccggattcgaccgcgagaacctgtacttcgacgtgctgaaaatcgagacgcgatacaaggccgcgtgggtgtctcgttacgtggccgaacaccccgaccagtccggcattgtctactgcgccacgcgcaaggagaccgaagcgctcgccgcgacgctcaaccagaccgtgccctcgctgcgtgccgccgccgggacggacgcgcagcccggcggcccgatcgcggtcgcctatcatggcggcatgagcgccgacgtgcgcaaccgggcgcaacgtgatttcgtcaccgacgcggtgccggtcgtcgtcgccacgaacgccttcggcatgggcatcgacaagtcgaacgtgcggtacgtcatccaccacaacatgcccgaatccatcgaagcgtactatcaggaggccggccgtgcgggccgtgacggcgagcccagccgctgcacgctgctgtggaacgagtcggacatcgtcacccggcgtcgcctgctcgacaacgactacgagaacgagcggctcaccccgcaggagcaggagatcgtgcgcatgagcaaacgccggctgctcgacggcatgatcggctactgccgcaccactgactgcctgcacacgtacatgacccggtatttcggcgaggacacgcagcgggacggcagatgcgcaggcggctgcgcgaactgcgacagcacgttcgagaccatcgacgtgaccgacatcgcgcgcgcgatcagccggtgcgtgcatgatgcgatgtacgaccacgacgatcagggccgcccgtccgccacgccggtgcggcaggggttcggctccggcaagatcgtcgggatactgcgcggctccaaggcgaaggacctgctcgccatgcggttggagcggtgccccagctatggggtgctcggcgcggtgccggaggcgagggtgcgcgacgtgctcagccagatggcgacggacgggttccttgccatcagcgaagggcggatgccgatcgtcggattcggcaggcgcgccgcggagacggtcgcgccggatttccgctacgagatcaaacgggtggaacgcaagatgaagccggcggcatcgcagcgtccggcacccgacgcggacggcgcatcgtcacagggggcggcgctcggctcgtacgtgccggacgacgagaacgaggcgatgttccagaagctgcgcgcgctgcgactcaccatcgcgcgcgagaacagcctgccgccgtacatggtgttcaacgaccgcacgctgcgcgacatggcacggctcaagccggtcaccgacgcgcagttcctcgccgtcagcggcgtgggcgaaagcaagctcgccaaatacggcaaacggttcatggaggcgatcgcgggggagacggcatagtctgccgcggggaggtgcggccgtcgcggacgtcgccggtcataaggaacgcttatagccggcatacggcaaaaccacgcccttggtgagacaatggtcggtggaaccgattatcgaaaggagtctgtcatggcacaggacaaggacggcaagcccgtcgtcgagagcttccagctggatcacacgaaggtcaaggcgccgtacgtgcgctacatcgacacggagaccggccctcacggcgatgtgatctccaactatgacctgcgtctcgtccagccgaacgagaacgcgatcccgaccgccggcctgcacaccatcgagcacaccatcgccgtgctgctgcgcgaacgcatccccggctacatcgactgctcgccgttcggctgccgcaccggattccacctgctgacctggggcgagcaccccaccgaagaggtggccaaggcgctcaaggagtcgctggagttcatcgcctacaaggcgacgtgggacgacgtgcccgccaccacgatcgaaagctgcggcaactaccgcgaccacagcctgttcaccgcgaaggaatggtgcaaggacatcctcgccaagggcatcagctccgacccgttcgagcgcaaggtcgtctgagcggacccactcctacccttataattcacgcgatcgaaggccgctagtcaaaggcggcctttcacgtatgtcacgtgccgtttcgctggaagtgaggtgggggttgggggtgtgcgacgaccgaccgtaggcttggtcgagcggccttgagcgtgtcggtcgtcgcacacccccaacccccaccgtccggccataagacagggaaaccgatcaatctaacggctcgtgatgcgggcgaccgcggcgtcggcttcggcgacgatgcggcgcatcgcggtctcggcgccggcgccatcgcctttgcgtaccagtgccgcgacctcgctgtggaggtcgagcgcctcctgattcgccgtcttcggcatcagctcatgctgcgtgcgcccttcgagcgtggcggccacgacatcgcccagattcgcgatcatcaggttcccgctcgcttgcatcagcgtgcggtggaacaggctgtccgcctccagatactccctctcgtcggcatggtcggaatgcgagaccatgccgatcgccgcctcggtcagcgccgcccactggacgttggtggcgtgcgcggcggcaagcctggcggcaagcggctcgatcgccgaacgcagctgcgacagctcatgcagcgcgtcgaggcggtggctgccggacagccgccagcgcacgacctgcgggtcgaacatgttccattcgctgatctcgttgacggtcgcgccggtcttgcgtttgacgctcaccagccccatggactccagcacgcgcgtcgcctcgcgcgtcaccgtgcgcgacgggctctcgccgtcaagatcggggtcgggcaggcgctcgccgggggcgatgtcgccgtcgacgatcgccatgccccaggcgtccagcagccggtcatgcagcggccgttccatatcggtgctcttcgtctccatattcataaggcaagtatggcacaagccatcgttatggcatacatatacaacacgccgaccgggaatcgtattgcgtaatccgttactgtcctgtatagtgcataacaacatacaaatggtgttgaaagacagggtttcgtcattcaacaccctgactcaaagaagagatggatgatgaataccatgattcttgccgcagctgatacggcggtccagctcaacggcacccagctcggcatcagcgtggtcgccagcatcgtcgtgctgatcctcctggtcaccgtcgccaacctgcacccgttcgtatcccttctgctctccgcgctcgtcgtcggcatcggctccggctacgggccggtcgccaccgtcgagagcttctcgaacacgttcggctccaccatggcctccgtcggcatcctcgtcggcctcggcgccatgctcggccgcgtgctcatggacaccggcgccgccgactccatcgtcgacacgctgctcgccaagacgtccacgaagatgatcccctggaccatggcgctgatcggcgcgctcatcggcctgcccatgttcttcgaagtcggcctagtcgtgctcgtgcccgtcatcatcctcatcacccgccgctccaagctgccgctcatgcgcgtcgccatccccacgctcgcagggctgtcggtgatgcacgcctgcatgccgccgcagcccggcccgctcgccgcgctcagctgcttcaagaacggctccgttggcgtcaccatgatgttcggcctgcccatcgccgtgatcaccgccgcgctcgtaggcccgctgttctccaagttcgccgccaagtgggtgccggtcggcgcccccgagaacttcgacaccggcaagggccgcgtcgacgccgacggcaaccccgtgaccgccaagccgccgttcgcgctgtccgtgctgtgcatcctcatgccggcgatcctgatgctcggcaacgccatcttcgaaatcgtcgcacccgaccaggccggctccacggcactgtacgcgcaggtcctcgccttcttcggcaagccggccatcgcgctcgccgtcgccgtcatcttctccatgctcgtgcttggccgcgccacccgcatgagctggaagtccgtcaacgactcgctcaaggcagcgctgcccccgatcgccggcatcctgctcatcgtcggcgccggcggcggctacaagggcgtgctcgtcgacaccggcatcggcgacatcatcggccgcttcgtcgaaagctcctccatctccatcttcctcgtcgcctggctcatcgccgcgttcgtccgcgtcgccaccggctcggccaccgtcgccatcatcaccaccgccggcatcctcggacccgtcgtcgaccaaatgggcgtgac

SEQ ID NO: 579 - DNA, 9908 bp, synthetic construct
  misc_feature 1..9908: note = Synthetic
  source 1..9908: mol_type = other DNA
ccgacgtgtaccaggaccgccaggacaccaccgtgtccgtggccgtcaagctgaaggacgaggacgacgcctacgccgtgttctggaccaccacgccgtggaccgtgcccacgaacttcgcgatcgtggtcggcgcggacatcgactacgtggaggtcaagccggtcgagggcaagttcgccggcaagaagttctacttcgccaaggccctgcttggttcctacgccaaggaactcggcgagggctacgaggttgtgcgcgaactcaagggcgccgacatggtcggctggcgctactggccggtcttcccgtacttcgcgggcgaggacgcgctcgccgagggcggcaccccgggccccaacgcctaccagatcttcaccgccgactacgtggacaccaccgagggcaccggcctggtgcaccaggccccctacggcgaggacgatatgaacacgctgaacgcccacggcatcacgtccgtggacgtgcttgacgcgggctgcacgttcacgtcgctgtgccctgagtatgagggcatgttcgtgttcgacgccaacctgccgatcctgcgcaacctgcgcgccggcgatggcccgctcgccgagattccggaagagcgccgcgcgatcctcttccaggagaagagctacgtgcactcctacccgcactgctggcgttgcgccaccccgctgatctacaagccggtctcctcctggttcgtgtccgtgaccaagatcaagccgcgtctgctggaattgaaccagcagatcaactggatcccgggcaacgtcaaggacggccagttcggcaagtggctcgccaacgcgcgcgactggtccatctcccgcaaccgcttctggggttccccgattccggtgtgggtgagtgacgatccgaagtacccgcgtgtggacgtttacggttctctcgaagagctcaaggccgacttcggtgactacccgcgcgacaaggacggcaacatcaacatgcaccgtccgtggatcgacaacctggtccgcgtcaacccggacgacccgaccggcaagtcgcacatgcaccgtatttccgatgtgctcgactgctggttcgagtccggttccatgtcgttcgcgcagttccactacccgttcgagaacaaggagaagttcgagcagcacttcccggccgactacatcgtggaatacatcggccagacccgcggctggttctacctgctgcacgtcatggcgaccgccctgttcgaccgcccggcgttcaagaacgtgatctgccacggcatcgtgctcggctccgacggccagaagatgtctaagcacttgcgcaactacccggacgtgaacggcgtgtttgacaagtacggttccgacgccatgcgctggttccttatgtcttcgccgattctgcgcggcggcaacctgatcgtcaccgccgatggcatccgcgacaccgtgcgccaggtcatgttgccggtgtggagctcctactacttcttcaccttgtacgccaacgcggccaacggcggggccggattcgacgcccgccagctgcgcgcggacgaggtcgccggtctgccggagatggaccgctacctgctggcccgcacccgccgcctggtggagtctgcgaccaagtccctcgacgagttcgcgatctccgacgcatgcgacgcggtgaccgattacatcgacctgctgaccaactggtacattcgcaacacccgcgaccggttctggaatgaggacgggaacgcgttcaacacgctgtacaccgcgctggagacgttcatgcgcgtgctcgccccgctcgccccgatggaggccgaggccgtgtggcgcggcctgaccggcggcgaatccgtgcatctggccgattggccgacgctggtggacgcggagaccggagaggcgaccgagctgggccgcgtgctggtggatgacccggcgctggtggatgcgatggagaaggtgcgtgaggtggtgtccgccgcgctctcgctgcgcaaggcggagcagatccgcgtgcgtcagccgttggcccgcatgaccgtggtcaccgagaacccggatgcggtgcgcgcctatgaggacatcctgaagtccgagctcaacatcaaggccgtggagctgtgcacgctggatgaggccgccgagcacgggctgcggatcatcaacgagttgcgcgtcaacgcccgcgtggccggcaagcgtctgcgcaaggacgtccagttcgccatcaagtcctccaagtccggcgcctggcatgtggacgccgccggtgcgccggtggtggagatcccgtccggcgagatcgcgctggaggagggcgagtacgagctgatcaaccgtgtggaggaggcgaacccgtccgatgccgacagcatcgtgtccgcggcgctgccgaccggaggcttcgtgatcctcgacaccacgctgaacgacgatctgatcgccgaaggctatgcacgcgacgcgatccgctccgtgcaggacgcccgcaaggaggccggactcgacatcgccgaccgcatcgtgctcacgctcacggtgccggccgccgacgccccgaaggccgagcagttccgcgacctgatcgccggcgagaccctggccaccacgctcgagatcacgaccagcgataccgccgccgacctcggcatcgaggtcgccaaggcctgagcgggcccgaacgcccaacattgacaggaagtccccgatcccacatcggggactttcccgtatgtgcattcagtaggtgatttttcgtttagttggaaacttgacggagagaaggcatgggagttcggcggttttgcggcgtcactcggcttggaaacttgaaaaagtttccaactgaataaataatccccaactgaatgagttgaccttgggttgagggtgaggaaacgggcgtttgatgtctgtcaaaagccggtaatctgaagatgattcagtgacgaggaatggagtggaggctatgacgcatatcgtggcgggaatcctggcgcatgtggatgcgggcaagaccacattgtccgaggcgctgctgtaccgctccggacgcatccgcaaactcggtcgcgtggaccacggcgacgcattcctcgacaccgagtcattggagaagcagcgcggcatcaccatccacgcccaccaggcatccgtgcgttgcggcgacctggacctcacgctgcttgacaccccaggccatgtggacttcgccgccgaaaccgaacgtgtgctgcgtgtgctcgactacgcgattctcgtggtctccggcaccgacggcgtgcagggccacaccgaaaccctgtggcgactgctcgcccgataccaggtacccaccttcatcttcgtcaacaagatggatgccgccggcgccgatagagctgcggcgctcgccgatttgcgccgtcgtctgtccgacgccatctacgagctgccggcgcctgcctcggcctttgggcccgactccggcgccggtattggtgccgatgcctgtcgtacggatgccgacgcggctcattcggtgccgctcatcgaggccgcccagtggcggcacgcggaagatgtcgagaatgttgccacgctcgatgaatcggcgatggacgaatatctggagaccggcggcatcacgctgacgcggctgcggaccatgatcgacgagcgcaagctgttccccgtctacttcggttcggcattgaagctcgatggcgtggacgagttcatgaccggattggagacctacgtgcgtgagccgcaatggcctgcagcattcggcgcgcgcatctacaagatctcccatgacgcccagcacaatcgcctcacctggctcaaagtcaccggcggcacgctcaaggccaaggctccgctcaccaacgctcgcgactcgtccgttccgtcgggcggagtcccctcgcagccggatgggggaacggccctgcaatccgtctggcaggagaaggccgatcaggtccgcgtctacaacggcgccaaattcgacatcgccaccgacatccccgccggcagtgtctgtgccgtcaccggtctgacccacaccttcccaggcgaaggcctcggtatggaacccgatgcggaatcgcccagtatccagccggtgctcacctacaccgtgctcccgccggacaccgacctggacgcgcttgccgaacgcgccgccgctgcgcgcacggccgcgggagttgcgtcggagccggaacagggaaccgaatctgatggcgagcaatcgaagaacgccgaatccgacgcggaggtcgcggtgccgctcgcgccggcattcgacgacctgaccctgcacaaggtcatcaccgcgctgcgcgaactggaggacgaggatcccctgctgcacgtggtctggcaggagcggctgcgtgaggtgcatgcgcagctgatgggcgccgtgcagttggagatcatccagcaggaattgcatgatcgattcggtctggacgtggtgttcggcccgggcggcatcctgtatcgggagacgatcacggcaccgattgagggggtcggccatttcgaaccgctacggcattatgccgaggcgcatatccggctggagccgggcgcgccgggcagcggcgtgcagattgcgaccgcggtgagcgagaacgtgctggaccgcaactggcagcggctgatcatgacgcatctgggggagcgcgagcacttgggcgtgctgatcggcgcacccctgaccgatgtcaagctgacgctggtggctggtcgcgcgcacttgaagcatacggagggcggcgatttccggcaggccacgtaccgtgccgtgcggcaggggctgatggagctgcgggccggggtatcgggacgaccatcggtggcggaggggcagaccgaggctgagttcgtgaaggaagcgatgtcgggcggtgtgcggtcgggtgatcgtggttcggagagcgacggcggtgctgtgacgactggacacgctggccgatacgggtattgccgtgtgctggagccgtggtaccggttccgattggaggtgccgcaggatatggtcggacgggcgatgtccgatattcagcgcatggcgggtaccttcgagatgggcgacgatgtgggtaccggtttcggtttgggcgcggctgcgtccgccgggtccgccgggtccacgatggatgccgactacgccgtgctgacgggggagtgcccggtctccgagatgcgcgactacgcgatggacgtgaacgcgtacacgcatggtcgagggcggctgagttgcacgttcgccggctaccgcccgtgccatgacgaggagcgcgtggtgcgagaggcgcactatgatccggaggcggacctggagaatacgcccgattcggtgttctgcgcccacggcgccggctacccggtcaagtggtacaaggtgccggagttcgcgcatgtggagtatgcggggtaggaactcccgatttgatgctatactggtcattgctaattctcagtaagagcggacatgatagccgctttgaatgctaagcagattttctgcaggggcaggtttcctgccccgtttttatttttcccggatatactggtactcgtcgaagtgttgctatgaatcaaaggggagatatgagcaagcgactgtaccgtcttggtattgatgtggggctgaattcggttgggttggcagccatagaagtggatgagtcgggaatgccattgcgtattttgaatgcgcagagcgttattcatgatggaggtgttgatccccagaaaaataaggaagccattacacggaaaaagcagtcgggcatcgcacgtcggactcggcgtatgcgccgccgccgtaaggcacggcttgcgaggcttgacaatgtgttggagcgggtgggattcccgattgtcgagtcagaatccttaacggagccttttgaggagtgggcagtacgaggcaggttggcggaacgatacatcgaagatgatgatgagcggttggaagatatctccatcgctattcgtcatattgctcggcaccgaggatggcgtaatccttatcagcgggttgaatcactattgttggatactccctattctgataattacgctgagttgaagagccgcgtggagacccggatcaggaacgtgattgacgacgatcccactccgggagagctggtgtgtcaggtattgcagcaaggttttgatgaatctccgcgcctccgtacgactactcggtcttcgaatccgaaaacgggtttgctgccgaccaagttgatgcaatccgataatgccaacgaacttaaacgtatttttgaagtgcagcgggtggatgagtctcatgcgcgggaactgctgctggccatttttgattcccaaacccccaaagggtctgcagagtcgcgggtcggcaaggatcctttggataaaacgcagagtcgcgcgttgaaggcttcccttgtttttcagcggtaccgcattgctaacgttataacgaatcttcggataaaagagggatccattgaacgtcctttgaatatgggcgagaagaacatagtttttgatttgcttgcctcaacggataaagaagattacacgtggggagacgtggcacagaaacttgggctggaacgatctcaactcaggggcatcggacaacaaaccagggatggcgaggaccgtgtgtccagcaggcctccaaggatggattccattagggcgattcagtcttgttccgacagcaaactccggaagaaattgaatgcatggtgggcgcaagccagcgatgatggccaagagtcgatgattggtctgttgtcgaacactgtagacatcgacaaggtgcaagacgaagttacatattcggaggcgatagatttcatcaatacgcttagcgatgaggagctgagcaagttggataccattgatctgccggctggccgtgcggcttattcggcaaaaactttgcaagtgcttaccgaacgtatgctgcaaaccgacgacgatttgcatgaagcgcgcaaacatgtatttaacgtggctgataattggcgtcctccggcagatcccatcggtatgcctttgggcaatccttcagtcgatcgggtgttgaagatcgttaatcgatatatcgtcaattgcgtgaagcggtggggcactccttcatccgtgcagattgaacatgttcgtgatggtatgtcttcggttgcggtggctcgtaaaaacaagaaggactatgaaaacgccatagccaagcggagtgaatatcgaaaggatatagggaaacaactgcatctcgaagaaaaggtggagcgggtacgtgaatcggatttgcgtcggtgggaagcggtgcagcggcagaacggaaagtgtctctattgcggtgcgatgattacattcaaaacctgtgagatggaccatatcgttccccgtaaaggcgtaggatcgacgaatacgcggacgaattttgcagcggtgtgtgccgaatgtaatcgtctgaagagcaataccccgttcgcagcatgggcgcgatccgctcaagctcaagctcgaggggtggatctgtctgaaacgattcagcgtgtagaggcgtttatctttacacggggctcctatacgtctgccgcacagagaaactttaagcaggaggtgatttcgcgacttcggcaaacggaagctgacgagcctatcgataatcgttcgatggaatcggtggcttggatggcggatgaactgcatcgccgtatcgattggttcttcaaccatgagtcgtatcagtatccggatgtgttaccaaacactactgtaggggtgttccgcggtcggctgacttctgacgctcgaaaggctgcgcatattgaagatcaaattcatttcgtcggcggaggaggtaagacccgactggatcgcagacatcacgcagtggatgctgcagtgattgctctgatgcgacccggcatcgcacagacgctggctgaacgtgactcattgcgtgagtcccagcggttggcgagaaagttgtatcccgatgaaataccgtggcgggaatatccaaatcctggaacagcgtgctatgactctttccaagagtggttgaaacaaatgcataagttgttggaattgctcaacggtgctttagataataatcgggttgctgtagtgcagtcgatgaggctggcattggggaattctgtcgtacatgacgatacggtgcacaagctgacgaaggttcctctgaagtccgctatcgatgttgatactattcggaaagtgtcaactcctgccctgtactgtgcgttgaccagattgcctgagtatgacgagcaagatggtctgccggagaatgatgaacgttccattaccgttcatggtaggtatgtcggtccagaggatgaggtctcattttttacctctgcggcggcgcagattgcggttcgtggcggatccgcagacattggttcagcgattcaccacgctcgaatctatcggtgctgggaacagaaggcaaaaggtaagacaaagatcttttatggaatgattcgtgtattccaaactgatctgatgcgatatcggaacgaggacctcttccacgccccgttgtttgaacagtcagtatccatgagatatgccgaaggtcgtactgctaaggctgtgttggacaatcgtgcggaatacctgggttggttaaccgtgggagataccatcgaggtggatttcgccgaagctcaattgactggacagattgcggagttccgggattttgttcaatcattgccgaacgggacttcccgtgcgtacagttgctgggttgttgatgggttctttaacaaaacgcaattaagattaagaccacgcatgcttgcttctgaaggaattgatactctcgggaggaagaatgggacaagcatttcagatggtgtgctcaagacaatcgatagaccaggatggctgccggctgtgaatgcactagccgcataccatccggtatgtatccgtctcaatgtattcggcgaatctcgtcaagaatcatgctctggtttgcctacttcttggcagtggtgtcgtgatgtgctggagtaaggcgatataaaatgcaaagtgcttggcgggttgtggactgcacagagatggacggtagcatcacgtacaagcgcggacgtgtggttattgacagtcggggtgctgtaaaaccagtagaagtatctctggcgcagacagcagtgcttctgatcggacagaagctgtattgttcttcagcggctttgttcgaaatggctcaatatggcgtcagcgttatgctctgcgattggagaggtgtgccagtagcggcgttatattcgtggacggatttaccgaccaccgttacacaacgtcagctggctcaatctcggctaagcactccacggcgtaaaaatgcatgggcgcgtcttgtccaagccaagattcgtggacaagctgcgtgtttggatgccctgaaaaaggaaggaggaggaatcctcagagggctggcagcgtcagtaagatcaggtgatccatccaacatcgaggggcaagcggctcgagaatactggaagagagtgtttaatgaggaggaacatttcagacgaatacctggccaaggcatgggtagaaacgctcaattagattatgcgtacactgtacttaggtcatttgcggttaaggctgtaatatcagcaggactagcgccgccgctgggtgttaaccatcgtgggcgaggcaattacttttgtttagcagacgatcttattgagccgtttcgtgctgcaattgactatcgagttgcccagttggatgccgatgcttgcgtatcggatcggacggttaagcgagtgctggtcggtgcgtcaaatcaaagcttcgactcttccggtttgacgattccaagtgcgatgaatgatttggctcagc

SEQ ID NO: 580 - DNA, 7100 bp, synthetic construct
  variation 6164: note = n is a, c, g, or t
  misc_feature 1..7100: note = Synthetic
  source 1..7100: mol_type = other DNA
gctcgggttgcgtcttgcttcggaacgtctgagcatcgtacggtacgtgttcctcgtgcagatcgaggatggcatagcctccgccgcccaacgcgcctcactcgaatacgccgatgcggtgctgatcggctggccggagaccgatgcgggagatgtagtcgaccttgacgatgaccagttgaggaacattgacgagcagatgcacctgatggagcagtacattgccagattcagcgcgatggaacgtgagggtgacatcgatggcatgaccgataccctgattcgcgtcaccgaacgggtggccgaggtacggcgcttgtaccagcctgactttcccttgccgaccttcgccgaaattcgtcgcgtcgtgcaggatgaatgggatgaggatatgggcaagatcgacccgcaggagggcgcgcccaccgcggatgagatcgagcgtgaaaccgccgacgccgacaagctacaggatgaggagaccgcatgaccgggcctcgacgcatgcgtccggaatcggccgaagccgattccgagcttgccgtcagctatgtgatcgaaccggaaaggcgtatggcggacctgtccgtcgacgtttccggttcggcagtggcctccgggcgtaggtcggcgcgcggcaattggcacagtcgacctcgcatcggcatcatgggcggcactttcgatccgattcacaatggccacttggtggcggcatccgaagtctcgtgggtctacgatctcgacgaggtgattttcgtaccgacagggcgaccggtgttcaaactcgacaagagggtcaccaatgccgaagaccgttatctgatgacggtgatcgccaccgcatcaaacccgaaattcacggtatcgcgtgtggatatcgaccgtcccggcatcacgtataccatcgatacgttgcgcgacatcaggacgcagcatccggaggcggaactgttcttcatcaccggtgccgatgcggtcgccgagatcatgcagtggaaggatgccgacaagatgtgggagctggcccacttcgtggccgtgacacgacccggatactcgtctccggaaggcgtgaaacttccggaaggcaaagtcgacacgttggagattcccgcattggcgatttcgtccaccgacgtgcgccgacgcgccgaacatggtgaaccggtctggtatctggtgcccgacggggtggtgcaatatatcggcaaacacggcctgtaccgttgattttccacatgaacacgcgaggctcgtatggtctgtgtaaacggttagtattggtcacgtccaattgacgcgaaaacagacgtttggagacatggtgagcgcaatcctcgaaggaaagccggataaaaaccttatccttgtcacaggcaggacgcatccgaagctggcggcggaagtcgcggaacagctcggcatcgatgttctggaaaccacggcatatgatttcgccaatggcgagatgtacgtacgctacaccgaatccgtgcgtggcgcggatgtgttcgtactgcaaagccattgcaacccgatcaatcagtcaatcatggaacagctcatcatgatcgatgccctcaagcgcgcttccgcacgttccatcaccgcggtctgcccgctgttgggctactccaggcaggataagaagcatcgcggtcgcgaacccatctcctgccgtctgatgttcgacctgctgaagacggctggtgccgaccgcatcatgagcgtcgacctgcatgccgcccagtcgcagggtttcttcgacggtccggtggatcatctcatcgccatgccggtgctggtcgattacatccgcgaccgtttcgccaaccagctcgacaatgtcgccgtggtctccccggatgccggtcgcatccgtgtggccgaacagtgggctcagcgtcttggcggcggccctctggccttcgtgcacaagacccgtgacattacccgtccgaaccaggccgtcgccaaccgtgtagtcggtgacgtcgaaggcaaggactgcgtgcttgtcgacgacctgatcgacaccgccggcaccatcgccggcgcatgcagcgtgctcaaggacgccggtgccaagtcggtgaccgtcgtcgccacgcatggcgtgctgtccggtccggccatcgaacgtctgaagggtagcggcgcccgcgaggtcgtgctcaccgataccgtgccgattccggaggagaagcgttgggatggcctgacggtcctgtccatcgcgccgctgctggccagcgccatccgcgccgtgttcgaggacggctcggtcgccgagctgttcgacacgtatcccgagcatcacgggcagggcttcctgttcgcctgatagctgatcaaagccggcggccatatcaggtggcccgcgggcttgcacgaggcactgctgaaactgcggcatcacctcgcgacacgctgggttggcatgatatggcataataaacacttggtggtgtttcccaatggaattccgccgttcccccatggtgtaatggcagcacacgggtctttggaaccctttgtcttggttcgagtccaggtgggggagctaccgagacgggttctcgcggagaagcgggaacccgtggccccgggtcggttagatcggcgtccagggagccatcacaaacgcgcgaggcccaacggccccgtgcgctttgctttcttcacctccttccggttgcctgtcccaagggcggagaagtggcagtcctgaggtccgttcgaagcaggaccagcatgttccgtcacggttcgagttgacgctttccgaggcaacaacacaaccgtaacgcgaagctctccaagctgctagaaatatcgttcaacggcaggatcatgggcatcacgccgcacctcaaggcaggtcacggaaaaagacagcgaggacacgctgcgaatctactactgctgggatccgatgacggggagataatcatcggacatatcggcgcgcacctgcttaacgataccggactgaacaccaagttctgctaaccagaagtaggatgaaacggagaaggacggcacaaatgaaaaaacactggcgaatctgtcacacttcttcttatcgggcatggccgacgcgtgctccgaaatgatgatgaatcatcgttatcctcattttcggatacacggttcccgagtacaaggacatgccggacctcaggcacatatgagtctcgagaaagcagtcgcgacgcttcaggaggaaggctggaaggtatatacggcctgcgtgcgttcaagaagcctgtctgggctgtgagaagatcggttgcgatgaaggctgattataacgattccagagagttgacatgggatgggcttgaccggtcatgaaggaggttgacgacaccccgtggaaggccctagggtacaaaacaccgaacgagatatgaaacaaaaggattgtcaggctaacatcggaatcgacgggcacgaaaacaggtgttacttttataaaacgaatctggattggattgattcgtcatatggaatgggttataatgaaagcgctaattctcagtaaggacggactcgatagccgtcttgaatgctaagcagttttctgcaggggcggtttccgccccgtttttatttttcatgtgaatgctgcggtgtctttctggcgatagggatacaataacccctaagtgcgtgttgctgctgaacaaaggggtattgagtgttgtacaggtgtcgcagacgttacagaatcggaattgatgtgggtcttatgtctgtgggattggccgcaattgaagtagacgagacaggctttcctatcagaatcttgaacattcagagcgtaatccatgatggcgggattgacccgcagctgggcaagaagaagtcgatatcccgcaaggccacttccggcgtcgcccgaaggacccggcgcatgcgcagaagaaaggccgtgcgtcttcgtcagttggatgcgactcttgagagtttgggcttcccgattgtcgaaccggattccttggacacttgggaggtttggctcacccgcgcgaaattggcgggttcttatattcaggatgacgaaatccggaaagaggatatctctattgcattacggcatatcgcacggcatagagggtggaggaacccatattcgaatgtcgagtcgctgttcgtggacgtcgcgccttcggaacaatacgaggagcttagaagaaaggccgaggaaaagctcggtacgagtttgtccggcaacccgacttccgcggagatcgtcgaatgcatcttgaaaagacaggttggtgaagtccagttgcgcaccagaagccataaaggcgcgaatggcaatgcggcggaaaaagaaggactattgccgacgaagttgatgcagagtgacaacgccgcggaaattcgcaggatattcaaggtccagaggatagatgatgagacggggaggaaactgctcagggcggtcttcaaggcgtgctccccgaaagggtccgtggaacggagggtaggcagggacgccttggctcccggacttccccgcgctcttaaggcatcgttggcgttccaggagtatcggattgcaaacgtcctcacgaatctagtcatttcagaagatgggacgaaaagaaaactgactatcgcggagaaacagcgtgtctttggttttctttcttccaatgagactgatgacattacgtggattgatgtggccgaaaaattgggattggaaagaaggcagattcaaggcgtcggctgtctgaccgccgatggtgaagaaagaatctcctcgactccgccacgtaacgtcaccgcgctgcgcatccattcggcgaaaccggtaataaggaaaaagctcgttgcatggtggaaggctgcgtctcccacggtgagggaaaccatggtagagctcctttcgaatacggtcgatattgaccgcgtccgcgaagacatggactactcgtcggcggtcgcgttcatcgattccttggatgacgaggaactgactgcgctggattcggtagatttcctgtcgggacgtgctgcatattcacctcagacattgaagcagttgacggaaagaatgctgaataccgatgacgacctgcatgaggcccgcaaggcggtttttggcgttgacgacaattggaagccgccagtcgatacgatcggcactccggtggggaatcccgccgttgatcgtgtcctgaaaatcgtgaacagatatctgttggcatgccagaaacgatggggaaatccccagagcgttcagattgaacacgtgagagagagcttttcttccatcgccaaggcgaaagagacggaaagggctcaggatgaaagagcacgataccgcaatgatctgaggcaaaagctttacgagcaggaaggacttaataagatacgtgaatctgacatcagacgttgggaatcggtccaaaggcagaatggaacgtgcctgtattgcgagtcaccgataacattcaagacctgtgaaatggaccatattgttcccaggaaaggcgttggctcgaccaatacgcgggtcaatctcgcggccgtatgcgcggaatgcaacaagctgaaatccgatacggccttttccgtgtgggcaagaacggaggacgcggcccttcgtaaggtcagccagcgtgacgcgatcgaaagggtcaagaccttcatctttgacaagtctgtgccgccaagagagcaacgcgcgttcaaacaagccgtaatctcaagactgagacagaccgaatcggatccggcaatagacaatcgctcgattgaatcagtggcgtggatggccgatgagctgcatcgccgcattgaggcgtatttcaatcaggataccgatacgtcgggaaatgctccagccacccgagtgtgggtgttccaaggccgggtgactgcactggcccgtaaagccagcgggatcgaagggcgcatccatttcgccggcgagtggaaaaagacccgtctcgacagacgacatcatgcggtcgatgccgctgtcatcgcgatgatgaaccattccgccgcacaaaccttggttgaacgtgattcgcttcgcctctcgcaatggataactagggagccggaaacgtggaagagctatcctttctcagaaggtcaaaagaaaacgcgtttcaaggaatggctcgactgcntgaatacgcttctggaccttctgaatgacgcactcgactcggaccgtgtttccgtcacgcgttgccagaggatgtctctcggcaattcccaggcgcatgctgcgaccatcagaaaaatgaagcatgtggagctttcctcgcctatggatgccgatttgatacgcaggacatccacgcccgcattgtactgtgctctgacgagattgccagagtattctccggagaagggtctgccagagaaccgtggtcgtgagattgtgctcaacggagggcatattcgatcgcctgataccatcgatttcttcgtaagtggtgctgcccaactaatggtgcgcaacggatctgcctaaatcagggattcgatccaccatatgaggatataccgttatcgaaagaccggtgcgaagtcgcagaaatacatgtatgggatgatccgagtattccatattgaccttctccatgcgtcgtctgatgatcttttcgcggtccagcttccgcctcactcggtttccgtgaggtacggggactagatggtggtccaagcgatacaagaggggcgtgcggagtatctcgtctatatcgtccctaacgatgatatcctgattatctacgaatgcgtccagatgattgactgcgagaaaatcggtgcatacgctaatgatttctgtggtaccgcatccgagcttgcgctgcgacgacgttgggtggttgtcggatctgaagtccgatagttggccttgcgtccctcatatctttccgaataatgactggataacagcggatcgcattctgaccggctctcaaatcatacgcgaacggtgatcggaggctacggatgagtcgtcgcggtatatatactggcatagtaccatcctgtcgtgagaacgaggactgcgctgggtgagtccacgttccggaccgattcctgcatgcctg

SEQ ID NO: 581 - DNA, 6517 bp, synthetic construct
  source 1..6517: mol_type = other DNA
  misc_feature 1..6517: note = Synthetic
cagcacggtggagtacgagcccgtgaacccgtgctcgtccctgagccggtcgtgcacgcgcttggcggtgtggcgctgcttgcgtggcatgagacggtcggcctccagccacgaatcaatcaacggcttgtagccgtcgagcaccgacttcaccctgcgcctggcgggcggtttcggcgagcagtcctccatgcccgcccacttcgcgaccgtgccccggtccacaccgagccttctggcgatctccgtatgcggcaggcccttcgcgtcgagcctcctgatatcttgctgtttggacatgggtatcgtcactgtcctttccttccccgggccggcggcaaccggcccctggctgctattggtttgcaacccgggaatctaacaggcaggacgaacccatggccgctcatatcatcacgaagatgacgacactgcggaaaaacagctgcacatcaagcggaaaacaccatgccactcctgcccaaagaacattgaacataaacaccagacaccgctggaccctcgcgtccggccactcgtcgccggcggcggccaggcagccggccccgccgtcggccaccagcacgtccggcatggggatccgtccgaacagccgccggtacgcggcgcggctctccgcgtcgcaccactgccagcccaacggctcgcccccgccgtcgacggcgatcagcatgcaccagccgtgcgcgtacgtgccgtccgtctcgacgacgtggcatacggcgccgtccgtcgcgatggagggcctgacgttccagcaccacgcgacgcggcgggcgaaggtgcggcggctcacgccgagcccggccgcggcctgggcggcggtgctccgtcccgtgatccacgcgaggaacgcgcggaactcggccatcctcgtcagatcgacgcgttgcgcgaccgtgccggcccggcaccggtcgcagtgccaccgctgcctgccggccgaggtgaaccccttcttgcgcatcgcctccccgcacagcccgcaccgtctcgccctcgccgattttctcctgcccatgcatcccacgacagcagaagcacgaaacacaaggaaagtcaaccacgccgcctgatcaacacgcaggacgttaaaaccccgcgacacgcgttgcacgacaacgccccgcaccggatttaagacccacattctgtcacttaaccctcggtctgaaatccgtggggcttgcatgtatccaagtggatgacgacggtatgccagtcaggatcctcaacgcacagagcgtgattcatgacggtggcattgatccccagaagaacaaggaagcaatcactcggaagaacatgtctggcgtggcacgtcgtactaggcgtatgcggcaccggcgtcgtaagcgtttggaaaagcttgacgcattgctccaacagtatgggtatccgattgttgattccaataccttgaccgagcctttcgcagaatggatgattcgagcgaaagcggcggatgaattcatcgcagatgaagagcaacgtaaagaggctatttccgtggctgtccgtcatattgctcggcatagaggatggcgcaatccgtatcatcgtacggagtcattgttgaacgagaacgattattccgaacagtatgggcagcttctggaaaagaccgaaagatatcttgaccgtgatcttccagaaggcctaacccctgcgcaaattattgaagaggtactgtccgctggttacgcggaagctctacggctgagaaccggatccgttaatcgggaagcacgtgaaggacttcttcctacaaagcttatgcaggaagacaatgctaatgaacttaaggtgatcttttccatgcagcatgttcctgagggtgagtcgagaaagcttctcttggcggtttttcatgcgcattcgcctaaagggtctacggaacatcgcgtggggaaagacccttttgaccatgaactgcgtgcgctgaaggcatctttggtatttcaacgctatcggattgtgagtatgctggcaaacttgcgtatcgcagaaaacggattccagcgacctctgtccatttccgaaaagggaactgtgtatgacagtctcaccgcaccatcaacagaagaaatcacttggtctgatgtggccgagatattcggttggaagcgttcacaaatcaagggcgtgggcagtctgaccccggatggggaggaacgtatcaccagtcgccctccgcggctgaactcagtgcaaagcatctttgaatgcaaagacaagaagctccgtgcgaagctgattgactggtggagggcaacggacgaatcatctcatgagtccatgattcgattgttgtcgaacacggttgacgtgggtaaagtccatgatgatccgtgctatgagcaggcaatcagttttatagatcagctgaacgatgaagagttgtcgaagcttgacgagataaacctgcaatcaggtcgtgcctcgtactctgaaggaaccttgcgcaagctcactcatcagatgctgaccacagatgacgatttgcatgaggctcgtaagcatcttttcggagtgggagataattggcgtcccgcagcggagaggattggaactccagttggtaatccgtccgttgatcgagtattgaaaatcgtcaatcgatatctgatgagttgtcgcaaccgttggggagatccagaatcggtgcagattgagcatgtgcgtgatgcgttatcttccgttgcgactgcgggtaggaacaagaaggcgtatgagaacacccagaggcgacgtacgctgtaccgagaagatttgatcaaataccttaaggacgatatgcgaattgcaagtcctcgtgagtccgatattcgacggttggaagcgattcagcgtcagaatggacaatgtctgtattgtggtgctggcattagctttaagacatgtgaaatggatcatattgttccgcgtaaaggaaaagggtctaccaatactcgggataacttggccgcagtatgtgcggaatgcaaccgtatgaaggggaagactccatttgccgcatgggagaaaacagtcgccgctcaagctcgcagagttgatatgaagcaagctttagaacgtgtggaagctttccttcctggtgcagatacttcctctgaacagagagctttcaagcaatcggtgagcatgcgcttgaaacaaacggaggaagacgaggcgattgataatcgttccatggaatcagttgcgtggatggccgatgaattacatcgcaggattgattggttctataacgcagatcgttacaatggcaaatcgttagcaaaaacagaaaaggcttttattgcggttaatgtatatcgagggcgcatcatcgctgacgcacgtaaagcaagtggtattgatggcgctattcattttgtgggagcccattacaaaactcgtctggacaggcggcaccatgcagtggacgcggcgatcatcgcgatgatggattcagacagcgcgcaaactttgtctgtgcgcggatctttgcgcgaatcgcaggttttttacgggattcatgatggaatggtgagctggaaacggtatccggaaccggggtctggctcctatgattcgtaccggcaatggtcgaatcgtatgaaaacgctgctggtcctgctgaatgatgctcttgatcataatcggattatggtttcgcagtggcaacgcatgtccttggggaattcaatcgctcacaatgcgacgattcacgcgttggataagtgtgaattgggaagtgccattgactcggatacgattcgtaaagcttccactcctgcactgtattgtgcgttaacacgtctgcctgattacgatgtggcgcatggtttgccagagaatgtagatcgggtaattcacctaaatggccagcgactcgacgcagcggatagggtgtcgttttttgcatcaaatgctgctcagattgccgtacaaggagggtctgcggatattgggtcggccatccatcatgcccgtatataccgttgttggaaagagggtgcaaagggcgacaagtgtttctacggtatgatccgtgtattccaagttgatttgctgcgaagtgctagtgaagatttattcactgtttcgttacctgaacactctgtatcaatgcgttatggcgaaaagaaaatcgtgcgggcgatttatgaaggtcgagaagagtatttgggttctctggtggtcggggaccttatcagagtggactttggggagcaaaaaataacggggcagatcgctgacatgctcaacttctttcaaaaggactgtacgcagtcattcaatgtatgcagcgattggaccgtcgcaggatttggagacccctcgaaattgattctaaggcctcgctttctctctgcggaaggtttgaaagagacggctgagaaaaaaggtgcagaagtgccagacggggttcagaaaatagtgagcggaaaaggatggcgtcctgctattgatcctttggcaaatttaaaaccgcaagtgctgagattcaatgcgttgggtgaaccacgtatgcgatctctgcatggactacccacttcatggaggtggtgcgaataagaaaggctgagacggatgcgaggaaggtatgcaaaatgcatggagagtaattgattgtacggaacttgagggacgaatcacttatgtccgtggacgagtcagtatacagccaacgaatgctgactcgcctacggaagtgccgcttgcccagactgctgtgatgttgctggggctgaaggcgaattgctcgactgcggcgctgtatgagttggccaaatatggtgtaagcgttatattgtgtgattggcggtccgttcccatttccgcaatgcactcatggagcgaaacgcatacatatgtcacggcacggcatattgcacagtcgcagatgtcgttacctcgaaaaaagaatgcttgggcgcgtatcgtgcagaataaaatacgcggacaagccgcttgtctggattctcaacatattgatggtggtggtttattgcgaggcattgccgcgcaagtaagatcaggcgatcccgcgaatgtagaaggttatgccgctagggaatactggaaacgagtattccctcgtgaccatgagttcacgcgcgcccccggaagtggattgggccgtaacgctcaactggactatgcctacatggttttatgaggttttgcgatcaaagcggttatatcagcaggattatcaccagtgtttggagtgaaccatcatggcagaggcaattactattgtctcgctgatgatctcatagaggtttaccgtccagcaattgatttggctgtatcgaatcttgacgaagacgacgttctctcggaccgtgaaatcaagcgttaccttgttgatgctgtgaatcagcagtttaacggtgttggtttgaccattccaagctctttgaatgactttgctcagcagtttggaatgtactgcgagaaaaagatcgaccgtcttgaggttcctctctttgaggggatctatgaaaatcgatgaggacagcggaggcatgtggtgtttggtgatgtttgatttgccggtgcgaaccaagaagcaaaggcaagaggccacacggtttcgtaacttgctgcttgatatgggctattcgatggtgcaattctctgtatacgctcgatatacgccaactcaggctggaaacagggcgacggtgaagatggtaaaagaaaacctgccagcgaaagggcaggtccgaatactgcatatcagcgatcaccagtggtcgacggcgctgcgtttttccagtcgtaaggtggatcatgaggaagaaactccagatacgcttttgcttttttgattggaaaatcgagcgtaacctattggaaaatagcccttcttgacgagctatcaagcttatcaagaagggtgaatgctaattcccagcgaccattggctcgtctacgtatacgccacaagcttatcaagaagggtgaatgctaattcccagcatttgaagccgtgtatgtcgtgcgggtgcaagcttatcaagaagggtgaatgctaattcccagcaaaggagttggcgatgaatccgctgaagcaagcttatcaagaagggtgaatgctaattccccgcttggtgtgacgttcattgaggttacatccaagcttatcaagaagggtgaatgctaattcccagcgctcatgcgggatgagcagaccatctatcaagcttatcaagaagggtgaatgctaattcccagcacgcgatagatgtcgagttcgcggacggcaagcttatcaagaagggtgaatgctaattcccagccgatcatctgcgtgccgacgccgttgcccaagcttatcaagaagggtgaatgctaattcccagctgcatagtaggcggtgttgccgtgagctcaagcttatcaagaagggtgaatgctaattcccagctaagatcgtatcgggtggcggtggccatcaagcttatcaagaagggtgaatgctaattcccagctaagaagc

SEQ ID NO: 582 - DNA, 6207 bp, synthetic construct
  source 1..6207: mol_type = other DNA
  misc_feature 1..6207: note = Synthetic
  variation 6166: note = n is a, c, g, or t
gttcgcaccattgccaggcgagcacctcgccgccgttggcgtcgatcgcggtcagcaggcaccagccgttcatgtaggtgccgtcggccacgaccacgtgatgcaccacgccgtcggggatgatgcgcggcgacaggtcccagcaccatgcgctgcggcggcggaaagtgcgcgcgtcgcattccagccgccgctgtggggaggcctcgaagccagtcgaggaataggcgcagcacggactcgcggctcctcgagcgtacggtggcggtcgtggtcgccctgcaggcgtcgcactgccagcgttgacgaccggtgcggtcatggccgttcttgcgcatcggcagacgacagatcgggcatttgcgggctcgtttcgatcgtgttctcatgacacaatccaacggcctcgaaccggtacgaaacgcggctatttacgccagacccgtaaatgacaccccgacacgcctactgccacaaggacaaacccgcaacataatcaacacaaaatgacctatatgcctacttattttggtatataggccaaaaagttattgctttagccttctggtcggcgctgttcgggtagtggctggggcgccgaaccgagcagccatgcgaggagcgcgtcgagctcagcgcggccctgacgccggtaatagcgcacccctcgcgtggcgtcgcaggcggtgcacatccaccgctgcgagccgaatcggtcgtgtccgttttccttcatcggcgagccgcacatctcgcagatcctcgccctcgacgattgcgttctcatgcctccatgcaaccgtgacgagaggaaggacggggcgtgaaattccacacgggaattccaacatgccgacgcgcctacagccgcaaggcaaacgaggatcttaagcaataacttttggcctatatgcctcgatttccgacacacctagtcaatgatttgcgtttttttagtgtatctggaactatgagttagagcgatgcagctatgtgatgcatctgaaggttggctgatgaaggagtggtgatgacgcctcggaattataccatcggcatcgatgttggattgaagtcggttggatttgcagcggtggaaatagatgtagatggcatgcctgtgcgaattcttaaagccatgagtgctatccatgatggtggtgtggatccgaatagtaaaaagacaggtgaatcgcgtaggctgcaggcggggattgcacgtcgcactcggcgtatgcgtagacgcaggcgcgcgcgtttggaacgtcttgacgcgaagctaaggcatcttggatatccgattgtggatgaacgtactctgcagggattcgacatgtggcatatcagggcgcatgcggcaacggaattcatctccaacgacgaggagcgcgcgtgtgctgtttccattgcgtgtcgtacgattgctcggcatcgaggatggcgtaatccataccatcgcgatgaatccctgctcggggtgcaggaaccgcggtctgagcagtatcaacagttgcgcgagaaagccatggagtggattggcggagaatacattccggagaatgcaacgcctgcgcagattgttgatgctgttctttcctcatcccaggggcccgcagtgcgcattcgtacatctgagagtaagaaacacgggcatcgtgaggggctgattgccgcccgtcttatgcaggaagataacgcttatgagctggagcgtattcttcgggtgcaacaggttccggatgatgtggcgcgttctctggtacttgaggtgttccggcagaaatcgcctcgcggatcggccgaaaagagagtcgggaaagatcctctggcgccgaacgaaccgagggcgctgaaggcatcattggcgtttcaaaggtatcgcatcaccaacatgattacaaatcttcgcatccaggacggtagcgaactgcgccgtctgacagttgatgagaagcagatggtttataatcggctggcatctcagaagattgaaaaaacttggtgtgggtcgatgtatgtaaggatctgggcatctcgcgtcgtgcgctaaaaggtgtcggtgctctcacctcagatggcgaggaacgcattgccagccgtcctcctcaattgacttcactgcagcgcattgctgagctcaaggatacacagctcagaaaagcgctccttgcatggtgggaaaaccatgaagatgcccaagaagcaatgattgcgctgctttcgaatactgtggatatcgacgcgaagcgggaggaacctgagtatgcggaggcggtcgagtttatcgaaagccttgatgatgctcaattgacgaagctcgatgccattgatcttcccgtcgggcgcgctgcctattctgtgccgacgctgactgttctgactgagcgaatgctgaaaaccgatgacgatttgcacgaggtgcgtaagatggtctttggcgtggatgacaactggcgtccaccgcaagccgccattggtgctcctctaggcaatactgccgtggaccgtgtattgaaactggtgagtcggttcctcatggatgcgcagaagcgctggggaaaaccggctgcggttaacattgagcatgtccgtgatggcttctcttccgaacctgctgctcggcgtgcacaaaaggaatatgagcgatatatcgacaaacgaactcagatgaatcaagagctggagtcagagctgaggaatcatttcggactggagaaagtgcgtccctacgatcttcgaagacttcaagcgattcagcgccaaaacggagtatgtctgtattgcggttgcgatatcaccttcactacttgtgagatggaccatattgttcctcgtaaaggcgccggatcgacgaacacgcgtaacaattttgcagcggtatgcgagatttgcaacagaatgaagtcaaatacaccttttgcggtatgggcgcaaactgagagcgcgcaaaagcacggcgtgagtcttgctgaggcaatcgaacgtgtgaagatgttcaatgccgagggtggcaccaaagctgatcggatattccgcactgaagttatcactcggctcaagcagacggaggccgacgatcccatagataatcgatcgattgaatctgtggcatggatggcggatgagttgcatcgtcgcattgactggtacttcaactcggatgggtatgcgggcaatctaaatgacgatagttcgggtgcgacaaaggtctgtgtgtatgcaggcagcctgaccgcagaaggaagaagagcgtctggcatagagggtgacatccattttgcggcagcaagctacaaaacgagattggatcgccgtcatcatgctgtcgatgcggcggtcatcgctatgatgacgcctgcagccgcattatcgttgaagactcgttcaaatatgcgaaggtcctggctggaaaccggagatgagagcctgcggacagcatggaagaattacccagcggaacaagatcctggatatgcgtcatatcagcaatggctggatgcgatgcgctccatgcttgtcctgttgaacgatgcgttggataacgatcgcattccggtcatacatgctcagcgatatgcgttcgggaactcaaatgcacatgatgcaaccgtgaaaccattgctgaggattcctctcaggagtgcaatggatgctgatttgattcgtagggcctctacgccagcgctttactgtgcattgactcggcttcctgattactcgtcaaagacgggtcttccggaggattcggcccgtgagatcatggtgaatggagggcattacacggcttcagacacagtgccattcttcgaaggcggaagtgcgcaaatccaagtgcagggtggatcggccgatattggtaatgcgattcatcatgcacgcatatataagtgctataaggagactaagaaaggacgcgtatatttctatggcatgatccgtgtcttccaaacggatttgcttcgtgctcgccatgaggatctcttcgcctatccattgtctccgcagacggtgtccatgcggtacgctgatccgaaagtcgctgaagcagtacagaacggtcatgctgaatacaaaggatatcttgttgttggcgacgagattgaagtgaagttcggagaggctatgagcgacaagattggagcatttgtagacttcttctcggaacagatgggtgtgcaggatgagattgtgcagcgttgggtggtcagcggatttgagtcttctcggcttatgaaactacgtccggcgatgctggctgaggaaggactcgatagaatcttcggaatatgtgatgtatccaaatcgatggaggatgatgtgcgaaatgtcttcgcgcgttcttggagattgtcggtctctcagatttcgcaacttgcattgcgtgtgattcgtcgtaactcccttggtgagaaacgcttcgtttccaaaaaccagatgccgacatgctggtcgtgtgactaatgaggtgatggactatggtgcagaacgcttggcgagttgtcgattgcacgcaactggaaggaaaactgaggtatactcgcgggcgcttgctggtgtgcccggcagagggcaataaagcggagattcctctcgctcagctagccgttgtccttcttggtcaacgagctagctgctctactgcattactgtttcaacttgctcaatacggcgttagcgttatgctttgcgattggagaggtgtgcctgctggggccctccatagttggagcgataccgcttctgtggttacacgacgacatcatgcacaggtggagatgagtaagccacgctgtaagaatgcatgggcgcaaatcgtcaaatccaagattcgtggtcaggctcactgtcttgatctacgcgatcgtcatggtggagaagagcttcgggctctcgccaagactgtgcgttcgggcgattccaccaatgtggaaggtcaggctgcgcgaaaatactggcaatggctttttgatgaaaaagagaagtttcatcgctcccctggtagcggcgaagggcgtaactcacagttggactatgcttacgcagtattgcgtggatttgtggttcgctccatatgcgctgccggtttggcgccgacttttggcgtgaaccaccataatcgagcaaactatttttgtctggctgatgatctgattgaaccctaccgcccggctgttgataggcaagtggccttgatggatatcgatgaagacggattgtctccccagacgaagaaggacttggtgaatgcggtaaatactcagttcgataagaatggtttaacaattcctagctccatagatgcattcgcgcaacagttcggtatctattgtgagtcaaaagatcgcatgttgtcggttcctgtatttggaggcgatgatgaagaaagatgaggagagcggcggcatgtggtgtctggtgatgtttgatcttccagtagggactagacaacagcggcatgaagctgtggtattccgaaatctgctcttggatatggggtatacaatggtgcagttctcagtgtatgcacggtatacccctacgcaatcgggtaatcgatcgacggtgaaaatgattaaggagaatctgccgtcgggaggaaaagtgagagtgctgcatgtcagtgatcatcagtggtcacgtgcactgcgatatgtcagcgaggagccggaaactgactcggaaacgccagaggtcctgacggttttctgattgtctgtttcctaggaaatgttgaaattctccccttcctgagcggctatcaagtctatcaggaagggaagaagctaatttccagccgtaagtggatcgccccatttgtgaaggcaagtctatcaggaagggaagaagctaatttccagcgcttttcgagcttggcttcgaccttggtcaagtctatcaggaagggaagaagctaatttccagcttcgcggttttgatggcgtcggtgagctcaagtctatcaggaagggaagaagctaatttccagcgtcgcctgagtgcgctagtccggttatgcaagtctatcaggaagggaagaagctaatttccagcttcgtcattatccaatggcggagtgcttcaagtctatcaggaagggaagaagctaatttccagcttgagcctgggcgatgccgacctgttcgcaagtctatcaggaagggaagangctaatttctggtaaagctatcacgaccaaggtgaataaga

SEQ ID NO: 583 - DNA, 23096 bp, synthetic construct
  misc_feature 1..23096: note = Synthetic
  source 1..23096: mol_type = other DNA
ttcagagtgtaaagaatggaattgcattgaagaattttcactaggtccatcaacaaaaggatccgcaaagaactggggcggtagcgaaagcgctttattccgatttaaagatattgataacaatgtcagcacattttgccgtaaaacggaaattcaagaactagataaagtgctaggtggtggaatatatgaaggttcggtaactttgttaggtggtgaacctggtgctggtaaatctaccttattatcgcaagtgtgtggccatatttcatccatctttaagcacgaccaaaaaatcccagtcgagcgtgaaaacgtactttatgtttcaggtgaggaaacagaagggcaaatctctaaacgtaatcgtcgattaggggtaaatgaagataacttcttcggtatgacggaaacaaacgtccatcgtatcattgctaaaattgaaatgtttaagcctgctttagttatcattgactcaattcaattattatatgatgaaaacttatcatcaaatactggttcggtatcacaaattcgtgaatgtactgcgcaacttacacgtgtagcaaaacaaagtaaaattccaatgatcttaatttgtcacgtgactaaaagcggggattttaatggtcctaaaattttagagcatatggttgacgcaacaattatgatcgaaggtgaaggccaatatcgttttatccgtgcggataaaaaccgttatggtaacgccaatgaaatcggaatttttgaaatgacagaaaaaggattaatttcagttgataatccgaccgcactttttattgataaaacagccgataacttacctggctcgtcaatttttatgatgaatcatcaaggccgtaacttattaattgatgtgcaggctcttgcttttgaaaatgagggaaactttgctaaacgggtagctgaagggattgaaaatagtaagattacaatcttatccgctttaatttcaagagcggtctcaagttcaattatcaagcaagatatttatgttaaagtaagcgggggtttaaaggtttctgatagtggagtagatttgccgattgcgttagcgattttatccgcaagcgtttatcgtcctattccgcctgatcatatcgcttttggtgaaattgggttaacaggcaatattaaaaatgttaagcaatctgaaagtcgtattcgagaagcggcgaaattaggatataaaacaattttagtcggcaaaaactgtcctgaaatcgatataaaaggtgtaaatattattcgctttgctcatattagtgatgtggctgaatatgtttttagcttaaaagactacaaataattgacattatgtaggatatgtagtattattggtatgttctaccttatttattaaacagataaaaatgcgttacgatttaagatttttatttaatataatggttattggttcgatcattaaatatcgaaaatttatcttgccgtcattgtcgctattgctactaatagtggctgagggatattttttatcaatgatcataaataaaaattatgaaactgtaagcgaggacgtattcgcttatattatgtttatagggctatttgtaataaaagtgggtaatatagtttatttaattgggttatacaaaaggagaaattagtggggttagttgattttattgccattccggtatttattagtgcgatatttggtatcgcttggttaatcaccttaaagatgacgaaatgacaaaaaggccgactgaaaagttggccttttatttttgatgctctacgttccaaagaagattaaaccaaaaatatatcaataattggttaacaatatctctttgcttgacgatctattcgtgttatgtgaactattagcgtaagagtagttaagatgatgtaaattataatgctgactaaaatctaacaataactgatttaccttacctttatgctcgataacattggataacgcccatctcacgccatttttgtctaaatgttctaaaacctcgcacaacctattttcctcatcattcgtccaatctttaaacccacggttgccgtcattataatttccggtagtaattaaatatggcggatctaaatagacgaaatcgccagctttaaaatcctgatttagtaagaatttatcaaaaaattgcgaactaaaagaaatatctcgcatttgcaaacgctcaataaaactaattaaacgttcacgtaatttatctgagaaatgacttttattacggccaaatggggtgttgtaatctaaattgttattaaacctgaattggtagttaaacgaataacaaataagcgtataaagcattagcgggcttttattggagttataatccgatcttaatcgtaaaaatccgtctgcgttttcttttgataaagaatacttgttaataatagcatcgatttcgcttaatatgttattaatatctttgcgataaaatgtatctaatattcctattacaaaatcatttaaatcgttcgctttataggatttagctgagacgttggcgatgatattaccgccacctgtgaaaacatcatatagtgtgtttatttcggtcggaaaaagaggaataagctgtggtagtaatttcgccttaccaccgatataattcattgggcttgagataatattatgcttttcttgtgtcatttgagcgccttttgaatatagaatagatattcatctactgtacgttttttaacaatttttgattgatagcttgcataattaatcactttacaatcataagtattcttaattccgatatttaatagtagctctgttatctcatctttagataatattccgtcagaattataactaataaaaatatgcgggcattggcaatccaacaaaagttgctctaatgattgtttagctttggctttagagctaaaaagagaattgcgttcgctattatcctctctaattcccgccttgccttttaaaataggatcatcatatctggcaatagttttaagtaaatgatagttagatgaatattggcgagtattgtacggcggatcgatataacaaatatcagcagtaacctgttttataacatcttcggcctgtcctaatagtgcaagattttcagatttattatcaaataacgtagggtgggtaagggtaagtgttttgtaagctctactttcccaaaattttaaaaatgctccgtaagttccggtcgtattagaaacttttgtgacggcctcaataagacaagcaataaggtagctttcctctgagtcggtaataagtttacgttctttccaatatttgattttgagacgaatagcgtcaattttatttgcattagattgagtaaagaaacatctctcattatccttgcctaaatcttcatcactgcaactatattcacgctcgataaaacctattgcattattggtaagttgatttaaataatccaatatatctaaattgccaatttcctgacaaattaaagcaaattctggtttggtattaatgcacacctcaccattggttaaatgataagagtaagtcataatatcattagtgataactttgaaatgctttttaaaacaaaaggcgacacttcccgttcctgaaaaaagatcgagaaaagataaattaatattcggattaactttacttagaataaaaggttcaatttcattgagtagttttagtttgcttcctatatagcgcatatattcgtcctgttagataatactattttaatctttgcgatagagtagaaaaagaaaacggcaacttataaagtcgccgttttgttgtgttctattctttttatttagtcatctgctaaccaaataatatccgcaaacacaccatcatagggttcttttaaattgcgctcatcaaaatccataatatattggttaatttttaatcttaattcttcgatatccgcttttttcttccaatgtttaccgtcagatgaataggtgataacaaatagtcggttttgataatgcttgcgtcggctattttggctttgatgctcatataaccagcgaattaaatcaatttcgttctctctagcatattgataacttttgccatatcgattgggaaatacagatgtcttatggtcaaattgaataccattaattaagaaatcgcaaataggattataacgatcgtcatcacggtcaatatctttatgtctggcaaatagaaactcagtgcattgagcagtccaaaaattaaaccatctggccaacatataatcttttaaatcgcctgttaaatcgtgagcctttgcttggatttcagaaaagcgatcgatattatagatataacgtgtcttatgatcccactcatcgttttgagtgcgagggaaacgataatttacattatttttgtagagttgtagctcattattaattttctgtaaatcggataatgagctaatacgtgaaattgaacgattaaaacctgacattatttatctattgaaaataaggtagtgcccaattatatagatttaataacagtttgacaaatactggccaatctttaagaaatttaccatccattagcgcccctaaattaagtggtacgactaatataaagatgaataaaggttgaacaatgtaagtgtaaaagtaaaaaaatgcagagcggagcataatagttttctcttaatatcgctatattttattgtagcaaattgttatcaaaagctcaaccttatggtatttcttaactaccgatattgattccccaaccttgaagaagaacaacaatttgtataacaagtggccaattaggcgcaataacgccattaaataattgttcgatatcaatgggtaataatgaaataaagccaattaatatacgcaaaatagtaaaaaattgactattgttagtattggtaggtaaagtttgtgcttccattaaattacttcctcatctctttgtttatcaaaatcagatttaagcaactccaattcattggaaagtttctcacatttgcgtttcttttgctcggtctctttgtcatattgggcaatagtgtcttttatatatctatcacgctcactttcccgtttattaatttctttataagctctcttaattcttttttcagtagattcttttctactataaaaatcgtcgcattgcatcctatttattgcttcttttgcatttttataagatcgatagcaatatcgatgaaaaacagggtttacgggcgataatttttgctcaacaattggttttggtaaataaatatagccatcatcgtcattagttaaaaattgaacgcaattattcaaggcgctcacgccataaccattcatataaatgatatttccttttaattccaaaattggcggattatcattataacgtaaaacactacttccgtgacctaaaatgtaaacattatcaaacttaaacgtcaacccatcaaaaaattcattaattggtttgatatttataagtcctaatcgccagctagtttcactaacatcaaacacattagataggatttgagcattataaaatttattatgaatagactttgaaagggaacttaattggttagtattatttcccccctgattcaaaaatccagccatattaacaacctgattattttctaaaaagtatttttcaggtaattggttaggtaattcttgacttgaggagttattatcctctaggatgttttcattaattagagattgaatgtattctctcgcattattgcttaagtaataaacactatcttttaagtcttttacacaaataaaagatgtgcgttttttaataacaccaagagtaatattataacgttcatcaacatttttaaattgggcataccaacataaagaatctcgatgtatttggccaatctttttataattaggcgcatattgtttaattatcgtgctgttaagcaaataataaccaaatgaactaatgtgatcaaaattaattttaggattgctcataactaattctcaaaaaattcaaaaccgccaattaaggcggttttataaaacacaataaactaaactactactgtaccaacattacgttcgtattctaatcgcaattcagatagctctttcatttttgcttttacatcatcgctgtttttatcttgacgggcatcaatttcttgctggagtttatcaatgtccttttgtaatgctttttgcatatcagccatagcgatttcaaatgctttgttataggcgtttgacagtggccctgtattacctaaatgatcgttttcgccaaaaaagcgatgcgacattaaaatgtttagttttttaccatagctaggaatttgttgtgattcttctaaatcaataacttgtccttgcatttttgtaatctgataatcatagccgacaccgcctgtttttgaagataaagtgtagccgtaacaatcaacataaggaatgcctttatcatcttcatcatcaattagctgggcatactctttgacagtcacaaattgcttaacaaattcaaataactcggttaactctttgttaccaaagcactcgatttctaaaatttgcgtatcataattataccgacctgatgtaagtgacgttccaatcactgattggcctacattaagatttaacataacaaaaaagtcggttttatggtttttatctttaatataaagacaggatacatcttgtgtcttttctgttccgtcagcgctttttaatggctcgcttgaaatgcgatgtagcgagaggtcaaattgtgttaaatctaaagaaagaatacggcgaaataatggtttcatcgattttgttgtaagcatttgtataaacctatgtaaattaatggttagttgttaactggtaatgtaacataaaatagtttagaagtcaacattatttattgttgaatgttaaacaatatcggtatcacctaaataatcttgatgcattttatctaaaatctcttttgtattaatcaactgattaaatctagcttcacgatattgatttagtaacttaaacatttcatctaatataatcatatctgtttccacgcctttttctagatcggcaaacaacgaatgtacctcattagtgtgattgatatttaaaagttcagcaatacggtttatcgagttgcgattacgagaaacatataactttaaattattacaagtaaacaattcttcttgagtaaattgattttgctcgtttaatgttggtgagtaatcgtcttttaatatatacacaatgcgctcgccgtcataataaaaacaaccgtcatctaaacaaaaatcgacattaaaccgatcatcatttttcttaaagacggagtaaaaggaattttttagatcgactttcattaaaagtttactagcggaaaccgtttgccagaaagtcatatcaaactcttttgattgagataaaaaattattagttgataatttcatttcattaaagctaatatttaaagtagataactcttttttccattccgaaatgaaatctttttcaatatgttttaacagcttaatctcatttttataaacattgctaaaacgcttcaaagaatgtcggttgtaatcgcaataataaaaagattgtttatcgctttcaatatttgctaaaggatggtgagaaccaaattcatttaaatcaaaatgataatgtgttgtcccaaattcgttcttatcaagcttggctttatttgaatatctagcgacccagccaacagtatttaagaataactctttaatatcatatttaacagaggttgaacattcgcttgaataggcgggagggatgaaatcaaattttgttgcctctggccaaatagtaagaatagattggcgagattcggattgaccagataattcctgatagtacaaataggctggcattaaatcaagaaaagtatcggggatcttatccaatgttcgtaaataatcaatactacgattgttctcagcggatagcttcttgtcatttggacgataatgttgaataacgctattaacaaaatcgacaacaaacaatgaatcgtctaaatataagatatgacaattctcgccaacatttaaaaacaataacttaccatctacaaaaagaggagcgtctttataattcattgctttaaggtgagcatatagtatttcaaaagcggtcataatttaatctaatttaggtaaataattcacattctatcacattgacatcctcctcgccctaaagggcggagattttctacaagcttccacgcgttgcgtagattactctcggtgggttcttgctgctgacccttgcgggttcacttgacaagcgcaccggcggtgtccccgcctgatgggattacgattggacgagggctcgtccacgttccaaaatgtttaacgccccaaccacatcggcattttccatatagccacattcgacacactcaaatttggcttgggtgggacgattttctttatcggtataaccgcaacaagggcaagttctgctggtgtggtgtggcggcaccgcgactaaaaaaccacctcgccaagcggatttatactccaactgacgacggaattcataccagccctgatcgagtatggctcgattgagtcctgacttttgtgcgacatttgtgccaggttgttcgactgtccctttggcggatttcgacatattggagacttgcaaatcttcaatataaatcatcgcgtggtttttgctgatggtattggagattttatgcaagaaatctttacgacaattcgcaattttgtgatataatttcgcgattttggcttgtaatttttgccaatttttactaaatttgactttatttttaagttgacgttgtagtttagccagtttgcctttgtaggttttaaaggcatttaatggctcaaaatactcaccatttgacagtgtggcaaaacggacaatccccatatcgatgccaatctctccgccttgatgtttggggatttcaacctcacactgggtttgaatactcacataaaaacgcccgcattttttacgcaccgtcacgtttttaatttcccccaccacattacggctgttgcgataacgaacccagccgatcttcggcagatacaggcggttgttatgttgttccagcttgcaaccttgcggaaaacggatactatcctttatccattttttcttaaagcggggaaaatttgcccgtttttcaaaaaagttgcaataagcacgttctaaatctttcagactttgttgcaacgcttggctgtgacaatctttgagccaaggaaatgtctttttccattgcgggagtagattcgcgattttcgtatagctaaacttaacgctattgtcttgcgcatattgcgtattttgccaatccaacccgtgattaaacacaaaacggctacagccacagaactgattcattctgcgggtttgttcgccattggcattagctcgaatttaaaggcttgtcgttttagcattagcaaagtttaagttctgatttttcgggtattttaccttaaaagagttgccaagtcaattaaaaattacccaaagaaccgaaaaaacgatttcaatgatttgccaatacatcggacaactgttggaacagttattctgtttgtgctttacatctccgccctgaaggacggagttttccagcacttggttgataaaagatagagtagcgaaaaaagataccccacaacaagtgtggggtagagcttttcgaaacgtaagtttcttgttgtaggtggaaaaatccactatcgtgtagttcttggctattatagcaataaaaagtatattgtcaagtatttttattgtttttctttagtgatttaatattattaatgcttaagaatagagcaaataatgcaatagtaaggatgattaattcataaaaatcaaataaaaagctttacaaatgtcaacatttatgtcataataaagtctgaaaagtaaaggattaaggatcacataaatgaacgcaaaaactcaaaactatattttagctcttgatctaggtgttgcatctgtaggttggggggtagttggtttagatgagcaagagagacctaattcaattattgatttaggggtgcgtttatttgataaatcagaagatccaaaaacaggtgaatctttaaactcagctagacgtgcatatcgtttgcaacgcaatgcgtataaaagtaaaaaagtattagtcaaacaagttaaggctttattgctaaaacataatcttttacaaaatacagagttatctcaacataacttatctcataaaacgtgggaattacgtgtaaaagcgttagataataaactttccaataaagagcttgcctctatcctaattcatattgctaaaaatcgtggtttccaaactaaagctaacaatggtgatgataaaaaggctggcctcgttttatctagtatttcaaacaatcatcaattacttaatgcttatcgttctgtcgctgaattagcggtaaaacatttccaattaaatgatagccatattcgtaataaagcaggtaactatacccattcgttcgctcgtcaagatattgtgaatgaagttgaattgattttcaaaaatcaacgtcagtttggtaatcaaaatgcgactatcgaattagaaaaagcttatatcgaattaattaactatcaaaaaccctcattaactggcgacagtctattaaaaatggtgggtaaatgcacatttgaaaaagagcaatatcgtgcgcccaaagcaagttattcggctgaacgttttattttgttatcctcattgactggattaaaaattttagaaaatggtgaacaacgcactttaactcaaagtgaacgtgaattacttattcaaaaagcctacgaattaaacaaaattacttatgctcaaatccgtaaatggttaggtttaagtgatagtgtgatttttaacttcttgcgttaccaaaaattagataaagaaagtgcggaaactaaagttttcgtggaattaaaacactaccatcagttaagaaaagcatttgagaatgctaacttagaaaatgaatggaatgttattgcgcataacggccaattattagatgaaatcgcctttactttaacaatctgtaaagaagaaagcgaaattcgccaaaaattagaaaaactaaacgaattaaacgataaagtgattgatatattagtaaatattagatttactcaatttatcaatctttctttagtctgcttaaataaaatcaatccattaatggaaatgggtaaaacttacttagaagcaacatcagaaatctacggtgcgtataaccgtaaaacaggtactaaattaaaccaattattgcctgttatccctgtatctgatattagtaatcctatcgtgttaagaacggtggcacaagctcgtaaagtcattaatgcggtgatccgtaaatatggacaacccgcttatattcatattgaaagtggtcgtgatttagggaaatcttatcaagagcgacaagaaatcactcgtcaacaagccaaaaatgcaaaagaaaatgaaaaactaaaagaaagattagcgaaagaatttaatgtgcgagcaacgaactcaaacgtacttaaattaaaactttatgaacaacaaaagggtaaatgtctctactctggaaaaactattgatagcaataaactgtttgcaaatggttatgttgagattgaccacgctttaccatactcacgtacttatgatgatagcgctaataataaagttttagtgttggcatcagaaaatcaaactaaacgtaaccgcacaccttttgaatggttaaacggtgcggataattcagcgcaatggcagaatttcaaatcattagttgaggcaagtgactttgcttatcagaaaaaacaaaaattactcacaaaacaactatctgatagtgaattcaaagcaagaaacttaagtgatactcgttatatcaacgcttatttatctaaatttattgcggataatcttttattagtcggcaaaggaaaacaaaaagtatttacaccaaatggacgtattacatcattcttgcgttataattggggattaactaaaaatcgtcaagaaaatgcacgtcatcacgcattagatgcgattgtgattgcctgtgcaaatgaatatatgcaaaaggaaatcacacaatttgctcaaaaacgtgaatgtaatgaattggcgatcaatgaatatgttgatattaaaacaggtaaaattaaacaacttactttccctgaaccttgggctggcttttcaaaagaattaactgcacgtgtttatagtgatgctccaaaggctgaattagctgatatgaaaaatattgatttaaatacggtaaaaccattatttatctcaagaatgccaacaagaggggcgagcggtcaaggccataaagaaaccattaaatcaattaaaaatacaggtgaaaaccgtagcgtaaaacgtgttgatttaaaatcattaaatcttgatatgttagagcgctttgttgcaaaagataccgaaaaagccctctataaatcattgaaaaaacgtttagaagaaaacaaaaacgatccattaaaagcattttctgaaccattaaaacaacgtggtaaaattgttcgtgcaatcaaagtgtgggatacgcaaaaatctggtttgcaagtgcgtaatggtatcgctgacaatggtgatacagtaagaattgatatttatgccaaagatggtaaaaactatatcattcctgtttacgctcatcatattgctaaaaaggtaacacctaatgcaatgatcacaaatggaaaaacagaagatgagtgggataaattagatgatacctatcaattcaaattctcattattcccgaatgatttaattaaaatcagtaataagaaagaaagctttatcggttactataaaggtgcggatagaagtaatggtggattaactttattaagtcacgattgtgttgatgcaaataaaatcaaacgattcggcccgaaaacggcaacgattgaaaaattagaggttgatgtattaggtaatgtgatgagttttaaagcataatgctagaataagctttctaaagtttacaaaaattaaaaaatgccaaaaagaaaagacagtcaaatgctgtcttttgtatttaatatcaagtaattagcttcttacttagatagagaattacttaaacagagaacgggtatttaataggcgggtgatattcatagccgactaattggaagtcgtccattgttacccacgtttctaaatcttctaatgttttaatatcaggattaatttctaatttaggcgatgcaaaaggctctcttaatacttgctctttcatcggctcaatctgatcttcataaatatgagcattaataattttatggaacgcttttgccggttttttgccggtaatttgagacattaacgctaagaacgtaaacacttggatttggttataatttaagcctaaaggaatatcgcaagagcgttgatagctcgttaagtatagctcatcgcctaataaagaaaaggtatgagtatgcatacaaggacgaaggcaacctaattcaaattcacctgggttatagaaagtgataatttccccacggtcatcaatcccatttttaagatgattataaacttttttaagttggtctaaatgagttccgtcaggtctttgccagcttcgtccttgaacaccataaacacgccccatatcatcttcgcctttacggttcgggttattaagccacgcttcattcaggtttgcattagcatcccacgtttttgtaccaattttacggaaatcagcggcgttatcataaccacgaatataaccgataatttcagcgattgcgcctttccagttgctttttcgggtagtaatgatcggaaactcgttatctttaacgttatactctaaattggcatcaataacagttagacaatttttgcctgtacgttcgttatgaactaatacgccctcttttaatacacgattacataaatctaaatactgtttcatagtctttttaatatttcctttgctgtggcttctattgctggaattgcaacagagttaccaaattgtttataagcttgtgtgtcagatacggggattttaaaagtatcggggaatccctgtaatctcgcccattctctaggagtcattttacgcactccctctttatttaccgcaccttttattttcgtagtcggagtgaaatcggtaatgcgatgatcgataactaaatttcgctctcgccccataccgccgaccattactgcattagcaataccgtcattaggaataatttgatagccaaatccgtgacctttactttggtgtaaagatttatgatgttggagatacttataatattgatcggataaatagtattttgtaggaacggtatccttttctaaaatgctttcaatcgttgccttttgtttgagtggagtagggtaagtaaattctttaatccctaaatcctttctaaatccgacaatgtaaatacgctctctattttgcggcaatccgaaatcttttgcattgactatctttggatcgggaacaaaataatttaagtcatctcttaatgtatttaaaatagtcgatagcgttttgcccttgtcgtgattaattagccctttcacattctctaggaagaaagctttaggttgatgacggcgaataatttcggcaacctcaaagaataacgttcctcttgtatcttcaaaaccgcctcgtttgccagcaatagaaaatgcttgacaaggaaatccaccacataagatatcaaaatctggaatatgagattttgtttcctctaaggtaatatcaccatacggcttttcgccaaaattagccaaatacgttttttgtgcattgctatctatttcactcaaaaaaaggcacgttccgcctaaattttcaaatgcaattcgaaaaccgccaatacctgcaaatagatcaataaaagtaaaatttttcatagttaattttaacgattggtatttttaaaaatgaaagacaaggggtaaaagatagattgattgtcacaaaattgatcgaaataaaaacgataaaatatttaataaaatgaaagaaattaacctatattaaaacaaaaatatgaaagtttattaccaatacgcaaaaccatcaaaagaagcacttgaaaataaacgttttaaactttatctcgatgatgtcgaagatgggattaaagcttataacgaccataacggctaccaaagaacaactattccaactaatgctgataaaatcattgtagtgtcaaatattggcattaatgaggatgacagaaaagtaattcaaaaagcgattggtgaaaagcaagataaagtagaggtgatctattttgataagattgctaaaaaccacggatttgaaaaatttgccgaatcaacacgagatcacattactgaaataattgaaaaaatcaaagatttatggtttattgaaaaattgatcgctaacttaaaacgtgatcaagagcaattatcaccaatgccattaaaagtgaaaactgaacaattctttaaagcatatggccttagtgattatcatagcattgcgcgtgatttcttaaatcaatttggaactaaatataaaaaagacgatcttgatgagttaaaacaaaaactcaaagagaaaattaaattacgcactcataataaacgatttgtcgaagatggaatggcttatattcatagccgtgaaaaaattcgtcaacacgaagaagcggaattaaaagcaaaaattaaacagcttcaagagcaaggtaaattagaaagcaagatttttagtgaaactgaattagatccgtcatcaactcaatttgctaaaatggtggcaaatttaaatagtgcgggcgttcaagcaatgattaaagaagaggcgttacttactaatgcggaaaatcgtgaacttgtgcaacaaatgcgtcaagaaaacactaatgataaagactacgatctttaattaaataaaatgatagtaaaaaagagaggtattatacctctctttttatattaattaccaatctgattctgaagagcgaacattctctaaacgataataattaagctttctcaatacttcctctctattatccaacaatctcgttgatgtaactttaacttctaatggaaatacatcgtctataatttccttaaatttatctaacttaattcgcgtaagtcgaggacttgttggttttacctcatataaatattgagcgaaatgtgaatcaagcttatcagataattcgattcgcttatccatcggtaggtttttaaaaaattcagactcagataaatatagtgtttcggctccagaattatttgatactatagatgataatggaataacaattagcactgtaagtagtgtctcagccataattaatctaggcaaattacgttttaaatctaatttatgtttagaatctgtgcgaattttccgatcgataaaatagaacgcaataaagataatggatacaatccaaagcgctaatggtatttttaaaaatgttttatctaataaataatcaaaataccatttatctataaaggtaagatgaattacgttctctttaaaccaatccattgcctgaatacgatattcttcatttgtcatttttagttacctatttttgatgtcttttgtcataaagtaatttaatgcgctcataattatcttgaagaattgcatctgttttaaaatactctttaagtaggacatcattgcctgcaatataagcaacgtcctttgcaatatttttaaaatcgatataatagatttttatcaattcgtcagatttataatcttcgggaataggtttatcaccgatttgttttaagaaatgttcatctaattttgtttccaaataaatttgctgatttggcgatagagattgataaactttggataaatacaatgaacttgtatcaactttagcaaaatttgtctcaagactcccaaaagcaaatgtaatagcagtaataacggtaacgataaatgaaacaaaacttaatatatcaaatctatttttgttttttgcatctgacgccttttcacaacgatctgtaaaaaatatagtcaatgccaccaaaagaaataaaataaatagagttgacatccaccccgccctaaagggcggagattcctacaagctccacgttttgcgtggctactctcggtgggttcctgctgctgaccctttcaggttcacttcacaagcgcaccggcggtgtccccgcctgatgggattacgactggacgagaactcgcccgcgttccaaaatattgatcgccccaactacatcggcattttccatatagccacattcaacacactcaaatttggcttgggttgggcgattttctttatcggtataaccacaacaaggacaagttcggctggtgttgtggggcggaacagccactaaagccccaccttgccattgcgatttataatctagctgacagcgaaacgcgaaccaagattgatcgagtatggctcgattgagtcctgatttctgtttgacgtttttaccaggagcttcaactgtccctttagcagattttgacatattcgacacttgcaaatcttcaatataaatcatcgcgtggtttttgctgatggtagtggagattttatgcaagaaatctttacgacaattcgcaattttataatgcaatttcgcaattttggcttgtaatttctgccagtttttactaaatttaatcttatttttaagctggcgttgtaatttagccagtttacctttataggttttaaaggcatttaacggctcaaaatactcgccatttgataatgtggcaaaacggacaatccccatatcaataccaatctctccgccttgatgttgagaaatttcaacctcgtactccgtttgaatactcacataaaaacgcccgcattttttgctcaccgtcacatttttaatttcccccaccacattacggctgttacgataacgaacccagccgattttcggcaaatataaacggttgttatgttgttctaatttacatccttgcggaaaacgaatgcgctcttttacaccttttttcttgaatttcggaaaattggaacgtttttggaagaaatttttaaacgcacggtctagatctttcaaactttgttgtaaaacctgactgtggcaatcttcaagccaagggaatgcctttttccattgcgggagtagttttgagattttcgtataactaaacgtaacgctattatcttgcgcattctgccaatccaaccctcgattaaacacaaaacgactacagccacagaactggttaattctgcgggtttgttctccgttgggcattatctcgaatttaaaagcttggcgtcttaacattggttaggtttgcaatctgatttttctggtattttagcttaaatgagtgatcaagtcaattaaaaaattacccaaagaaccgaaaaaaacgatttcgataatccctaatacatcgggtcatcagaaatatccgatgggtaagccacccaacccttttacgccttacatctccgccctaaaggacggtactgcacggtgtcaataaaaatatgacaataatttagttagaataggcgatttcgtaaaattatgatatattacgtcaatgaatttaacttgagattttaaagatgaataaaacagtcaaaattattatggcaacagctttagttggaatgttaagtgcttgtacgtcagtgcaacgtttttctacggatagaaccattgctacatcgccaaatgagccgacagcaaatttacgtgtcgttactaatacagatatttatgcgattcctaactctacctgtatttcattagagaaagaggtgtacgcaattaatagattaagtgcgcgtgatccagatagaggttggtttgaaaaagcaaaatatcatatcaatactggaaataagattgatatgcaatattccgacatcaaaaaggatatgtcattagaagatagaccttatgtggtacaagagtataaaattcctgctggcaaaccatttactttattctcgaaaaaagaaggcgaaatgatcgatttgttgtttaaggatagtaacgatgtttatgcttttggtgggcactttatacctgaaaaggataaaaactatgaattgctctttaaacgtaacgttagtagctatcaaacagcaagacaatacataacggattacagttatgttattgtgctgtatgaatatcaaaacggcgaatgggtgagagttaacgaaaaaactaattattcgaaagcgtgtaaaaattaaaaatagaaaaggaagataaacatcttcctttttctttatctatatcagtgaattattgattatcgctattcgttttattatgtgattgacaacaattattctttacgataacggaatagataatctgctttgtatcaatatacgggagcttatctttgaaaattccatcatttttactctctcgtgctgtatttttaaataagattagctcatcaattttagtatcaagtgtctctttttcaacatcatttaattgagaataaaaaggtgagctttctatcatactcgttgttacgaacgctctggacgtataaaacagtccctcgaaaatacaagttaatgctaacgccaagcaaactagaaaaataggttgaattttctttctagaaaatgtgaaaaagcccaaaaaccaaataagggaaatgatgaaaacgccataataaccgttataagctggatcgatataattcaaataaaaggtaacaaaagaattgaaatccaatttatccgaaaaccaatccattgtttgtttaaaaagttcgatattttccatctgctatcctaataatttaagtaaactttatctaacgtatatcgaatagtacgctcaacctgataatacaaaatgtcataatcatacttatgaatatggtttaatttaactgattcatcaatctttctctcaaagtattctttttgttctgcggacatatgttcatataaaggaatctgactaatcgtttcaacaggaacttcaagcttaatgagtgtggcctgcgcatacacaataggcacaaagagtgctaaatttgtgtaaaccaaagcggttcctatttgatgatcgctcttattcttttttcttagaaatataaataaaaatacagtaggtaataagaaccataaagttaacatcaacgcaaaatgattagcgccttgactatcaaaataacgggcgtaaagcgttgcgataaaattaacatctaatttatctaaaatccaattaattgattgtagatataattcacgttcggtcatataaaaactccaaaattatttgacgtcattttatcttaaaaatgagctgatgtcaagatattaaaaagaaaaatggacgctattaacgtccatttgatttagtttgattttgttatgtttgctattttgctaattctgattagatctcgccattgtcagccattcgttttaacacgccagagatatcaaaataatcaaacgtataataggtgcgtccattatcatcttgcttttcttccgcatattctttcatatatgagcgaaataaatcttgctgttgggcatctaattcttgataaaatggcgcattcagtaatgattttgctcgataatctgtaatatacaggcctataacaaataaagatttaatcgcaatggagtaaattaaaaccaaaaataaaggttttttaataaaaccaaccaaattagcaagcttctgtaatctctcatcttgagttttgttaaagcttttcattatttttaggttgaataaagcaactaacacaaaaccaataaacgtccacgtaaaatattcggcgttaatgtcgtactctttgatataaaagaatcgagactgttcctgcaaccactctaaagcaggactaatcgcctctggtgatgaaaaaacagttataaaatcaaaatttttaagaaaactcataatatcacaacttataaatcattgattagttttagtttttcatcagctaaattttgtttttcatatggtttatctttgatagtttcaataagccagttagtcacatcttttaaattaggtccacgctctacaatatagttaaacttagattgatttgaatagttcttctcggcatttacaacatagttggcggctaactttttaaaatagttccgttgttcatcatttccgtcttttaatataggtagctcgtcgagttcattaaattttatataacgagaagaaaaggcggcatcaaaagcaagctggacgccaatactaataatgaaagtggtggtgataagtgcaaatatcccgccaaatataatttgaaaaagtttataaatgtttttaggtattttagttctgctttttatagaacgattttcatcctgttcttctaataagaacgaaagtgctaaaaacaaaaggataaagggagtaatataataaatagaacgaaggctagatcgccaaattcactagaattggtgaaaaatatccaatctttagctaatgttaaaaggggtgtattttgatataagatgtctaaattctgtgatagaaactctttgtcagtcatagtaataatacctagtaaattagaaataacttattttatactaatcaaagggtatgtgcaataaaaaagaggggttccactctttttctacatatcatcaattgatttaatttgcttatctataaattcttcgcttttgtagggtctatctttaataaggacaattagccaatcagatacagtgtctaaatctgggccacgcattaattcctcaacaactccatcaaatcctttctcgcaaggatagaggcagaattgcccaacaccaggtgtatagttcaatttaaatgaagtgttatatttcaccccaacagcataaacatatcctttaatagagaatttaaaaatctctttttgttgctgttcgccactttgcattaatggtaacgtttttaaacgatctagtgtaatgtaattagtcgagaggctgtaaaacgaaattaaataaagaaaaccatacataaaagatgtcaaaatagtggaggcaaaaatagaaccgaaacagcccccaacaaaatcatttaattttcttgttgtggactggctattggaaacatcctcttttttgcctgcatttcggacaaatttataaaaataaattaaattgaggataaaaaagataccaaagataattttgattgtcgttggtattaaattagcaccaaacataatatcttttactatagaaggaaaccataagtcctgcagtaatacatctaaattttgtgagagaaattcttgatctgtcatactaatttctaaatagttaataaaatactcccattctaccatagtcttataagatgatcaaataaaaaagagagcggtaagctctctttttaagtcatcaaaataaaatattatttcaacatctcaattcgattaatcattgtatctgcgtcggacagtaatttagtcatctcgttacgtaaatcaattgttgttttcttcttgttcggctcaaattgaacgactgttttgattttttgaacaagataagtataaggtttaagaaccttttgattgtcagttgaggttggtgcgtcatctaatgcaaagatgagtgttttcttcttcttaaatgtacgttccattacatctaatttttctaataattgctctttaacacgcacatactctttatcggtttctgcaaacttaaagttttcaataattggcgcacgttcatcaccagcattatcgtatgcacctaataataagtaaccgtgttgaacgccattacaagcgacaattgctttagtaaccgtattatcagaattagactcatcttgtttatttttaataatagcccctgatgctgagtatggagtaagagttttggctgactcaaggctatcaattgcaatcaaatcaaagttttga

SEQ ID NO: 584 - DNA, 23483 bp, synthetic construct
  source 1..23483: mol_type = other DNA
  misc_feature 1..23483: note = Synthetic
cgtgtttagcgatcttagcggcattttcatatccgatgtagcggttcagcggagtaacaatcgaagccgaagattcggccagttccaggcagtgctccgggttcgccacgataccgtctacgcagcgctccgctagcagacaagcgactgctcccaggcagttaatcgactctagcaggtcgactgccattaccggcagcatcaccaagaggtcaaagttgccttgtgcacccgcgaaagcaatcgtctgatcgttaccgattacctgggcagctacctgcacggttgcctccggcaataccgggttgatcttgccaggcataatcgaagagccgggctgcaagtctggcagggtgatttcgccgagtccgcaacgcggcccagaagatgcccaacgcagatcgttggcgatcttcacaaaggaaactgctactacccgcagcgcccccgacatttctaccaaggaatcctgcgcggcttgggcttcgaaatggttatctgcctgacggaacggtagatccatattctcggcgattagggcaatcactcgctcggagaaaccttcgggagtgttaatcccggtaccgacggcagtaccacctaaaggtagctctgccaggttcttctctgcgtcctttacccggtcaatgcctttgcgtacctgcgcggcataacctgagaactcttgccccagcataatcggggtggcatccattaggtgggtgcgccccgccttgacgatgtttgcgaactcttcggctttcttttctaggctggtagccagctgatccagtttcggcagtagggcgtgctctacggcctcataagcggcgatatgaatggaggaggggaacacgtcattagaagactgggaagcgttcacatggtcattggggtgaactttgctgcccttaaatccggttgccagggtagcgacgacctcgttggtgttcatattcgaggaggtgccggatccggtttggaaaatatcgatcgggaactggtcgtcatgtttgccagcgataacctcttcggcgcctttaacaatggcgtcacgggtttcggtatcgattacctctagttcggcgttagcaattgctgcggctcgtttgatttgaccgagggctgcaatatggtggctggaaagagtgcgacctgaaatcgggaaattttctaccgccctttgagtttgggctgcgtagagggcgtccttaggtacccgaacttcccccatggtgtcatgttcaatccgatattcttcgctcacgtgtagctcctttgatgttagtgataaacgattacttagctactagcctacctgggttaggtgcgaagaacgtcctaaaaatccggggaaaagtcttgaaatttgctgcaggtgtgattttagaggtggtagccccttagactggaagtaacgacagaaagtgggagcaccatgagcaaagatgcctcagacgataaacctaccgagtacctaccggggggagcgatggcaaacgcctacgttcctcggggacgtcagactaatcgacggatcactcggcaggtagctcagcctgatgttgacagcggcgcgcaaagaaaaatctcggtaccgaatccgccggcaggcgcgccctcggcagttcctgatgccgctgccttagccgccaatgctcaaacggaagcgattcctaaagctaatgctcccgccgcaaccagcagcggctatgttccttcccatgcggcgggtacccgggtacttgacggatccgggaattcctatccggattcgggagcagctactacccagctgcctccgattgatcccgctgctgccaccccgcaggtagattcttatccgcaaggggttcctcccgcctacgatccgcaagtcgacgcagaaaaactacgtgaagagcaagaatacgaggaagaacgcgccgataaacgccgcctgttgaaagtagtgggaatcgtgactgcaattgtggcgctgttaacgggagcggtagtcgtagtggcgctaatgatttcctctcgacaagtcttacccccggcagagcaagaaaccaccacttcccaaagggctactaccagttcttcagctccggaaactacccgtagccagcctcagacgcaagagcccacttctagcgagccttcacaaactcaaactaccagccgagagccaacgtctacgaagactactggcaccacccggcctactgcggaaaatccaaccccaccagccgaacaacccaccggaagtcagcagcccagcgagcagcctagcgagcggcccgcccccagtgagagcaactcccaataaaagcgagaggacgcgcccgccttacccaagtagttaaaaataattggtaaggccggcgcgccctaaggtacgacggttttacttagcggctttactggcgctaaccgctgcccctacaatcccggcggtgttgcgcagttccgccggaacaatcggagttttaatatccaatagcggcaagaacttctcgtgtttacgagaaacgcccccacctactacaaacaaatccggactaaatagtttctcgagttcctggtagtagcgggtcaggcgcttcgcccatttcttccaacccaaatcatcacgtttacgcaccgaagcagctgctcgagtttctgcgtcatgaccattaatttctatgtggccgagttcagtattaggcaccagcaccccatcaataaacagggcagttccaatcccggttcctaaggtagtaaaaatagtaaccccaggttgatctttgaaaacgccgtatgcttgctctgccaccccggcagaatcagcatcgtttagaactgtaactgggcgcccgaacgcattagagaacacttccgctgcgtcacaacctacccattcttgatccaggttagcgatgaaaggaaccagccctcccggaaggggagccgggaaacaaacccccaccggcacgtcctcgggaaggtcgaaatgagctaggacatccgccgaggtttttgataccgcttgcggggttgccgggtagggggtttctatccggaaacgctcctgggttagctctccggtctctaaatcgaccggcgctcctttaactccagatccgccgatatcgatgccaaatgcgatagccatttgttactccttgctaggcagagtcagtatttctgcgccgtattcagttaccacaacggtgtgttcaaactgggcagttcgggaacgatccttagttactactgtccagccattgtcccattgttcccactcgattgtacctaaagtgagcatcggttcgatagtgaacaccattcccggctccattacggtgtcgtaggagggtgcgcaatcataatgagggacaatcagaccggaatggaaggcctctcccacgccgtgcccagtaaaatcgcgtaccactccgtaacgaaaacgcttcgcgtaagcgctgattacccggccaataatgttgatttcgcgtcccggtttcaccgctttgattccgcgcatcatggcgttataagtgcgctctaccagcagctcagattctttatccacctgacccacgctaaacatggcgcaggtatctccgtgtaccccgtccttgtaggcggtgatatccacgttgacaatatcaccttcctgcagcggcttatcgtccgggatcccgtgacaaataacttcgtttaccgaggtacacagggatttcgggaaacccatatagtttaggcaagaagggtatgccccttgagaaacaatatactcgtgaccgattttatcgagttcatcggtagttatcccgggtctaattgctttaccgaccgcgacgagagcgtcggcagcaatccgcccggcagcgcgaattttttcgaccgtttcggcggatttggtatcggaagcagttaccttttcggggccgtcatggaaaagatattccgggcgctcgatattcttaggtacctcaacctcggggctaatctgtccggcttcctgatttcccagcggggcacgttcggcaagttctttaaggctaagtcctggatattcattcataccgctattctacgcgttcaggtaaatgttccagatttcgaatatcggattccgtggttggggtagctggggtgagggcgcaggcaggcatagcagagggcgcgcagaaaatgcagaccaagctagtgaaactgcatccgtagcaaacaaaaataacggcagtgaaaaccctagacagactcgcgagccacgtattgcaaaatctgaccgctgggggctttgcctaaatctagatcgccgccctcgcgctgtgcgatatgtattaactcttgataggccaaagccggggtgtctaccaccaccgacgctaggggtggacgggaaacctgtcctgagggcgaatcgaagcccccaactaccgaagcgtcctggggaaccatcttgccgcattcacgcaggccatgaacaaccgccatggccgccatatcatcaatcgcgcagaacccatctaaaccaggatgcttttgcagcgcccccaacagataggaaggaatgttctcgggatcttcaggaagtaccagttgggtgggggcagaaagtcccgccgcctggcaagccatttgtgcaaagaagtagtaaacggttgcgccctcttccggatattttccgcgccaatgcacgaaagccaagttacgccgattacgggatgccagggcatctacctggattttcaccatttggaaggtcattaaattggttggattttgccgatccttgccctgcgttaaggagtcaagaaccgtagccccacactgttctagctgctttagagtgttctgatctaaaggcaggagcggtaaaactgccgcgtcggtttccttaatcgtggaaatcagattttccggatgatcttcgaggtgaacggtgcaaactacactaaccccagcctgggctagcagcaccgtcatgtcgcgcagcaaagcagagttaatggcgccgatatcaacgcagggcacaacgagatcaactttcgtttttccagccagggtcgccaaaatgcctcctcaattacaagtgtgattccattctacatattaatggcgttcataccgataatcttggttttttaatgcgccaaaaggcgtgaaatctctagggggttcgcttagtgggcggaaattagccctgaatttgctcggcaactagagtgtaagacaaaagggaaagaattatttaagaaaggtgaaccagtgtctgaggcgaccacacctatttctccgttagatcaagaggggatagctcgggcagttgaggccgcgaaagcggatttctctgcggcgggctcactagacgaattaaagagggcgcggggagcgcacctgggggataacgccccgatcatcctggctaaccgggaaatccgcaacctcgaaaagaaagacaaagcccaggcgggaaagaatctgggcggcgccaagaaacagttgcacgccgcttatgaccagcggcgctgcgccctcgaaaaggaacaagaagcccaaaccctggcggcggaggcgctagacgtaacccaagtggcaagccggtatccgcagggagcgcgccatcccctggaaaccttgatggaagatatttccgacttttttgtgtctatgggttgggaaatcgcggaaggcccgcaggtcgagcacgaatggttcaactttgattccctcaacattgacccagatcacccggcgcggcaagaacaggacaccctctatattgatggacgttccttgggaggagaaaaccccggggatggcaacttggtgttgcgtacccacacttcgccggtacaggcgcgagtgatgctttcgcgaggagtcccggtctatatcgcttgccccgggaaagttttccgcgccgatgaactagacgccacccacaccccggtatttcaccaggtagaaggcctggcggtggataaaggtctgactatggcagatctgaagggtaccttggatcatttcgcacaatccatgttcgggatggaagcgaaaacccggctgcgcccctcgttcttccccttcaccgagcccagcgcagaaatggatctgtggttcccgcaaaagaaaggcggacccggttggatcgaatggggcggttgcggcatggtcaacccgaatgtgcttatagcctgcggaattgatccggatgtgtattctgggttcgccttcggtatgggcattgaacgcaccttgatgctgcggcatggaatcaccgatatgcacgatattgtcgagggcgacgtgcgattttctaaacagttcggtactaccggaaggggtaactagcaatgccatttgtagcgcttgattggctcaaagatcacgtcgaggtagtgccgggcacggatatcaaacagctttcatatgacctggtgaaagtaggtttggaagaagaagccatccacccggcctcggtaatcggacccttggtggccgggcgggttttgaccctggatgccaaagagcaatccaatgggaaagtcattaactattgccgagtagatgtaggcgagtttaatgaccgtcccggtgaaggcaaagagccctccgagctgcccagtcgcggaattatttgcggtgcccacaactttaaagtgggagatttagtagtggtgtcgttgccgggagctgttttgccgggtgattttcagattgctgcccgcaaaacctatggacatgtttctgacggaatgatttgttcccagcgggagctggggattggcgatgaccacaacggcattatcgtcctggaacagttgctgccagaaaaggccgcagccggagagctacctgttcccggagaatcggtgatcgaactgctgggattgggggaggaaaccctagaaatcaatatcacccctgatcgcggctactgtttcgcgatgcgcggggtggggcgagaatatgctcattccaccggcgctaagtttaccgacttggggttggcggaaaaccttccttccggggcggtcccgaccgtcactgaggacggatttgcggttaaagtcgcagatgagactgcggtaaacggcaaggttgggtgtgatcggtttgtcacccgcattgtgaccggcgttgacgcgcaagctgccaccccggactggatggtgcgccgcctagaacaggcaggcatgcgttctatttctttggcagtcgatgccactaactatgtgatgctggatttgggacaacccctgcatgcctacgacttggataaagtgtgcgggccgattgtggttcgccgggcgaaagccggcgaaaagctaaccaccctcgatgaggcagagcgcaccttagatcccgaagatctgctgatcaccgactccccgcagggagaagcaggttcccgcgtgctcggcttggccggagtaatgggaggtgcctccaccgaggtaaccgcagatacggtgaacgtgctggtagaagcggcgcatttccagccgacttcgattgcgcgtactgcgcggcggcataaactacccaccgaagcctctaaacgttttgaacgtggcgtggacttcgagctggcgccggtagctgcccagcgagtagtggacattctggtggaatacggcgggggcaccgacagtgggcgggtcagcgacctcaataacactgagcctttcccggaaatcgtaatgccactgcatgaaccggcgcggctgaccggagtggaatatgatcaggaaaccatcacccgcctgctaaaagacgtgggatgtgaagtgcgggttgaggacggcaaagttattgcccagccgccctcttggcgcccagatttgaccgggccggcgcatttggtagaagaaattgctcggctggccggctatgacacgattccttcgcgcaggccgcgcccgattgctggacgcggatacacccctaagcagcaggctcgccgagatgtggggcgggcgctcgcgcaaggcggcttggtacaggtgctttcttatccctttatttccgaggatgtgtttgacgccgaactacttggagaaaaggatgtgcgccgccaggcggtgcgggtcgcgaatccgctggcggatgatcaaccgttgctgcgcacctcgctgctcgatactttgctgggcgtagcccagcgtaatatcgcgcgtggtaatgagcagtgcgcgatatttgagaccggtttagtgacccgaggaatgggaactgaacttaccggttccttcggggtggcggggaaaccggatcctgaccagcagcacgccctcgaaaaaggagttccttaccagccagaacatattgctggggtgctagtgggacaggcggaactagccggcgcgctgggtgcaggccgctcctatgattgggcggacgcagtggagtttgtgcggacggtggcgcaaactttggcggtaccgatgcgcgtgcaaggtaaagatggacgtcagcgggtagctaacgacaatatgatgggggagccggactcgccagaggcagtcgcgcctttccatccagggcggtgtgcccggatcgtggtgcggggtgcctgcgttgggttggccggccagctgcacccagcggtttgccgcaactttggcttaccggaatctgcttgcggcttcgagatcgacttcgagaagtttacggccgcgatgccgaagaaagatttgcaggtgaagccggtatcgtccttcccacccgcaaaagaagatattgcgctggtagtggaggcagatattcccgcggctgacgtacaacaagtgattgagaaacaggcgggagacctgctggaagaagtacgtctcttcgatgttttcagtggcgaacagctgggagaaggcaagaagtcactggcgttctcggtgaagattcgctccggggaaggcacgcttagtgctagcgagattcagacggtgcgcacccggattattaaggctactgcgaagaagtttaaggcgactttgcgcgcctaaggggatactcgttggtggtgatgagggtgcaaacgcgccctcatcaccgctaaatatagaggccgaggacgttggaaacaggaaacacaggggtgccccgtgcgggacttgaacccgcgacccacgaattatgagttcgctgctactaaccaactgagctaacggggcgaatctagcctaccggatggtgggcagaatactgaattttgtctagggtagagaacgtgaagaggatagtagaaagactgaagagccgtaagcttccggacgcagtaaaagccgtcctcacctcctcggatagagttttcgaattcttagaggtagcggaggatcgtttcctggttgtgactatgcaggcattaaccgaagtggaatccgggcaggtaaagtcacgttttggctgggatgaagtttctcacgtccgttgggatagcgaggcgggcacgctgcggatcgtttttcatgagggcgaagatttggttcttactccgattgaagctcccaaacacaactttatggacattatccgagaggcactgagcgaggcgcaggtgtttattacccccctagagctgccttccggacagagagttagcgcacagatcttgcgtgacgataaccgcaatttacgtttacatccgccgatatcaagcttcaaaaaccctgatgaccagcagtatttgcgttcggtagtgagcgagtgggaacagaaattggggattgttctggggcaggaagattaggaacttttcgccctctcacggtaggcttattcaagtcgatcccccatagctcaacggtagagcattcgactgttaatcgaagggttactggttcgaatccagttgggggagctcaaaacctcagtgcttaccggcactgaggatttttattttagctccggtggtaggggcagtttgcggctggttccgggatggggttgccccctcgacaagtgactctatctggctgaattgcttgctcttttcttgatttgaccttagagttaaagggaactgaatctcagtaagcttcgcctcgttagcgaagtcgaatgctcagccttttggctattatttccacttcatcttttgcggtggaagtgtgttttaccccactttgctgcatggtttgcttatctttgttctatgaacgacaaggtaattacccctaaagacaagcggcgttatcggattggcattgatgtagggtggaactctactggcttctgtgctctcgagattgatgatgatgacaatccgatttcctttttgaacctttcagtgctgctgcacgatgccggggttggtaaagatggcggtaaaattcaggaaactcggaaggctatttctggaagaactcgccgagcgcgccgtctgattaggaacaggcggagacggctcgcggagttggataagtttttggttgagctcggttggccgctacccgatttggaaaagtatcccgacccgcacgaaccgtggaaagtccgtgccctgctggttgaggaatacatagaggatgagcggctacgccaggaaaaactggcgattgcgatccggcatatagcgcggcatcgaggctggcgctcgccttgggtgtcggttagcagtctgcatgtttcgcatcccgattctgatgaactcattgctttgcgggcgcgagtagcagaaaaaactgggcggattttgcccgcagggttgactccggggcagctgctttatctacttgatagtggggaaaagatacgtggtgatgccggtattttggctggtaaactcttacaaactgattacgcgacagagcttaaaaagattttttctcgtcagcgacttagcgaagattttggcaatcagataatcgataaggtttttgccgtaaagtcccccaaaggtagtgctgccgaaaaggtagggaaagatgcattgccagggcaagagcatctagatcgcgcggaaaaggcgcatccggcgtttcagcgttatcgaatcgccaccattatcgctaatttgcggattcgcgagggtgagggtggacagaacgaacgccgcttgactggcgaagaaacaacttccttgttcgagttcttaagcaacccagatcgcaagaagcttcccacctggatagaggtggctaaagttttagggatcgaacgccaggatttgttcggaaccgggaaattgacggcggatggggagcgaaccgggaatactccgccagtagatgaaacgaatatccgtttgactaagtgtggtatcaagccagtgcaacagtggtggcgtgcagcaagttacctggaaaggtgtgcgtttattgatcagatatctcgcgcatcctcacccggggaagctaccaatcgtgaagaacagatagctgctgattttatcgccagcctgaatgatgaagacttagagaaactagaggcatcggtgaggctcccgatcggcagggcggcctattcggtagagagcttggagcgaataacggaacggattttagtcgataatgtcgatttgcagcaggctcgggaagtggagttcggggtttcgccggagtggaagcctcccgcagttccggtgggtgaacccgtgggaaatccagtggtagacagggttttgaaaggggttaaccgctggttactgcgagccgaagccgagtgggggattccccaacaggtcaatatagagcacgtacgcgaagcattcatgtccaaggcgaaggcaaatgaactgcaacgttttcaagcgcagcgttttaagaagaacgaggaggctcggcagcagatagagggaagccagaatctttcggggttgccccgtatcgctgcgattcgcaagcaacaagcgttgcagcgacaacattgtgaatgcttgtactgtggaacccatattacatttgctactgccgaaatggatcatatcgtcccgcggcgaggggtgggatctacgaataccagggataatctggtggcagtttgcaggcgctgtaaccaagagaaaagcaatattcctttcgcggtttgggccgcgcagacaaatatcccgggggttagtcagaaagaagcgatttctagagtcaaaggttggtttaccgatacttccgttaaagatgacaaaagtttacgggcgggggttattgacaggttatcgcgtaccaaagcagaccccgaaattgacaaccgctctatggaagcagtcagttggatggcgcgcgaactggctcatcgaattgagcagcgctatcgcatcccgctaggtcaatcggcgacagcaattgatactagcgaaggggaggacgcggactctgaaaatcaagttaaggtacgagtgtttaacggctcgattaccgcagctgcccgcagagcttcaggttttgaagggcgagttaatctgattggcggacgaggaaaaacccgtctggacaggcgtcatcatgctatggatgccgccaccatcgcgatgatgcgcccggcagtagcgcagacgttggtggaacgagaaaaccttcggcgtggccagattatggctggtggtgagcaaaattggaagagctggaaaggtagcacctttgcgcagcaaaagatctatgcagtttggctagagcagatgcgttatctggcagagatttataaccaagcattggctgatgaccagattccggtgttctctaacttcaggttacggctcggggacgggaaactgcatgaggaagtgaaaaagctgcatagtaaacaattgggggatgcttggtcgatgaatgatattgatcgggcagaaacccccgctttgtggtgcgcgttgacccgcttgcctgactttgtgtgggcagagggattacctgctaatccggaacgaaaaatagtggttaacggcagtcattttgctgcagatgacagtgtcggaattttcccaacgaatgcccctacgatgaagttgcgcaacggatgcgtggaggtgggaacttctatccaccatgcgcggatttaccgaattttgggtcgcaaaaaaccggtatatgccatgcttagagtgtttacggtcgatttaccgaataaagctggggttgatctatttcaggttcatttgccagaacaaagtatttcgatgcgcaatgccgaaatgaagttgcgtgaggcttttcgggaaggcaatgccaagtatctgggttggctagtagtcgatgacgagctggaactggatttatctgcggaaagaaaaggggcaattgccgagttgctatcggagtatcctggaatatcgcattggtcggtagatgggtttcccatgaaaatcacactcagactgcgtccactttatttggcgggagagggaatgccggaggatgctttgccgggaaccaaagaaattttacagggtcgaggctggtggccagctatcaacaagttgtttaacgcagcaaaaccaagggtaattcgccgggacgtgcttggaaatattcgcgataattcttcgcgactacccaatagctggtctatttaagggggaaaccatggcttcctggcggattattgatttaacgcagttttctgggtcggtttcctcgaaaacaggagctatagttttacatccagaagataaaccgcaggtgactctaccagtggctgatgttgcggtagttcttatcgggatgggagttcacctctccggagctgtgttgcaccgtttaaccgccgcagatgtgtgtgttttgctctgcgattggcgggggattcccgaggcgggagcctttgcttggcggcctcactctcgggtcgcagcgcggcgggtggcacaggcgggtatgagcgttcctaaacaaaaaactgcctggaaagcagtggtgaggcggaaaatagaaaatcaagcgaaaactttgctgctgtgtgggaaagatatagacagtaaaaagctgctggagttagtaaggctggtacgttctggcgatcccgataacaccgaaggcagagcagcccgctattattggttggcgctgttcgggaaagagttctcgcgtcaaccggggttgggtgatggcattaattccatgttggattatggttatacgattgtgcgcggtcacggggttagagcggtgctagctgccgggttagaaccgtcactggggatattccatcacaatcgagctaatctgttttgcttagttgacgatttgatggaaatctttcgaccgttaattgatttggaggtttaccgccttgaaaaggccggtaaatccgcggcggctgattgtaaagccgagttggtggcggctgccagtagtcagtatcgagatgatggtatcggtattcccacagcatttgaggatctcgctcagttatttggcctttacgttgagagtcaagtaaaaagcttttctcctcctaaatggtttaagtagtttctatgagtaagaagcccatgtggtgtctggtgatgttcgacttgccggtggataccgcccgccatcggcgcgaagcaaacgcataccggcgaatgctgttggatttagggttcagcatggtgcagtttagtgtctacgcaaaatatactcctgcgggattaagcgacgtaaccaccatcggtaaagtccgtgccggtattcctcccgaaggaaacgttcgcatgattttcttaacagataaacaatggtctcgaacgttccatttttcaaacggaactcctagcaaagcagaggaaaaaccggaacaactatcaattttttgagcaaaaattgagcgtgaaaccccgtgtaaactgggattatttacccctgctcaagcatatcaggggtaaataagaactgaatcccagctatgcaatcaaatgagtgagatttgcggcaagcatatcaggggtaaataagaactgaatcccagcctccgagccgggagggtagcgcggttttcaagcatatcaggggtaaataagaactgaatcccagccgtgggcgctcgatgccgggacggacaacaagcatatcaggggtaaatacgaactgaatcccagcacgcgctagaaaacctttcggctaaaaccaagcatatcaggggtaaataagaactgaatcccagctatgggggtaaagggtaacggtgaggaacaagcatatcaggggtaaataagaactgaatcccagcagactatcggctggcgtctcgtgtccctcaagcatatcaggggtaaataagaactgaatccccagattctcctcattcagtgcaatagagacatagtaaaaagtgaccgtattaaggtgcttactggaactttagttgaaatactaatagtccttgggacgtatgtaacaggaatagctgccgttgtaaaccctatttggaatcacctcaagggtgagtatctaaagctatcgggtaaggggtaggagagctctatgtccgatattatggctagtgaggaggaaacgaaatgaagataaaagcaatgtacctagcgttcgctactttcgctattttcgtgttgaccgaaatagttagctttccatcagtggcaaacacagctctatccctagctattgggattggtggagtatccgccctattcttagcgatccgacagcatggctaaaaaatatttctcaagtgctggagctgctaggtatctagggttatctcctagcacggttgcgacctaccgtgctagaggaatcttcccacctcctgacgtgataatcggagagggaaaagcgcaagttttcgggtggtctcaggagacgctagaccattggcaagccacacgccccggcaaacctggcagaccgaaagggtcgtaaatagtaacttcgatggaaacattttgggattggtatcctccttttgatattgattccaagaagacatagccccggcaatgctgcaatatatcgtatcaaccagcgcaaatagctaggctaagaaaagctgcactgatcaggagatagctcatgcttatcggaatgctgttatcgtgcacttcctggacggatgtcagattcgtatcggaccaacccccggtggcaaactcttggaaataggggttaatcaagacggggatatttttcacgccatgaaagccagggcgaaatttttgaggaaaggatggatgaaatgaaaactgacgaagaattgctagcagaaatcgcggcggatcccgagccggaaatgacgattactgatccctccttaattaaggtttatcaggcgctgattgaaaccgttagagcagatagacagctagacgaagcggttaacgaggctcgtaatcaaggtcaaacctggcaggcgatcggtgagattatcggtatgacccggcagggcgcaatgaaaaagttcgctgcctaaaaaacctgctatcctgtggcgcaggcggcaggaagtgaggtgagggcagagagctctcttaaatcttcatagcgcatgagacttacgtccattgagggatgctgctcagtctgataagattttaatcgtttgccctggtgagtttggtcaccgctagtgggcactccaaatttcaaagttgagggttgagataggtcattgaggggtgacctaaaggagatttacgagcaatgaagcagcatgccgcaaaactaactgctaccggattcgctttggcgttggcgggaactctaccggccacggggatcgcgcaagccgctcccgagcctaccgggcccgctgatcccacaggtgctgaacagcaaaaccagcaaaccaatccgaaaattcaatcggaaaaaaacctggaagccgcgaagaatagcgcccaagagagcgcaaataaggccgcggaggcggaaactaaagcgcaagtagctgtgaagaaagcgcaggacgctgccgagcaatccggagaaaagtctgcggccagcgaaaaggcgaagcaagacgccctcgattccctagcgaaagcgcagaaagagagcgcgcaagcggcaagtgatgcagccagcctgcttgaaaaagccaatgagaagaaaacggctgccgagagcgccgcaaaagctgcgggtgaagccgtaaccaaagccgagcaagcaaaggcggaagcagataaagcagtcgcggataatcctgcccccgatgcgaggcagctgcaggcagccaaagacaaggtagctgccgccgaaaaagccaagcaagaggcagacgccaaagcggccgcagcacaaaaagcgctgcaagacgcacaggcaagcgcgcaaactgcggctacgaatttgcaatccgccacggaaacggtcaatcaggctacccaagcaaaacaaaatgccgaagctgatgtacgcgccaaggaacaaaaagttagcgagctagaagccaaagttaaacagctgagtgaggacgccgagcaggccttaaaggacgcgcaggcagcggtagaggcagctaaagcacaggtgaaggcagctcagaatactgttgagcaacggcaagtagagctagaaaatgcccaacaggcagtcccggctgcgcaaaacgagctgcaagtaaaacaggcagcagttgaacaggctaaaaaggataaagctgccgcagaccaagcagtgcaagctgccggggaacaggtaaaagccgcgcaagcagagcagagtaaagcagaggcggttttagcgacccgccagggtgaaactgcggctgccaagaaggcagcggatgcggctaaagccgcacaaactaaagcagaaaaagatctcgaagaagcgaagactaagaaacagcaagccgacgcagcggtaaaagcggccgaagccgaagtcgcgaacgcggaaaaagcggtgaaagaagctgccgaaaaattcaagaagggcagctttgggttctttgaaagtgtaggggcagcggatgctcttgagattttgaatgataaaaccactaccgctgacgatggcaccttggttaacggcactttgaaacccggtgccccggacgacactaccaatttagacaatatgaaagaggccatcgcctgggtacgggtagttaatcaatatcgcgccaaaggtggacgcaatggcgaaaagcttgacgattacgtgattactgaccgcttaatggctattgctcaagcgcgagctaactggtcgaggtaccagattgagcactctggtgcttttggggtggcagaaaacttagcgtgggctaaaagcgatccggtggccaggtggtacgccgagaaatccatctatgaagaagctttgaaacagcaccccgatatggcgaatatgtcctcgtatcagatttatcagaagtaccccagcatatatttcgatatagggcattacctcaatatcgtaggtcactctactgccaccggttttgcgggtgcagcaggtgaggggattgaatatggagctgtttggggcgaagtctatagcggagtcaggcagggagaaaaaacctataccgttgatgaatacgaacaacggtttatggagtactacaactcggtgactaccgagggcgcaaagcagaagctaacggatgcgaaagcaaaactggcaaagttgcaagcagcggcaaagactgccggtgacaatataactacagctgaagcagcggtagcagaggcggaagctaaaactcaggaaaaggataatgcctggaaagatgcccaaagcaaagaagctgacgccgctgcggcagtagaaagcgaaaaagagaaggttacggcggcgcagaacaataagcagactgccgagggcgtggctaaggaaaaagagcaggcggtgcgggcagctactaaggccgctactgacgctaagaacgccctcgagaatgctaaggcagaattagctactgcgcagaaagccctggaaacggcaaagcaggacgttaaagacaaagaggcagcgcaactagagaaggaaaaagaactagaagagctggctaaaggcacggcgttaggaaatgcccagcaagagttgtccgagacgaaagcagctttaacccaggctaaagccaaagctcaagcagccgccacccagctggaaacggcgactcaggcactccaacaggcacaggcagcgaaagaggctgcagatactgcgctagaggaggcgacaaccgaaaatcagcaagctgcagagactgccaaccgggctgaaagcgagcgtgcaaacgcgcaacaggcgctaaatccgttagctgaacagcaggtagcccatgatcaggcagctggaaaggcgcaaaaggcggagcaagatctaaaagcggctgaagctatcgccgccaaagctaataaagaattgcaagccgtcactaaggtggcggacgacctgcaaaaacaagcggaagccaagcaggcactagcggataaactggcggctattgatggtgagcaggctttgaaagatggcctgcccgctggggacagcgacctagacaacctgggattgcccgcttcctttgctgcttatcgcgatgcggctaccgctgccgaggaggcgcagaaagcagcagatgaactagcgagactggctcaagctgcgcaagatatcttggaggaagccaccgcggctaatcgggaagctcaagctcagctggcagctgcccaggcagtctacgaacaataccatcaggtgcaggcagccaaatcagccaatgggcagagcaagttcttgccgggaaccaagttccaggtacgtttcaccggttttagtcctaatagtcagaaccacgtcattatgcattcaaccgtggttgacctgggggtacatcccgcggtaggaaaaggcgagtttatggtatccgtgcaggcgccacgggagcaaggtgtacacaccatcaccgctaccaacgaatggggtgagcgcgccagcttccaattcgaagtaggggagaaactaccggcgaaacccaagggaaagaaaaccatcaaaactgtcgtagttaaagaggttaacaccgtcaaaccggctgccgggaaaccggcggccggcgagcaaatggcagtgaccggggtatctatgacttccctgttggcgttgaactcgctagcggtagtcaccggagtgggactggtcgccgccagtcgtcgccgatcccaggaggtctaggaagccaaacctccctaagtaattaaaagttgtccccgggcttagaaagcccggggacaacttttactcaattaactagccggaaaatacgtagctaaaaatgagagataaaaatagtttaaattaagaacctatttcagtagccaagtagccgtggcttctttatctatgatgtttccgaagtaggaaatgctggcagcgtcaggtttgactggaacaatcccggtcacggttccaccggcttttaaggatccgtcacctaggggttcttcgtctagaaccggaatttcgggatctttcatatttcccgaatcagacgtttgcttccagtcaaactggttgtaatctactggttcagacccggtatttttgtaagtaaccgtaacaagcagatatttgtcgccaacctgatcagtcttttcttctttcgaatcaaccgatatttgtaaaccgttatctaaagtaacagcttttccgatagccagcttgctgttgtctacatttttatcggtcttcttggagtctccggcagcggctttgccctcctagaatccgcctgtcgcacagttggcgaatggaggggctgttagtctttacccatggaacatgaactccccaaacctaaccccaaacctaagctggattcaccagaaaaaccggagaggcgcgcacctcaagccgcggggataggtaatgcgatagatgctcaggacgtggtgaaactctacggcaataaccttgctttagaccatctttatttgcaaataccggctggctcatttttcgggctggtaggtcctaatggggctggaaaatccacgtttctgtctatcgctaccggtcttttagaacccgacagaggcacagttttcattaatggcatcagtatgtgggacgaaccggtagcggcaaagggagcgttgggggtattacccgacgggatgcatatgtttgaccgtctcagcgggattgaacacttaacatttgtcgctcagctgcgcggtcttgataaacagagtgcaattcagcgctcccgttcacttttgcaaacatttgaactgccgctagataaaaagaaaacgataagcgaatactcaaccggtatgcgcaagaaaatcggtttagctttagcgctggtaacctccccgcgcctagtggttttggacgaaccttttgaagcggtcgatccggtttcggcaaacaccctacaacaagtgttaaaagaatatgtgaagcgagggggaacagtagtgttatcttcccacgtgatggcgaccgtggaatcgttgtgtacccatgtggcagtgattaatcagggtcgtattctggtatccggaaccaccgaagaagtcgcggcagggcaagacctcaactcgcgcttcctacagctagtagggggacatcagcaacgcgaaggagacctgtcatggttgggacgttaatccggctaaacctgcgtttgcaaaccaaacagttcactaaacagtggtggcgaatagtcctcggtgtcctagctatcatctacgtggcatttatattacttggggtggcaaccgggttttggcaagcaggtcaagcagggcttaccgctccgattcaaatctattacgcgctgcttatcgtcctggtgtggatgatgatggtatcggcatcggtagctggtgagcaaagcctgactccccaggcgttaagcccctatattggtccgacccggcgcgccgcttacgggctgctcgcggctaatatcgtcagtgtttcctcttgcgtagttttcgttatctacgaggtgtcgctggcggggtggctagccgccggtagccttggtgcgagtgtgcttaccgttctaagtgggctgctaggggtatttttgattgcagcgttcactcagatattgcaaactcggctggtatcgcgattaactgcgaagcgcgctagctctcgccagctttttaccggtattggtatgctggtggtaatcgctttgggatacttgctggtgactatgattcagcattggtttgccgatagcggtggcgcaatcgcgtttttcccgctgctggtgcaaaaactgaccggaagcacggcgcagattttttggtatttcttggcacttactccgcttgctcctttcctgcttgctcctttcgtgatggctcacttttattgggggctggcgctctccctcgcctctacctgcttttatggggttctaatcttgagggcgtggccgaaggtttttgcgaacgctctaatggggcgagggcaggttttagcggaagtatccgctgccaagaacttagatgcgtcctttaacgaaaatagtgaggacgagtggaggattcctctgttagctcgagtgttacccctgtcgccggtaggacagattcattgggcaagaataagttattaccagcgaaaagacccgcgccaaattatttccctatcttcgatactgtatgtggcagttatttttgggattatgttgtgggcaaaccatccctcgggagaaatggttttttgggcgttaaacggaactatcttgctggtagcggtgacagccgcaactgcgctgctgaatatgtggtccaatgattcttccgcctactggtatcagattattgccggggttgccggtaaaactgacagaaccgtgcgtgttggggttcttgctagctatcaacttccggtgatggtggcgattactttgatttttggtttcgcgctaaaaatggacacctccgcaattatgaaatctgccattttagcctgctgctacctgttagtggctttgggcgcaaattctttgatttctgcggtggttactatccccggtccggcaccgggacagtcggctctgcgtaataattcgggaggaagcggaaaatctatgctggctgccatggcatcctcaatggcggcgttattgctgtgtgctctcccttcgggattaattgtgttggtctgcgtccttttggatacctcttgggtttcgctcttgatagctgccctcattaccgctgcggtgctggtggggggaatctacggtggcggaaaactgttagaacgcttccaggtgcgcaatctacgccgagtgatggcgtggccaaaacatatatatagcggggagtaaactaataacgcccagataggcgtgatttgccgcgtatggggtggcgaaataaaaaacttcgcgtagttttctgtcactttggcattagaactggtgagaatcgctaacaaccaccctaaaaactgacataaataggggttaaaacctggtctgttggcggagatggagggattcgaaccctcgaggggctatccaccccaactcccttagcaggggagcgcactaggccactatgcgacatctccaatgtcaaagcacccccatagtttaacggacagcaaggttagcggcaaaaaccattcgcgtgcatccgg

SEQ ID NO: 585 - DNA, 23330 bp, synthetic construct
  variation 15833..15932: note = n is a, c, g, or t
  misc_feature 1..23330: note = Synthetic
  source 1..23330: mol_type = other DNA
  variation 15201..15300: note = n is a, c, g, or t
  variation 14753..14852: note = n is a, c, g, or t
tagagcctcatcaatagtcttaggttcgaaatctaatgattgtgaacccttggtattcacttccgcagtgagtttttcgtccgcaaggtttaatgctgcctttattgaatctgtgtcagttccacgcaccgagattagaagatcatcgggccccgcttctaaatcctccggtagcatgtttgagcgggataaaatgtcgaggtttgaaggggttgccatcacgacccctgcttcgagaatgccttccattttttgcagttctgcggctaacgacattagcgtaaccgagtctctgtataggcgatggtggagactgcactctaaatggcttgctgacattttgactccttgatttttaagatttggacggattgaacgaggaaacccagtagaaaatcgatgcctgatgtgtgcccgatgcgtttagcattctcaatcacatctgtcggtggctgcttgcaactcatttggtcaattaatttcaagtgaactgaggcgaactgcctttgataggcccaagacaattggtgtctagaagcgcgggtggtattcatcagcttgttacgtacaattcggctcaatgatttgaaggttttttcatcacccgtcgcgagacaggcagcaagcgccccggtaagcatgtcgtcgccggttggcgtagcccctgggcctgcgccaattagagcggagattctcttcgcgtcctgactaattaggtttttgaacatctgcgccgatactgtgctactcatttgcgcgattaggagagcttgcgccaggtatgtctgatcgaggttattttgtgtgagggttaaatctggacgtggcgtcagcgtatggtcttggaagaagtctcccagagatacgtgttgatgtacggatactgttttggaaaacaaagcaaagtctttgtcgctaatctgcagaccgccaggaactaatccacgttgggagttagttacaactacgagttgcccgcattgagtctcagttacgaccgaggaaggccctttgtatatgacctccacacttaaaagatcccttgaatagagcggctttgcagcactgcaaaccggctctattcgatacgataggacgctcatataactcacactagacatagaaataatgtgtgtcatctctcaaaaatgccagtattatttcttgtaattggccagaaaggacaaaggagttaacgtggctggaatatcgttgaaccaagtcatgcaacttcccgccctgcgtgacgctcgtgtggttgcagggcgggatgggatgggacgccacgttcattcggtgaacgtaatggaagtcccagatgttgaggcgtttgttcgaacgggtgatttgttggtaacgaccgcctatccagttcaccacgacccctcgatacttgttcgtctagtcaaatattttcacctgcgtggtcttgcagctttggcaataaaaaaagggcgttatctggagaactggcctgaaggcctcctggaagtatgtaatgatctaggttttccactaattgaactgggagacaacttatcgttcgatgaagtcatcggagaggttatggcagttgtcctctctgaatatgggcccgagccaaaccgcgccgatgctattcgccaacaactgacggaagttgctttgtctggtgggggactcgaggatattgcgctaacactagcggatgcattgctgagtagggtgaatattgttgaccttgaaggtaagacacttgcactagcggatgcagaatctgtaagaaatacccccgagggggtgccggactataagtatgtagaatcatttgaaattagggtcgcatctcgccgtaaaggatacataaaggtatttactgcgggtcccttaaccattggccagaaacggttagtgcagcaggcttgttttgcggcaggcatgcatattgcacaacagcaggcaactattgaagttaatgaacgccttcgtgcacttgcattagaagaaatcgtccgtggcacagacggtggtgaatccaggcatcagcatctgtttgactggcctttggaaaaattggatacggtcgtggccatttctagcgcgaaaattctgcctgatgaaacagttgttcgcaaattttggggtagatccgcattggcatggctacgtggtgaggatgtcatgttgctgtgcaatagacaagagattgggcgtccgattggtgaggcgagcctagaattttccaagttgtattctcatgatgttcgagttggcgttggggatgcggttgatgaaccgtcacagttggtgcattcccattcgacagcgttggaggcgttgcgtattgcaaggttaacgagccaagaagttggaatctatgaagaattggagttggagcttcttctgctttctttgggttctgtgcgtgtagatcgatttatagatcgcaatattggcccattaatcacctacgattacaacaataaaggtgcgttggtcagcacactaggcgaagtattgagctgtcgtaatggcagggaggccgcggaacgtttgtttatccactacaacaccctcaagtaccgccttgaacagatccgagatcttcttggtgaagaatgggacaaccctgattttcatgctggattggttgttgcgatccagctacagaagctacgcgactagttgcgctaatacatgtgatttaggaaattctcagtagcgtagcgggaaattcgagccgctacttcgccgtcgatgtggaagtcttggttggcggcgggtccgcaaaggtccgagactgcccgcacagaaatgaacggcacgccggcgcgggcacaaatctgggcggccgccgtggtttccatgtcggcaccgagggcggcgggaaaagtctcacgcatttgctccacgtttgccgcggtgatgaaagcgtcagaagaggccacttggccaaaccaaaccttgcccgtgccctggacgtggttagaatctgcagattggttggccccctcaggacggtcagccgcagaaagatcgccgggcgagttttcattcgcgagggcggttcgagctttctctaccagtgccggatccgcgaagtactgctcgggcatgccgggaacctgcccgggcgcgtagccaaaggcggtggcatcggcccgcgagtaggtgaaggcagtacccacaacaacatctcgcacacttgtttgcgcgcccaggccacccgtggtgccgccgcacatgtatgcgcataagttttctccaaaaaccaggtgcgctcgggcggccgcgctcgcggcgttagccaggccaatgcccgtggtgataacacaaagttggagtggccccgcctccccctcaaaaacgcctacacgccagttttggcccgcaatgtcaacgcttggcccaaagctggtgaggtcaaggagcggttcggtctccatatccatggcagctgcgatagcgaccgttttaagatcagtgcttgcgtgtaaatctcgtaggatgtgcatgtgcccgctttcgctggtatgtcgtaaaacctaatttagctcaaggaacccgatggtttttgaaccttctgccgctccggcccacgtggatgggccaagccctgccggcatgatttccggtttgattgatgttgaggattcggtgcgccccctctccgtgttcgatatgttccggattggcgtgggcccctcgtcttcgcacacggttgggccgatgagggcagcacaagcgttcgcgcaggagctttacgagctggatttcaggccgcaggtggtgcacgcggagcttttcggttcgctgggtgccacgggccgcggccactccaccgaccgcgcagtgttgctgggcttggagggctacatgccggataccgttccgggcgaggtggtcacgtcaatctcgcaacgtgtggaaagcacgggtgtggtcagtcttttgggcggttggtgcgaggcccgcatggagccgatcgtgatgacaccgttcaccgttttgccctatcacgtgaacgctctgacgcttaccgcgaagcgtgatggcaaggagttctcgcgcacctactattcggttggtggcggttttgtgatggaagacctgtctgatgatccgcagcgaccaaacgtgcgggctctcgctacgccgcaagcggccgagctgcacgccaccgccgcgccttgcccgttcaccacggcctcggctctgttgcagacgtgcgcgcgcgagggcttggcaatctcggatgtggttcgcgctaacgaggaagccgcgcgctcgcgcgaagacgtggacgcctacctcgatttgattgcaaaaaccatggaggaatgcgtcgaagcggggtgcaataccgatggtgttctgcccggtagcctgcgggtgaagcggcgcgcgtcgaacctgtttaagagcctgggcgggcgtagttctggccccgcgcagggcgataagtgggcgtgtagtgaggacgacccgttgcgggcgatggattgggtgaacttgtatgcgctcgcggtgaatgaggagaacgcggcgggtcaccgcgtggtgacggccccaactaatggggcggctggtgtgattccggcggtgcttgggtacctgtggcatttcacgccggagggtgaggcgaaccgcttggaggccacccgtaagttcttgctggcggccacggcgatcgggtcgctgattaagacgaacgcgtcgattgcgggcgccgaggtgggttgccagggcgaggtcggttcggcctcagcaatggcggctgctggtttggctgaggcgtttgggggcagcgctccccaggtggagaacgcggcggagatcgcgatggagcattctctgggtctcacctgcgatccggttgcgggtttggtgcaaatcccgtgtattgagcgcaacgcgatcgcggcggtgaaggcgattaatgcggcgcgtatggccatgtggggcgatgggcgtcacacggttccgttggatgcggcgattgagacgatgaggcagacgggcctggacatgatgtcgaagtataaggaaacttcggctggcggcctggccgtaaacgtcgttgagtgttaacgagtgtgcgacacgcccgggcgcactaattctcgaggctatttaacatccgtccattccacagtttccacagcgtgtgaatatctattgtccacagtttcaacaggccctggaccgggcgcagcagcgtctggtttggggctttcaaaatgtttgtcctacccctgttagaccattgtttatggccggttccagacagtgatgaagagggggtgaggtcgcgtatacagggccgtttcacgtccacagactgccgtcaggccgtccacagcctctctttctcgagtgaacaaaaatgctccatattgtggtcgtgatgtaactcaaccactaggtatagtgtctagaagttacaaacaggctaaacatctagtacaatcacatgagtgtagttacaaggcgcggattcgtccgggtcttagataagaagcgttgaggagaatgccatgagcatcaccgtttacagcaagccgatgtgcgtccagtgtgacgctactaagcgcgcgctgaacaagcaggatttggtgtacgaagaggtcgatctgactgaggatccaaatgcgcttgagttcgtgaagtcgctcggctacgtgcaggctcctgtagttatggctggcgaccagcactgggcgggctaccgtccagatctgattaagaagatcgctaaggaagccgccctcgtagtcaacggctaaagccaaacccggccgtcacatttggtggccgggttaactatgcgtgaaaccctttcgaatcagaagtacccgtaaaacagcagttgagcagaaggtaagtcatgtcggaaaagaagagtgtggacaaggacatacttgttgtgtacttttcgtcagcgacgggcaacaccaaacgttttgtggaaaagttggggtttaggaactcgcgcattcacctgttgccgcgcgatgagttcttgtatgtgcatgaaccgtacgtgctgattgttcccacctacgggggcgggaacttgaagggtgcggttccaaaacaggtgatcaagtttttgaacgtgaaagagaatcgggatttgtgccgcggggtaatctcggggggcaacacgaatttcggtcaggcttacggtcttgccggcgatgtgattgctcgcaagctgggtgtgccacacatgtatcggttcgagcttcttggcaccagccaggatgtttctaaagtgcaagaaggattgagagaattttggcagaaaatctgactgacacggggttggaaagcgcgcttccgcccgagctggattaccatgcgctgaatgctcagctgaatctgtatgaccgtgatggcaagattcagtttgatgcggataagaaggccgcaaggcagtacttcttgcagcacgtcaaccagaacacggtgttcttccacacgctgaaggaaaagctcgactacctggtggaagagggctattacgagaaggaagttctggatcagtacagctttgagttcattaagtcgctgtatgaccacgcgtatgacaagaagttccgtttcgaaaccttccttggtgcgtacaagtactacacgtcttacacgttgaagacgtttgacgggatgcgctacttggagcgttttgaggaccgcgttgtcatggttgccatgtacttggcgcaaggtgatgaggaacttgcggtcaagatggtggatgagatcctttcgggtcgtttccagccggcaacccccacgttcttgaacgcgggcaagagggcgcgcggcgaactcgtttcatgtttcttgcttcgcgtggaagacaacatggagtcgattgcgcgcggcattaactcggcgttgcagctttcgaagcgtggtggcggtgtggcgctgtcgctgacgaacttgcgcgaggccggagcgccgatcaagaagatcgagaaccagtcttccggcgtggttccggtaatgaagctacttgaagattccttctcgtacgcgaaccagcttggtgctcgccagggcgctggtgccgtgtacttgcatgcgcaccaccccgacatcatgtcgttcttggacacgaagcgtgagaacgccgatgagaagatccgcattaagtcgctctcgcttggtgtggtgattccagacatcacgttcgagctggctaagcgcaaccaggacatgtacctgttcagcccgtacgacgtggagcgcgtctacggcgttccgttcacggagatttcggttactgagaagtaccacgaaatggtggagaacccgaagatccacaagaagaagatcaacgctcgtcgtttcttccaaacgattgcagagatccagtttgagtcgggatacccgtacatcgtgtttgaggacacggtgaaccgtgcaaacccgattaagggccgtatctctatgtccaacctgtgttcggagatcctccaggtgtcggagccctcggagtacaacgaggatctgacgttcgcgaaggttggtaaggatattgcttgcaacctcggttcgatgaacattgcgaagtcgatggattcgcctgactttgggcttacggttgagacagctatccgcggcctcaccgcggtttcgggcctggcaaatattgcggctgccccgtccattgagcgtggtaaccagatgtcgcacgccattggccttggtcaaatgaacctgcatggatacctggctcgtgaagaaatcttctacggttcgcaagaggctttggacttcacgaacatgtacttctatgccgtggtttaccaggcaattaaggcgtccaacaagattgcgcgtgagcgcggggaaacgtttgttgggtttgaggattcgcagtactactcgggtgagtacttcaagaagtacattgagggcgagtgggtgccgaagaccgataaggtgaagggcctgtttgcaagctccaacgtgtacttgccaacgcctgatgattggcgtgagctggcggcgaatgtgcgcgagtacggcatgtaccaccagaacttgcaggcggttccgcctacgggttcgatcagctacatcaacaactcgacgtcgtcgatccacccgattgcctcgaagattgagatccgtaaggaaggcaagattgggcgcgtgtactacccggctccgtacatgacgaacgagaacttggagtactaccaggacgcctacgaggttggtccggagaagattatcgacacgtatgctgtggcaactcagcacgtggatcagggcttgtcgctcacgctgttctacccggacacggtttcaacgcgcgacttgaacaagtcttacatttacgcgtggcgtaagggcatcaagacgatgtactacatgcgtattcgccagatggcgcttcagggaaccgaagttgaaggctgtgtttcctgcatgctgtaaaggctgactgaagaggcgcggagcgtctggatgattccagaagctccgcgcctttttcgttcgatcgaaccgttatcccgtggaaggacgagcaatttcagaacttgccgttccaatcctcgggtaatccaagactttctggatctacaagaggattggtcaagaagtcattgcgtatgaggccactgactttgtctggccacgtggttttcggtgatgtggtgcgaactaaatttgccattaccactagcgcgccaaatatttgctcactttgtccttcgggtaggagggcgaattcgggtagtgtgcgtagtgcaggtgtgggtgctggggcaaatgatttgttccaaagtctggcgtggtgtgcacagtaattgcgcacgatcgttaactgttccatccaacggactagaggggactcgcgtttggccttttcctgctgccatttggatagttgcttgaggtctagtttgattcccatatcttcggcgatagctcgttggtcggatgcaggtaatccttcatataggcgtgaaatgtcggagaaatctagaacttcagtcagcacccagaatgggtattctccttcgtattcatcgcggtagtgcttaattgcctcattgcgagcccctgcacgggaaattcgctttttagcagtaaccatccactttttatggtcgaatttggagcggaagattttcggatttgtatatgccagtggatcttttttgaccagtagttcactcacacgtgtgcgcatggctatctcaactcgttccataccatcgtgaacaagcgcacgtagtttccgatccgcttcgtaaagtgcaacgacgtcgctgaagctaatccctggtttgagtcgatcggttcgtcttccttgagcatccattactctggctggataccaatacgctgacaagcggtagtaactcacgtaagtgagccactgcttagccaaggtggcgtctacttccatgccacgatctcgcaaccgtgccacgtgatcaacaattgtggctgcttgttttattgctctggtcaccgcggttactccgagcctagatagagatccagcccgctctcgcatgaggtcgaggcgggctgaacgattgcgtccatcgtataacaaaccggtgcatatttgccagatggcattttagtgaagcaggcaataatccggttagtagtagcgtgagcttcaggtcttctatctacacccattttgactctacgtggaaaattggtttcaagagtcctcgcgcaaaatatgtgcttctgtgtccgcagtcaagcgtgccaagcgaatccaatattgattctcgccgtgaggcgcaaatggcggcgcacgattccggaagctccgcgccattttgcttgcgcaagtgtgactacggctgtaaacttgtaatcaagactgatttctcaataaggcccgcctcgttagcgggtttatcgattgctccatcgggccgcaaggcccgatatttttttggaagcacggattgggaatagtagctacatatccacatttaatgtccgtggcgtctgctaatagttacatatggctacttcacatcttaaataccgcgtcggcgtggacgtgggacagaactctattggttttgcagctatagaactgaacgatcaggatcttcctattcgtattcttaactcctgcgtgttgaagcatgatgcgggcattgatcccgagcaggcaaaaacgcaaacaacgcggctagcttctgctggtgttgcgcgccgcgcacgtagaaggttggtgcgtaagcgcaagcgtcttgaaaagcttgaccggctaataacggatttaggttggccgctaatcaatttggaagatcagagcgacccttactatccgtggcgcgttcgagccgagctggtggagggatttattgacgatcctgatgagcgggcgcagaagctgtctgtagctgtgcgacatattgtgcgtcaccgggggtggcgttcgccgtggattcatgagcgtacgttgttgcaacctgctgagccgagcgatcagtatgtagcgtttaaacagcgggttgaggatctgattggctacgagctaccaaataacctgactttgggagagcttgtggtagccgcaggtttgtctcccaaagtgaatcttcgtcgcaccggtccgatggataagccaaagaatccgattcttggtaagactttgcagagtgataacgcgaatgagcttttagagattgcgcgtgttcagggattggatgaccagacggttcgcaagctggttctagcggtctttgagagtaagagccccaggggttctgcagctaagcgggttaagaaggatgcactgcccggccagggtgcccattaccgtgcagagaaggctcatcctgcgttccagaagtatcgaatcgcaacggttgtggctaatcttcgcattaagaatccgaatactggcgaggttgagtcgattccgctggaagttaagaaccagatagttggttacttgaatacctggtccaaacgtcaggcgccaacgtggattgatattgccgattacatcggtgttgaacgccagtatttgcgtggtactgcgtctgcaactgcagacggtgagcgtgctgcagcacgtccgccaattaacgaaacgcatgtcaggattttgaacgcatctaagttgaagccggtaaaagactggtggaagaaggcagatgagcagaatcgcggtgctttagttgattgcttgtctaactcgtcagtgattgacgaggaagacgttaaatacgctgatgctcttgaactcattggttcgttggatgatgagcagttggcaacgcttgatgcgcttaaacttccgattgggcgggcagcgtattcggtgaactcacttgagaggctcacgcagcgaatgttggtgcacggtgatgatttgcaccaggcgcgcaagaacgagtttggggtggatgacgattgggcgcctcctgcagattcgatcgatgagcctgtaggaaatccggctgtggaccgcgtcctcaaggctgttaacaggtggctgttgggagctgaagaggcgtggggagcgccggtgagtgtaaatatcgagcatgttcgtgacgggttcatgtctaagcggcaagcgcatgagattgagcgccaaaatgagcaccgctacaagcagaatcaggctgcgcgtgaacgcttgaaggacagcttcaacgtggagagtaaccgcacttcagatattcgccgcctgtatgcactgcagcgacaaaatggtgaatgcgcctactgtggtggtgcgatcaccttccaaaactcggagatggaccacattgttccccgtaagggcgttggttcgcgtaacacgatggataacttggttgcggtttgtagccgttgtaatgaatctaagacaaatattccgttctctgtttgggctagtagtcggccattcccgggcgtgagcgttgaagaggcggttagtcgcgttgagttttggaacaatgacggtggtattcccaacgcggactttaagaagctacagcagtcggtgaaggatcgtttgtcaagaaccgagcttgatccggagattgatgagcggtccatggaatcggttgcatggatggcgcgcgagcttgcccataggatcaggtaccacttcttagagagcgggaatgaaactaaggtctttgtgttccgcggtcaggttacggcttgggcgcgccgggcttcgggcatggagaatcgcctgaatttcattggcggcccggggaagaccaggctggatcgacgtcaccacgcaatggacgctgcaacggttgcgctcatgcgtaattcggtagccaagacgttgctgcaacgtaatagcttgcgccagcaggagcgttttagtgaaggcacagaaacttggaagacgttccgtggtgatccagctgatccgggcgctcgtgttatttacgagaagtggcttgagcagatgcggattctgtccgagttgtttaatgaggcactcgctaatgatgggattccagtattctccaatgtccgtcttcgtttgggtgacggtagggcgcacgcggataaggtggacaggctagttcgtcacaaggttggcgctacgtggagtatgaaagacattgacagggtttcaacggaggccctgtggtgtgcgctgacgcgacagcctgattttgtgtggtccaaggggctaccagagaatccgcaacgagaaatcgtggtcaatggaactcactttagggcggatgacgaggtggagatgttccccagttattcggcctatttgaaggttcgtggtggtgctgttgcgctcggaaacaccattcaccatgcgcgtatttaccgctataaggcaggtaagaagactagttacggaatggtgcgcgtttttgcgcaggacctgcaacggcacaggcacgaggatctctttaaagctccgttgaaaccgcagtcagtttctatgcgagatgccggtataaagttacgcaccgcgattcaaaacggtgaggcagagtatctcggatggattgttgtcggcgacgaatttgtggtcgattccagtttgttcagcacggacaaaatagttgaattcaataaagagtttccggatattacccgatggacgctaataggcttagaggataatcgcaggattaaccttaagccggttctgctttcatcagaaggtttgcccgaggaggtttcgcgaaatctcgctgagatcatctcggtcaaggggtggagggtcccgttatcgcaactcattagcgctggcggtttaaccgtagtgaggcgagatagcatgggacgggtccggtacaagtccagggcaaacttcccagttacctggacgattgacccagagcaagatgtctagcaactggcgcatcatagattgcactcagttgcagggtgagatcaccgctaaacgtggcaaagtggtgatctcacccaacaaggcttcccctacggagatagcagccgtagatgtggcagttcttctgctgggcatgggagccactatttctggtgcagcgttgcaccgactgtttcaaaatgatgcggttgtgctgttatgtgactggaggggagtgccagaagcgggcgggttcggctggtccgatcattctcgcgttgccgcacgccggcgcgcgcaagcatcactgtccgagccaagacggaagcaagcatggaaaattctcgtgaaaacgaaaatacagggccagcgagactgcttgcgcgcattagacaagccggaatatgttctgctggataggtttgcgaagagtgttcgatcaggcgacaccacgaatgtggaagggcaagcagccaggttttattggaaagctctatgcggctctacgttcactcgcgttcctggggagggcggtgggatcaatgggatgcttgactacgcatacaccattgcccgcgggcacggtattagagcagtcttagctgcaggccttgaacctagcctcgggatattccacagaaatcgggccaacatgttttgcctggttgatgacttgttggaggtatttcgtccagcaatcgatttggccgttattgaactatttctatcgggaaagtgttctgtagaagaggctagggcagatctagttgccattgcctgtggcccgttttcagatgaagggcatagcattcccacagtttttcaaatgctcgctcaaagctacggtcggtatgttgaaggagagatagacaagttagatatacctgcttggaaccctgttaaggtacttagccgtggcggatgatcctatgtggctgcttgtcatgtttgacctgcctgtgaaaaccaatgaacaagttcggcttgctaacaggttccgcacgatccttcttgattctgggttcagcatggtgcagttctccatctatgcgcggtatacgcccgcgggtggaagtgacactcgcatgcttaggattatcaaatcgaacattccgtatggaggcaaggttcggatcttgtttttgactgacaaacaatggtccgggatggctaaatattccaacgcagtggaagagaaaccagaaaaagctcccgaacagcttgcttttttctgagttaaaaacctcttgaggcccgcaaattcaacgagaatttgcgggcctcaagtttatcaaggggaatgaagactgattcccaacatcaacgcatattgcctacgcctcttctcaagtttatcaaggggaatgaagactgattcccaacctggtggtttcggcgtcgccggcggattcaagtttatcaaggggaatgaagactgattccnnnnnnnnnnnnnnnnnnnnnnnnnnnnnnnnnnnnnnnnnnnnnnnnnnnnnnnnnnnnnnnnnnnnnnnnnnnnnnnnnnnnnnnnnnnnnnnnnnnngtttatcaaggggaatgaagactgattcccaacactcgacgcgaaacatctccgctattcgcaagtttatcaaggggaatgaagactgattcccaacatatttcgggtgggtgacgtggtggaggcaagtttatcaaggggaatgaagactgattcccaacattgccaggccggacgctaggacttcttcaagtttatcaaggggaatgaagactgattcccaactagcccaaacgaagccggcgctcccggccaagtttatcaaggggaatgaagactgattcccaacttgctaaaggcgctttggccgtgctgatcaagtttatcaaggggaatgaagactgattcnnnnnnnnnnnnnnnnnnnnnnnnnnnnnnnnnnnnnnnnnnnnnnnnnnnnnnnnnnnnnnnnnnnnnnnnnnnnnnnnnnnnnnnnnnnnnnnnnnnnatcaaggggaatgaagactgattcccaacgccagatcgggatgccacggtcagctatcaagtttatcaaggggaatgaagactgattcccaacgtcctcacctacgcgcaaaccctcgttccaagtttatcaaggggaatgaagactgattcccaacgttaaagccagttagcgaaccacattgacaagtttatcaaggggaatgaagactgattcccaacagtctgcctcctcatcggtgaaggcgtccaagtttatcaaggggaatgaagactgattcccaacgctccatccacgaagcgcggccactcaacaagtttatcaaggggaatgaagactgattcccaactcggttggtgcccagtgggttttcaaggcaagtttatcaaggggaatgaagactgatttccaacgttgttccgtagtcaatacccgcggcgacaagtttatcaaggggaatgaagactgattcccaacttccatttctttgccgggtgtaacaagtttatcaaggggaatgaagactgattccnnnnnnnnnnnnnnnnnnnnnnnnnnnnnnnnnnnnnnnnnnnnnnnnnnnnnnnnnnnnnnnnnnnnnnnnnnnnnnnnnnnnnnnnnnnnnnnnnnnngtttatcaaggggaatgaagactgattcccaacgaagagccaacgacgcgcttcgcggtagcaagtttatcaaggggaatgaagactgattcccaaccgtgccactgttgctttgtgaggttgtacaagtttatcaaggggaatgaagactgattcccaacgccagccgcacgcactatcaactaggcgcaagtttatcaaggggaatgaagactgatctgcgagggccccgacctgctggtcgaggcccccttggcagtaactaggcttacgcctctaacactgattttggaaggcgatgtaccgtcaccgcaccaaccgcgttgaaggggtgtagcgggtccgggttctcagagccggtgggcccaccgagctccgagtgtgccaaggcgctcatcaccacgtaagcatcgcccgcgtcccaaccattatcgatggtaaggaagtcaaacatatcctcatagccgttagtgatcgactgctgcaccgggtttccaataccgatgaaacaccactcatcggccgtctcgatgcggggtgcgcgaatcttcttacccttaaccaagtcaacctcaactacagctacaccctcggcctcgatagccacaaaagaggactcgccgcgcgccataatcgcgtgaatatcaccgatggaaagataagcgccctccacctcaacaggcagatacacggtcgatcctggcttcgcgtcggtcagatccatgttgccgccggaagggaagctcggcatgatcgtcgaacccggctgccccgcaggagccgtaccaatacaaccaatcatcgggcgaaccccagctgaaaggttttccgttagcttaaccacgccatcctcgattggaatctgacgcgaaaacacatcctcacccatacggctcgcaagagcgccagagccgggaagcgacacggaccagccgcactccttcaactgaatgtcacgaatcgtcaccttcaacgtgtcaccaggctgcgcgccctcaacgtaaaccgggcccgtaaccgggttaatcgtggattcacactggcttagatccttcttgtcgtgcagctccgcgtaaagagcgtcatcagtttcaaaaccaatcgtctggcccgtccccggctggatgcgcagagccggagcaataccagcatcaaaactcgtgcggccatactctttgccaagaaaatgatcgatgtgcgtcatttggactcctaccattcaggtggcgttcacggttttccgccacggggttttggccatgctatccaaatgccatgcgagggggcgaagccacctctaaacgatccacaaggtggacaggtctggtcatgagttattcgccaggaatcatttacgataatttttgagacgctttatttccgctatatgagaactttctaaataagataattgctcgaaaaatcaaggaaatagatggcaaaagacaataaatatatgaaatgcttcgtctgttttagggggggtattgattggaactatttgacttggttactatgtcgtcaaacccgggaattgagtcctatacggttttgtccatcatcacccaaggggttctgaaccccgccccatcacacagttactggatacgaatatgagacacagctcgaagcttggcctcacctttccttcaaatcggcaagggtggcttctaagcggggtattgagcgcctcgtttttagtagcgacgcttgctgtgcccggtgtagccggagcggaagagcaatcaggtttttcttcgcagactcaaaatggcacatctgaaacagtggttcaagaatcggaaaagccaggtactaatccccctgctttctcggaagattccgatgatcccttagcaaatgagggacggggcgatgtggtcgaacaagactcaacgagtattcaaacttcagatgctgagagtgcagtgagtgaagaactgctgggacatggagagaattctgatcctgatcttgagctaagttccgaatctgccctacctcaagcggtggcggcggaaaataccgcttccataggatactgccagccaggccgatactactcaattgatcaattaggtaacgtgcggccacgtagcgatccgaacgtgaacattgttggtccccctcttccagcttttcctaaattcccggctcagtctaacgacaaccaagggcaattaattcaagctaacgctctgggaatcgcacccgacggtactgcctacgcactcgccatatacgggaagaaccagcaatggataaacggaaagtgggattggggtccggcatcgactatttggatcgagattcgaaaaagagcccctaaagctaacgcgccctgggagtatgtggctaggcataaatcggaatttggggattcttgggttgcaggtggagtggaccccttgaccgggacttattattttggccagttcacccagagctcggtgaaagtagcgcagggccaggtagagatccccattgcttttaggctcttcaaggttgaaaacgggaccatagaattagttggattgatacatcctcaaacagaacttcgacgtagcggtagcttgaattatgttagggactttcaactcaatggtgatatcgctttcgacatcctcggaaacctccatattctaagtggccacccccttggcgcggatttgtggaccgtaagtaaagaacggctggacggccttaaagggggcgaaattagaagcgacactgtggtacaaaaccgctttgacggttctgccaacgttgtcggtgcgtcatttaacgcaaatggtttgctgtggatttccggctataaacagcactacacatttaacccaacaacaaatacgatggctccttttggccagcgacttgcgcagcaaaatagtgagactgacctgggttcttgtgttacaccccccaccctaggcgtggagaaggttttgagcggcccgagaatttcagatgaacagttcaagctttcagtggatcaccaacgttccgacggtagccttgtcgaatacacggttccagtgaccaccactggtgaaaaagacgttgttggagggcacgtaacaaccgttgttgtaggtgaagccaaatacaagatttctgaaagcattgttcatcaacctaaagcgaatgatgctgggcaagtaaccctggacatgtttaagtccagtctcagttgcgccgaccaaaacgggaaagaatacatagcgaacaaagaagcgagagacgactgggttatcaccattccaaaaagcgtcagcgtgaccaaacctgacactggagaagttgaaaacgtggttgcaaatattaggtgcactttaaccaacacgccacgtaaagcaagcgtagcttggtcaaaagtagatgattcgacccccgcaaaaccggtttctggaagccagtggagaatcgccggaccattcgaaacaaatttggacgtcacagactgtgtggcagatagtgcagagcaatgcgacgacttagataaagatccagcagcaggcaagttcaaagttgaaaatctaaactttggggaatacacgctgtctgaaaccagtgcgccggagggctatcagattcctggagacagcaacttgcgtacattcaccgtggactccaaggtacctgattacgtattcgaaactgcgttcgtaaacccgcgcataaaaggcgtggttacttgggcaaaggttgacgaatctaagcctaatccacaatatttagccggttcgcaatggcaactgaagggaccgggcgaggcgaagacagtcacagactgcgtggcgcagacccctcaggaatgcacaagcctagacaagaatccggccgcaggccgattcaaaatagatgagcttgtgtggggagactacgtgttgttcgaaacaaaagccccagcagggtacgaactagatggcacggagcatcgtttcaccatcgacgcaagccatttgaaacacgagtttaagacgccgtttgtgaataagaagaagcaagcccccactctgccactaaccggcggcataagtagagacttctacatgcttataggttctgtgttcatcgccgttggaatgacggcagtaaccgcacttggcattcgtagacgcaaacaggaggcatgagtggtgcaaactatcccgaacctcgctaagcgttttcaatcagataagaaacttcaacagatttaaaaagtgtcaacacacgaaaggaaaccctggaaaatgaacacgaaaggaacagccctcgggaaggttgttgcgagcgttggggctgttgctctcactttcgcaggtcttctcggtggcgcaacgatcgcgcaagccgcaccgcaggtcggccccgatcagcccgaccacccaaaatcgggttcgctgaccatccacaagtacgttggagctgaaggcggtcgtggtgacggtacggagcaggtcatcgaaggtaaagatcctctagcaggagccaaatttactatttggcagcttggcaagaaggatggagatacctgtaaagcacttgatctaagcacctacgaggcgtggaccgatctaccagagagcgctcctaagaccattgaagaagtaaagaacaccttctgcctcgtgaacgcgaatgggaccgcacagactacggatacgaacggtgaagccaagttctcggatctagctctagggttttactacgtgcaagaaaccgaggcgcctgccaatatcgtttcaaagacggcgccattctacgtatccattcctctgccgcacgagacggaaaactggatttacgacgtgcacgcctaccccaagaaccagaagggcgacgctcctaagaaggaaatcaatgcagacaagggccagtctgacaatggtgttacggttggtagcgtagttgaatggaccatcacgcaggttgttcccgctttgaatgccggtgaaaagtacacgtctgcctcaatctgggattacctgccagatagcctcgaatacgctgaaaccaccgacgtctcctacgacggcaccaagcttgcagatactgactacactcttgtccagaatggccagaacctcacctgggagctaacggatactggcctgggcaaactccaagcaggcaagacaatcaccgtgaagttcaagaccaaggtgctgaaagtaaccgagaccggtgatattgaaaaccctggttcggacgacccggagacgccgggttacggttcagagttcaacggtaacaagatccctggagatcccacgcctcacacctactggggccagctccaggtaaccaaggttgacaactctaccccggttaacaagcttgctggtgcacagttcaaggtattcgataacttcgcagacggcgcatgcccggccgcggctccggctgaaggtgctgtagcaaccggtacttccaacgcgcagggcatcgtgcagtgggagaacgtcgaaccggataacccgcttggcctgtgggtagcgaactctaaggatggtccgctagcggatccgtccaagacgtactgcctgtacgagaccaaggttcctgctggctacgccgcagaccagtctggcaaggctgtaacgattaagcccggcacgacgctgacgaaggacgtcaacgatctcacggtcgttaacacgaagaaggaagggccaaacctacctcttaccggtgctggcggaaccctgctacttagcatcattggtgttggtctagcagccgctggcgtcacgcttgccgtggtgtcacgtcgcaagcgtcaaaactagctctaaacagagcagttgaacgtaaggggctctggtggctaatagttgcctccagagccccttgaacaaatcattagagacacaatgggaactgactcagaagcaaaaaaactcgcgcccactggcaaccggcgcgacctaccacccgcacccgtggcgtggcggttcccatggctagccttcatcgccagcctcatcattgttgtcggtgtttgcgtattcctctaccctcacgcggcctcctggttttcccaaaaagaacaatctcgcgtcatcgccctcacacaagaaatcacagagcaaaacgagaagaaaaagcccaacccatacgttgcgttgcttgagcaggcgcgcacatacaatgaagccctcgcctccggtgtgaaactagaagcaggcgccaatgttcccaaaggctacggcaccaacagcaaccaaaccctgaactaccaagacatgctctcggacaacaaagaaggcgtaatggggcgcctgcactacgcgaaattagacattgatctgcccatctaccacggaacctcggaagcaactcttctcaaaggcgtcggacaccttgaaggaacgtcactacccgtgggtgggattgggcaacgctccgttttaactgcacatcgaggcttgcctgaatctacccttttcacacatttggataaagctaaaaagggtgacattttcactgtttctgttcttgaccaggttttcagctaccgagttatagatcaaatcaccatcgaaccatctgatacagaaactctattcgccgatccagaaaaagatctggtcactctcatcacctgcacgccacttgggataaacactcaccgcattctcgtaactggtgagcggatcatccccactccacaatccgaactggacgatgccaaaaaggcgcctgacctgcccgggttcccgtggtggatagtgatcctactggttaccgttacgggcacgggaatctacatttggcgaagcggtcgacaaaatcgatccgccaaaccaacgcaagcccaaggctaacgggtagacactaaccgataagcgcttcggtgggctggagtgcgggtcctctgaaatcgaacaaagacgtatcaggcgattcggattgaacggtaacggttaagcgccgctgctaaatcaaccatgcggggccgcaccatgaacgcggacttttctggaccgccaagaccatccaggccgtgctgctcgataatctcatccaacgccctcaaagcatcggccaaagtggtttcgccatcaaacgcggttgcgcgctccccatcggtaagcgcccgaatcgcccacgcgattgcctccgtctggcctccatccacaatctgctccacgttggacacgtcaatatcttgacgatccagcgaaatgctatccagccccttagccttcgttttcgccttaccgccatgcgccttaagcgggagcatcacgcgctgcttcacagccgggaaatcctccacgtccatacgctcacgcggctgagccgccacaacctcgcgcgccttctgcgtcacgtcatgcgccacatagctatccatcatgagcaccaaatccgccacatccagatagtcaccggagccgcccatcacca

SEQ ID NO: 586 - DNA, 23318 bp, synthetic construct
  misc_feature 1..23318: note = Synthetic
  source 1..23318: mol_type = other DNA
ctagccgccagctagatctcgaacggttcgcccgcccgccttttgcgcgtgaaaaactcgcgcaactggcgggcggcgtcgtcttctctgaccccgccgatgacctcgacggtgtggttgaggcgggggtcgcggactgtgtcgcgggttgatccgcaggcgccggccttggggtcccacgcgccgaagacgatgcgggggatgcgggcggcgaggatcgcgccggcgcacatgaggcacggctccaacgtgacgatcagggtggtgtcgagcagccgccattcaccgactgcgagggcggcctgccggatggcgacgacctcggcatgcgcggtgggatcggggtgcgcggggtcttcacggcagttccacccgattcccagcggcgtgatttcctccggcggcagcgtgaggtcggcgttcgccacgacgagggcgccgacgggcacgtcgcccgcgtcctcggcgcgttgggcgagctggagggcacgggtcatgaggtcgggccagggttccacaccgatagggtagcggcagcggccccggcccggctgtcaaccgggtaggttaagggtatgcgctttaccgttatcgaccacccgctggtggaacacaaactgaccgtcttgcgtgaccgcgagacgtcctcgcacacgtttaggctgctcgtcgacgagctggtgaccctgctggcgtacgaggcgacgcgcgacatccgcgtcgaagcccaggcgatcaacacgccggtcgcgccgaccatcggcaagaagctgacgtcgccgcgtccgatcgttatcccgattctccgcgccggcctggggatgctcgacggcatgacccggctgctgccgaccgccgaggtcggtttcctgggcatgcggcgtgacgacgagacgctggcgatcgagacctacgccaaccgtctgccgcaggacctgacggaccgccaggtcttccttgtcgaccccatgctggcgaccgggtccacgctggttgcggccattaattacgtcctcgagcgcggcgcccacgatgttacctgcgtgtccctggtgacggcgccggagggcctcgagcacgtcaagcaggccgtcggcgaccgtgcggacgtccagatcgtcacggcggcgttggacgagggcctcaatgagcactcgtacatcgtccccggcctgggcgacgcgggcgatcgcctgtacggcatcgtcgacgcctagagtctgggcgagggcggcggcccggtttcgcggccgggttgccgcgcctgcgccctgtggtgtaactcgcagagtgtcggtttgctttcacggccaatccgtcgttaaagtggtgtgccgtaccgcgaggtactttggtagcgtgtccgagcggccgaaggtgcagcactcgaaatgctgtgtggggcaacccaccctgggttcgaatcccagcgctaccgccatgaagtcccggaatctcaaggattccgggatttttgtttgcccgggggcggtgtcgggggcgcgcacatcgtttggcgcagtccgctaggtagggtggggcgcgccccgaccgaaaggactgtgtaagcaacagatagaggcgcgcccgatgtcacgctagcaacgctgtctggctggggcaaggtgtggttcgccgcgcgatctcggtgcacagctctgctctcagcgcggtgaatcgatcgcgcccacatgaagaccccctgtccggtgcgtgggacacgtgccacggtgcccgctgttcgttttgtcacacgggtggcgggttggcgcgcaggacgccctcgcgttgcgcacgccgggaaatggagaatctctgcgaaaccggggaaaacgatccgccgagggcgccaaagggcgggctcatgcgaggtgccgtagtccttcattaggtcgagcttgagggccgaaaagccctcccctctgatgtcagattccgttaggcttttggtggcctgtctggcatagctgacagacttgccgcccttatttctcacatcggttccatcagacggagaagtcatgacccggaaatgctcggcactgtttgcgctgatcagcgcaatcgccctcgtcattaccggcctgtgtcacgcagccccacaggcccaggcggcgcccagcgccgacaccgatagcggcaagaacgtcgccctcgctgcgaacggcgcgaaagtcaccgcctcgggcgttgaatcgggcacgaacacgacgcctgacgcggtgatcgatggcaaccccgacacgcggtggtcgtcggattacaacgacaacgcgtggctgcgggttgagctcaaggacgcgacccagatcgaccacgtgaagatccgctgggaggcggcctgcgccccgagctacaagatccaggtgtcgaacgacgataaggattggaaggatgccacggacgtgagggcgctcgcggagtgtgggcagaccgagacgattaagctcaacagctccgtcgcaaaccagaagtggaagtacgtcaagctgcaggccctggagcgtaagccgattaatggcgtcaagtatggcgtctcgctgtttgagttcgaggtgtgggacggcgccgagccgacgcccgcgaaggtcccgaacctggtgccgctgccgaagtcggtcaaggatcagtcgaaggacggcacggtcgtcttctcgctgacctccgagtcgaagatcgtcgccaccggcgacgcgacggctccggcgaatatcctggccgccgagctgcgggcggcgacgggctatgacctgccggtcgtcgataaggcctcgggcgccaacaacatcacctttacgaagggtgcggtcaccggcgaggcgggcgccgaggcctacatgctgaagacggccgccgacggcgcgacgctgacggccaactcggcgcacggcttctttaacgcgacgcggacgctgcttcagctgctgcccatccaggcgtcctcgaagatccaggtcgcgggcccgtgggatgccccggccaccgaaatcctcgactccccgcgttacgagtaccgttcggtgatgatcgacccggcgcggtcgttcctcacggttgccgaggtcaagtcgatcatcgaccagatctcgaacctcaagatgtcgtacctgcacattcacctggccgacgaccaggggtggcgcatccagatcaccaacgacggccgcgtcgacggtgacgacatcgactacaacctcctgaccgaggtgtccggcaagacggcgatgaacgtccacgagaggcagggctcccaccaggtcggctacagcgggttctacacgcaggccgactacaaggacatcgttaagtacgcgaagagccgctacgtgacggtcgtgcccgagatcgacgttcccggtcacgtgaacgccgccctccacgcgattccccagctcaacacggccgggtcgtcgcacaacggtggcggcaagacgacggccccggcgaatgggacgggcaacgtcggctactcgtacctcgacccggattcgcaggccacctggcacttcatcgggcacgtgttcaagcagctgtccgagatgacgccgggcgcgcgggttcacatcggcggcgacgagccccactcgttcactggcaggtacggtgaggccaagtacaacgaggtcctcacgaaggtcctcaagatcgtccgcgacgactgcaagaagaccccggtcggctggaacgagatcgcggcgaccgagctgaaggagaatgacggcatccagtactgggccggcggcacggacaagctggtctcggcggcaaagaacaagcacgcgaagatcgtcatgtcgcgcggttccagcgcctacctcgaccagaaatacaactcgaagaccccgctgggcctcacgtgggcgggttgcggtactggcggctgctcggtgcagaactactacaactggaacccgacgaccgacgtggtctctggcctgtccgagagcgacgttctcggccccgagatggcgctgtggagcgagacgatccgtggtggctccgaggccgagttcatgatctggccgcgtatggcggccggcgccgagatcggctggacgccgcagaatgcccgcagcttcgagggcttctccaagcgtctggccagcgtcggcgaccgctggacgctgcagggccagaacttctacgacaccgatcaggtgaactgggattacgccctcgccgcgccggtgaagaccacgggcgcgaccggcaaggatgtcgcctacccgttgggccgcctggtcgcgccgggcaccgtcctcaacgacacgtccagcgtgtcgccggacacgaaggacgacgcggacggcgtgtcgaagtcgcagatccccgcgaacaccaaggtcatggtgaactggggcgacgggacgccggcaaccgaggcgacgatccagacggatcgcgagcgctcggcctacaacgccccgcacccctactacctgacggcaaaccacaagtacgcgaccgacggcgaccacacggtgacgctcaccgcgggtgagcgcacggccacgacggtcatccacaccgagggcggcgccgcggatcccgcggtcttcaccccgtggaacccggacgcgacggcgccctcggcgaaggtcaacccgacggagttctcgatcaaggaccgcatcgaggtgcaggcctcgggcttcaagccgtacagcctcatcaccatgaaggtcggcgacgtcgagctgggccagctgcgcgccgactcgcagggtaacgtcgcgccgcagtgggtgttcgtcgatcccgaggtcctgcctgggccccagaagatgacgttcaccagcggcacgcgcgtcgccacggtcgacgtcgtcgtcaagaacggcaagatcgtgttgaagaacccgctgaagcacgatcagctgagcgtcgtcgacgtcgactctcaggagacggtcggcgagaaagcccccgcgaccaacgccatcgacggtgacaagaccacgttctggcacacgcagtggcagggcactcagaagccgttcccgcactacatcacgctggcgctgcctgccgaccagacgtgcacggtgacgggcttcgagtacacgccgcgtcaggacaattcgaacacccgggccaaggactacagcatccaggtgtcgaacgacaacgagaactggacgactgtccacgagggcagccttgaggagggcgccgcgacgcaggcggtgaacttcgaccaggagcaccagctgcaggccaagtacgtcaagatggtccagaagaactcgcagaacggcgataacttcggcggcgccgcggaaatccgtgtcggcgcgatctgcaagaccgcggacgagccgtcgaccggcggcgatgacgacgacgcccagtgcgacgcacagaagaccgcgacgacctcgtacccgaccagcacggtcgtgttcccgggcaacgacaagaagtcgcacaaggtgacgtacgacaagaactcgttcatggtcgacggcaagcgcctgacggtttggtcgggcgagctgcactactggcgtctgcccgacccgaacgggtggcgcgacgtcctccagaagatgcgagcggatggctttaacgccgtgtcgctgtacttcgactggggcgtccaccaggccgagaaagacgggaagttcgagtttacgaaggacacgtaccgcgacctcgaccagctgctgacgatcgcgcagcaggagggcctgtacgtcatcgcgcgtcccgggccgtacgtcaacgccgaaacctcgatgggtggcctgccggcctacatgacgaacgaggcggcgaacctgcgctcgaccaaccccgaggtgctcaaggcgtcgaaggcgtggctgcacgcattcaacgaggtcgccgcgaagcaccaggtgaccgacggcggcggctcgattctgctgtaccaggtggaaaacgagatgcccaactcggacgacgcgcaccaggccttcatgaaggcgctggtcaagcaggtcaaggacgacggcattaccgtgccgctgttccacaacgactggggcctcaacggcatctttaaggacgccaagggcgccggcctggacctctacgcctacgacaagtacccgatgggcttcaactgcgcggcgggtcgcggccaggtgccggataccgagaacacgttccgcgggatcgccccgaacacgccgcacttcatcgccgagtcgcagggtggtgcgttcacgccgtggggcgcgaacttccagccggcgaagtgccgcgagtacacggacgccaacttcattcgacagtggggcgccgcgaccatcggcaacggtgtgaccgcgcacaactactacatggagtacggcggcacgaactggggctggacgggtgcgcccgcgtcgggcttcacgtcgtacgactacggtgctccgctgaccgaggaccggacgatcaccccgaagttcggggtccagaaggagctcggctacttcttcgcgggcgtcccggcgttcgccagcatgaacccgatcgccgcgccgacgccgaaggtcgagagcggggcgtcgctcaacgtcaaggcgcgtttggcgggtgacaccgaggggtcggcgaccggcaacggcacgcgcgtcctcgcgatccgtcactcggattcgaacgacacgtcgacgacgaagttcacgctgccgctcgccctcggcaagtcgggcacgctgcagaccaaggagttcagcaccgacgacaccgattcggcgatcacgtacaacggttcgtggaaggccgtcaatgaccagaccgcgtggaagagcacgctgcaccgctcgacgacctcgggcgacaaggcgacgttcacgttcgacggcaccgaggtgtcgctgatcgtcggcacgggcacgaagaacgggacgttcaccgtgtcgctggacaacgggacgccagagacgatcacgaagggcatggtcgacaccgaccagaacaagccgtcgcaggtcgtcgcgtacaagaagaccggcctcgccaagggcaagcacacgctggtcgtgacgaacacggggaccgacggcaagacgacgctcgacatcgacgcgttcgatgcggttgacggtgccgactcgggggcgaaggtcgtcaacgacaacgaccggagcttcttcacgtactcgaacgcgtggacacacgacaccaactggtgggccgcaggcgacatcgaaaaggacgagacctcgaccgacaagaagggcgagaccgccgagttcaccttcaccggtgtgggcttcgacctcatcggccccttctccgagaaccacggttccgccacggtcacggtcgacggcaaggacgtcggcaagaccaaggaagaggtgacgagcagcgcgcaagcacagaaggttctcttcagctggcgtgacgagtcgggccaggccaagaagcacacggtgaagatcaccgttgacggtgaggctttctccggctccaagggcacgttcgtcgcgatcgacgccgtgcggtactacccgacggccgacgcgttgccgtccgatgggtcgccgaagccgggcgagattgggtggaagcagatcccgcagcaggagggcacctcgctcaccctgcacggccgcgacgccctcctcatcaccgcggacacggtgatcgacggcaagcagctgtactacacgacctcgcagatcttcggccagccgctgccggtcaacggtcacaccacccagtatctcgtcggctacgccggcgacgcgggcgagaccgtgttccacttcgagaaggaaccgcaggtcacgctgcctgagggtgcgacgaaggtgtgggatgaaaagaccggccagctgcgcctgaactacacgcacaaggcgacgccgcaggagatcacgattaccgagggcggcaaggcgctgaccctgcggatcatcacccgcgatcttgcccagaccacgtggatcatccagggggccaacggctcgcagcagacccaggtcgcggtcgagggcgtcgagctggcgcgcacggccacgttcgacggcggcaagctggcgctgacgggctcgaactcgaaggccgcggacatcaccgtcctcgtgccgaccggcgtcaaggccgtgacgtggaacgggaccgagctgaaggtggccgacggggtcgcgaccggtaaggaagcggcgccgaacacggtcaagccgatcaccctgcagttcgtcaagcacaccgacaacgcctacgcggcgaaggccttcgacgactcgaagtggaagaccgcgtcggacacgacggcggcgaacccgaagcagcagggtccgcagggtaaccagaaggtcgtcctcgattcgaaccactacggcttctatgagggctcggtctggtaccgcgcccactacaaggcgacctcggatcaggcgatcacgctcaacggcaacggcggcagcgacgacaaccacaacgggcccgcgtttatgcaggtctgggcgaacgggcactacgtcggcgcctacccggcgaatggcacggaccagcaggtcacgctgcccgagggcgctgtccaggcgggcaaggacgtcgtcctcgccgtcctcgtcaacaacatcggtcagaacctcgactggtcggacaacggcctgtcgaagcagaaccgtggtctgaagggtgcgacgatcgccagcgatggcgacgtcacgtggaagatcgagggcgccacgacggccgacgccgcgaagcacaacccgtctgggtcgatctacaacaacggcggcctggcgggcgagaaggccggctggcacatgccgggcttcgacgacaagtcgtgggagaaggccgagacgctgcactccgcggcgggcgtcacctggtaccgctcgacgttcgacctcaacgtcacggcgggcaaggatgttgcgttccacctcgacctcgagtcggagcgcgcgccgaagggcgacaaggctcaggcgacgatcttcgtcaacggctggaacaccggcgtgtacatcggcgatgcgggcccgcagacgtcgttcacggtgccgaaggcgttcctgcacctcaacggcaagaacaccgtggcgatcgcgatcgcggcgaagagcgacacgatggggccggaggccgtcaccctgcgcgccgtccacacgaccacgctgccgaaggtggcgtgcccggagacgcccaagcctgacgatccgaacaagccggtcaacccggataacccgacggcgaagacggcgctgaccgtcacgccggacgtcgtgaaggcgggcgaggcgacgaccttgaaggccaccgggttcacacccgacaagctggtcgtcttcacggtcaacggcgtcaaggtcggcgaggcgaaggccgacggcaacggccaggcgacggtgaagtacacggtgccggcgtcgtcggcgctgggcaagttcgccgttgttgccagccagccggacacggggctcagcgccacgtcgtcgctgacggtcgtcgcgtcggatcaggcgaaggtccagccgaaccccaagcacgacggcaaggcgaccgacgggaaggccaagacgggcccgtcgcacggcaagctcgcccgcacgggcgtggcgctgcgcggcgtcctcgtggcgatgctgctgtcggccgcggccgggttcgcactgaccaggcgccgccgccgggacgcgtgaggtacgcgagccaggatgcgcaaggcccgccggcggcgtgagtgagccgctgacggcataacgaaagccggggaggagaaatacctccccggctttcgtgtattttctgtttgagtggcgaggacgccggctatagcgccgaagaataaacgctcgtcataaacgcgaaacgctcacctcaattgtcaaaatccaacgttatgtacgctgatttaacaagttaggtgagcgtttcgggttcggggtgagcgtttcgcgcggggccttcttcggccggagcgacacgtctgaaatggctgacgtgggtcccagtaaagataatccaccggttgacgatatcgttccggatcggcaagtcgccgggtaaccttaggcctatggaacggaagcgttactacgtgggtatcgatgttggtctggcttctatcgggtttgcggcgatcgaggtcgatgacgacggctttcccagcgagatcctctgtcagaatgtgctcatccacgacagtggcattgatcctgacggtcaccagtacgcgataactcgtctgaaggcttccggagctgcccgccgcgtccgtcatgggcgacgcaatcggcagaagcgactcgcgcagctcgatgacctgttgagggaactgggatggccggttgaagaactcggtggtcccgtcagcgactttttcccgtggcgtgtgcgcgcaggtctggctgagacatatgtggaggatccagcccgacgggccgaggcgctgtcggtggccgtgcgccacatggcgcgacacaggggctggcgttctccgtggcaacgcacggaaagcctccttgttcccgcggaggattccgaatacatggtgaagttgcgtgagcgtatggatgcagctgccggccgcaaacttcctcgcgaatatacgactgcgcagatggtgtgtgcgctgcagctttcaccgaaggtaaaccttaggcgaaagggtactgacaagaacgtcaagaccccactgtttgagaggctgcaccaaagcgacaatgccaacgagctgcgcgcgattgctcgtcgccagcgcctcgatgacgagacattgcggaagctgattctcgcagttttctacatggagagcccgaagggtaaggcagagaagcgagctggcaaggatgctttgccgggccaggggcatctgattcgcgcagaggtttcacacccggcattccagcgcttcaggatcgctgcgcaagtggcaaacctgcggatcgagaatccagccaccggtgatcgcgagaaactgcctcgcgaggtgcgggcacagttgattgactatctctgtaatttgaccgccaaggagggcccgacctggcctgatgtggcagagttcgtcggagtggagcgcagtcaactgtcgggaacggcggcacgggccgactacggggacaggcctgccaaccgaccgcttgtcgattcgacgaatcgggcgttcaaccagtgcaaggtgaagtcggtccagaagtggtggcgcaaggccggccccgaggcgcgcggatgcctcgtgaccgccctctcaaacagctcgagcgtggacgagggagctcctggttggaacgaagtcgaggagttgctcctatcgttgtcggacgaggacctcgagaagctcgacaagatgtcccttccagcaggacgggctgcgtattctgttgattctctcgagcgcctgacggagcggatgatcgcgacaggcgaggatctgcacgaggcacgcaaagcggtcttcggtgtcgacgatgattggcggccacccgccgagcccctcggtaccccggtgggcaatccggcagttgaccgcgtgatcaaggcagtcaatagatggctgatgatggcagagtatcgttggggcgcgcctgaacgtgtgacgatcgaacatgtccggaaaggctttgtatctgaagacgcagcgcgacgcattgataacgagatgaataagcgggcgcgtgcacgcgagaagctcaacgaggacattcttgcggcgacgggaatagagcacccacgccagagtgatgtgcgtcgctatgaggccctccaaaggcagaatggacagtgcctgtactgtggcgcgccgatcacgttcaagaccagcgagatggaccacatcgtgccgcgaaaggggccaggttccacgaacactcgcttcaatctggctgccgtctgtgaaccgtgtaaccgggcgaagagtaatatcccgtttgcgcagtgggccaaagaaaagcaacgtccgggtgtaagcctggaggacgctctggttcgcgtgcaggcgatgatatgcgatagcgggatgagcgccagagatttcgcgaagttcaagcgggaagtccaactgcggctgaagcgcgaagaagacgatgcccccatcgacaaccgttcgattgagtccgtggcgtggatggcgcgagaactggctggccgggtcaagtatcactacggagattcgggtaccaaggtccatgttttccgcggaggaataacagcggaagcccgcaaggcctcggggttcgaggggcgggtggaactaattgggggcggggtaaagacccgatttgaccgcaggcaccacgcggttgatgccacagtcatcgcttttatgcgctcttctgtggccatggtgctgactcaacggtcgaatctgcgtatcacgcagcacatggatcctcacagtgtcgacgagtacggtccatggcaggagtttgagggcgagcgcgtcagtgatcgtcagctctatcgtcagtggaagaaagcgatggctaagttggcggatcttacgtgccaggctgtctccgatgacgccatcccggtgcagcagaacctccgtcttcgttttggaaacggtaaggtgcacgacgatacggtcagtgagctcgtgaccaagcgcgtgggcgaagcatggacgctggctgacattgaccgtgccgcgacaccggccttgtggtgtgcgctgacccggtgcccagagttctcctggccaagttcggaaaaggttgtgtgcctgcctgagagtgacacgcgatgcatcgtggtcaacgggatgcactatggctcttccgactcggtcgaactcttcccaacctctgcggcttcgatgaaggtgcgtggcggtgccgtggctgtggggagctcgatccaccatgcacggttctatcgtgtcaagagtggcaagaaggacagcttctatatggtccgcgtatttgtgccagacctgacggctgcgcggggaaatgatctcttctcgctagagctgccttcacattctctttcgatgcgcggcgcgcccttcaagcttcgcaaagcgctcgaagatggggacgcggcattcatcggttgggttacggttggcgacgagttgctgctcgaacaggggaggtcacttctcaaagacctgaagcccgacgaggaggatctggttgtgacgcgttggcgcgtcgggggttttgaaggtccgggcctgatcaatcttcgaccggtgtatctagctaaagagggtctcgagaatgtcgagatgcaggtggatgtgcctttactcgacagtaaaggatggcgtctagccgtaaataagatgttgtcgagcggccatgtccaagttattcgccgtgacgcacacggtcgcattcgtcggcattcggatgcccatcttcctgtgagctacgacctgacgtaggtggctcagatgctcggtgagtggcgaatccttgactgttcccgaatggaggggcgcataacggcctcgcgtggcagcgttgtcattgaggcatgcgatcgtccgcctgtcagggtcccgatggccgacgttgcgtgtgtactgatcggctaccgggtcggtctctcgggaggagccctccatcacctgacggccggtggcgcggcggtcttgctctgtgactggcgtggggtccccgaggccggcgcatatgcgtggagtgaacatagccgaatcggagcgagacgggctgctcaagcgcgtttgtcattgccccggcaaaaggcggcatggcaacgcattgtgagggagaaggtgctgaatcaggcgcgaactcttgatctgaccggtggtgacggcggcgcattggtggaacttgccaagaaggtgcgttctggcgatccggacaacatcgagggacgcgcggcgtcggagtattggaagcgcttatgctccgaggacttccggcgaagaatgcatacagaggtcgggttcaatggcatgttggactatgcctacacggttggacgaggccatgccgtccgcgccgttctcgcggcggggttagaaccgagcatcggggtccaccatcggcatcgagaaaacatgttctgccttgccgacgatttcatcgagatcgtgcgaccagtcatcgactatcacgtgtggtcgctgtggtccgacggcgtgatgagcgttgatgagggcaggcaggctctggttgctgcggcgtcagcgccatatagcgccgacggatacacggttccaaccgccctggagatgttggctcaggcttttggccaatacgtcgaaggccagaaagagaagcttgacgtgcccagatggacggcgtgggtggagacgtaggtcgttacaccgtggccgatgatccgatgtggacgctcgtgatgtttgacttgccggtgggtactgcagcccagcggcgtcgagctacgaggttccgcaacatgctgctggacctcggcttctcgatggtgcagtactccgtctacgtccgctacgtaccaacgggcgcgccaactccgccgatcgttcggcagatcaaggagaacgtcccgcctgatgggctggtcagagtcatctacataactgaccgccagtggtcaaggatgctcaacttttggggatcgacgcaggtgaaccccgagccggcacctcagcagttgcagtttttctgagggcacacgccgacattttggcgtgtttccgcggaaaaccgggtgccctcaagtatatcagggggaaaggtaacagatccccaacgcccctctacaagcaatatctgcctcagcaagtatatcagggggaaaggtaacagatccccaacacgtcggacaaagcgacgacgaaggtgacaagtatatcagggggaaaggtaacagatccccaaccccagacgcatgacgacacgcatcgcttcaagtatatcagggggaaaggtaacagatccccaacaagggtggcagcgtccgcgtcttgaatccaagtatatcagggggaaaggtaacagatccccaacatccacgcgaaggaactcacgcatgccacaagtatatcagggggaaaggtaacagatccccaactggggcttcgaaggccatcgccggtatccaagtatatcagggggaaaggtaacagatccccaaccgctgatcatgcacaagtggaatgagaacaagtatatcagggggaaaggtaacagatccccaacggccggattctggccagccgccccggtgcaagtatatcagggggaaaggtaacagatccccaacgggcattcggattggtcgacgtctctgccaagtatatcagggggaaaggtaacagatccccaaccggccggtaaacgagtaaaaattctagccaagtatatcagggggaaaggtaacagatccccaacgagaagccgcgctaccgccagcctatctcaagtatatcagggggaaaggtaacagatccccaactcggattctgtttggtgctcgcgaatcacaagtatatcagggggaaaggtaacagatccccaaccgtcatcggcaacctgcaccagctgggtcaagtatatcagggggaaaggtaacagatccccaaccggttttgcggcaggaggtagttgcgggcaagtatatcagggggaaaggtaacagatccccaacggctatagcgacgacctccaagtcgtcgcaagtatatcagggggaaaggtaacagatccccaactgatccgggatagcgtgtacgtcgtggacaagtatatcagggggaaaggtaacagatccccaacctaagcgtgaacgggggcgcctaaatgtcaagtatatcagggggaaaggtaacagatccccaacgttgccttcgaggactctcaaggcgacacaagtatatcagggggaaaggtaacagatccccaacgacaaggttggtggccacacgtgggtgacaagtatatcagggggaaaggtaacagatccccaacgatacgaacggcgggtttgtaagcaaccgtacggtactttttggtagccagggtcgtgcggatagctggcgagaatgaaaactgggtcggaccttgcggtccgacccagtggagcattccaagggccgctaacgaggcgaccccttgttggttatctgttaccggttcgattctaggggagatacgtggccgctgcaatggggttgcggagtcagattccggcgccctcgccctcgggttattcctttggggcgatgtggaggtcgacccccagttcggagatccggcgcgcggtgtcgtcgttgaggccccagtcggtgatgacgccatcgacgtcgtcgagagaacacacccgcaccatcgacgcggcgccgtatttagtcgagtcggcgaccaacagcgtcttcgtggcgaccgacatgacggcccgcttaagtgcccgcttgccttcgcccggcgcggtgattccgcggctcagcgaccatcccgacgtcgagatgagggcgacgtcgacgttgaactcggccatcgccgcggccgccagggtgccttccgttgccccgatcgccgggtcgacgctgccgccgatgaggaacccgtcgactcccggcattgcgcacacgtcctgcatgacgaacaggtcattggtaataattgtgagattgtgacacgctgtgagctcactgagggtgacgcgcagcgtcgttcccgcgtcgaggaatacggtcgagccgtcctcgatgagggtcgccgccagccggccgatggcttttttccgcggaatctcgaggttcttgcggctcttgatgtcgagcggaacctcagcggtgccactgtgggccagtcggacaccgcccctcaccgacatgacgattccctgcgattcgagtgctgcgatgtcgcgtctgatcgtcatctgtgacacatcgagagcctctgcgagcgtgcggatgctggcgattccgtgcgactgcagcgctttgaccagcgtttcttgccgctgagcggggatcatgggcgagccggccatgtgtactcctgtggagatctggtaaaaggtgttccgttatgggtgaaggtgtgttactttgtgttcatggataccaaagcttcacgaatccactctatcgaatccaccggggtcgtcctcatcgtccgcacagattcgccggaatcggcctacgacgttgccgaggccgccgtcgagggcggcatccgggcgctcgaggtcccgtacgcggtgcccgacgccctcaaggtcatcgagcggctggccgcgaagcacgacggcgacggcgtcgtcgtcggtgcgggcacggtcctggacgcgggctcggcatacgcggccgtgtcggcgggtgcgcagctgctggtcagcccggttgtcacccaagagatgctgacgatcgccaaccgctaccagtgtgtctcggtcggcggcgcattcacccccacggagatgctccagacggcggagctcggcgccgacatcgtcaagctgttccccgccgagatgttcgggccctcctacctgcggtcggtccacacgccgctgggccagcttcctatcatgccgacgggtggcgtgacgaccgacaacgtcggggaatggttcgccgccggggcgttctcggtcggaatctcctcgtacatctgcaaggcgccctcgctggccgaagccaccgacaggtcgcggagcctcatcgacactatcgcctcggtgcggtagccacttttcctcctcattgcgcgtctcggctgggacgtgcacgggtttcaccgccccacctttttcttctcagcacacaaaggagtgactatgagtgagcacaatcaggcgaagcataatcgcgatgtcgccctcgcctcgttcaccaagttccgctggttcttcattgtccttatcgtcctggccggcgttatcaactacatggatcgatcgaccctggccatcggaaatacgacgatcgcgtcggacctgcatctcagcaccctgcagatgggcgcgctgctgtcggcgttctcgtggccctacgcgctggccaacctgcccgccggctacctcatcgaccggtacggcgtgaaaaagatgttcatggcggcggccatcgcctggtcgatcgtggcgatcgcgtcgtcctttgcccagagtttcgccttcctctacctgtgtcgcgtcctcctgggcgtcgccgagtcgccgttcttctccgcgggcctcaaggcgtcgcagctgtggttcgccgagcacgagcgctcgctcccggtttcgctggtcaacacgggatcccagatcggtaacgcgttggcgccgccgctcctcagcttcctgctgatcgcccacggctggaggacgatgttcgtcatcgtcggcatcgccggcatcgttgttgccgcgatctggtggttcgcctaccgtgacccgaaggaagaggaggccgaggcgatcgccgcaagcgcacccgcgaacgcgaagcagtcgctcaagccggtggaaaacgcctcgtggttctcgctcctcaagacgcccctcacgtggtacatggcccttggcgcgttcgggattttctacacggtgtgggtgttcctcacgtggctgccgtcgtacctgcagaaggaacgcgggttctcgctcatgcagaccggctgggttgcggcgctgccgtacctgtgcggcatcgcgggcgtcatgctcggtggcgccgtgtcggcgtggctgatcgggcggaatgtcgcgccggtgacggcacgcaagatcccgatcgtgacgggtgccgtcgttgcggccgtcgcggtcgcgccggtcgcctacgtccagtcgacgggggtcgccatcacgctgctgtgcatcggttactttgcggctcaggtgccgatcggctgcatttggacgctggcgtcggacgtcgcgctgccgaatcaggtggcgtcgctgggctcgatccagaacttcggcgggttcgttggtgcggcgattgcgccgctggtcacgggcgcaatcctcgagcacacgggcacgtacaacctggtcttcgcgatcggcggcgtcatgctgattctcggcgcatgcagctatggattcctcgtgcgcccgcagaaacagcggaatagtcaggtggcgtgatgggaacggatcggaaggatcgcgtgccctcgtgcgtcgtcgtcattgggtccgccgggtcggggaagtcgacgatcgcccgcgagatcgcgcgccaggtcggtggggcctatctggacaaagatagcgtggccaacgtttttacgggcgccctccttgcggctcacggcgaggacccgtcggtccgcgacggctcggcgtactacaccgaggttgtgcggccgctggaatacgagaccctgctcaacgtggggaccgacaatctgcgtctgggcaggtcggtcatcttcgatgcgccgttcggggcgtatttcgcgcaggccgactacatcgagaagcgtcgcgcggagctgcggtggccggaggacgtgaaggtcgtcgtcgttcgggtgagcgcgtccgccgaagcaacccggcgccgcctcgagaagcgcgggctcgcgcgggacgaatggaagctcgcccattgggacgagttctggcggacgatcggctcgcaggcgccgacgtggcgcggcgtcgagatcatcgaatgccgtaacgacgaggacggacaggctgcccaggtggcggcgcgcgccctcgaccagatcgtccacggctaacccgagccgccaactgaataacccgacggcaggcgccaggtctcgatgctttcgcagacgcgaagcgggcctggcgcctgttgttctgcgggcgtcggggcggtgtcggggcaccctcggggcgggtgatggtgggcgcgagggcgccgagggcgccggctagggcgccggctagggcgccggctagggcgccgaagattaaacgctcgtcataaacgcgaaacgctcacctaaaatgtcagaactaccgattatcgggcagcaatgacaatttaggtgagcgtttcggattcggggccgcgccctcggctagccgtagatcgtcgcgaaattcttgaggatctggtggacggcgtcgacgttcgcggcctggcaggtgtcgatgatccgctgctgctcgtccggcgggtaatagcccgactggttgtattcgaggatgcggatgtggagggcctcccagtccagttcggggtggaattgcgtcccatacatgttgcggccgacgcggaacatttggatcggacagttcgtcgaggtcgccaggaggacggcggtgtcgggcacggtctcggcggcctcggtgtggccaacgtaggcgcggaaatgctcggggacgccctcgagcagcggatcggcgcggccctcggcggtcaacgtgatctccggggcgtcgatctcctcggcatactggtccgacacgaggccgccctgatgtgccagcagcgtcccgacgccgtaacacacgccgaggaacgggaaatcgagggggaccgtgaggtcaagcagacgcgtaatgtcggcctcgacgcgcacctgcaattcgcttttcagatgctgtgccttcaacgaattaaacggcgacccgcacaggacgatgccggcccacgcgtcggggtcgaaatgggcgagttcgtcctggtcaagacggtgatggacgacgcgttcgcgcggcacgccgaggtagcggacgaagacctcatactccgaggccaaaatgtcgggctgcgcgcgcgacgtcaggaggagaaacggcttcgatgtcgacatgagccgattctaacgggcccgccggcccggtgggctccgccacacggtgaacaggcgccctcggggcgaagggcggcgggcgcgcggagggcgccctcggtgaacgtgatcaaaaaaggtcacgttcaccggttggggccgatgaacgtgacctttctggacacaacggtcacggtgacggggtgggggccggcccgcggccgcaacagccgccgaccagcccccacgcgccgctagggttggaggaagtacggcacggtctcgcgcagcgcgttcgtgccgcagtggacctcgccgccgtggacgtagaggacgttgtacgtgttgacgaacttcacggtgacgccggcgtccttgtacgccttggtcacggcgtcggcgaacacgtcgtgcccgtcgatcatcgggccccactgcttgggcgcgatgaactcgttcttcttcatcggcacgccgttgacggcgttcggcagcaggtcctgcgcgtacaggtgcgtcttcgtctggtcgacgccgccgggcgcgtcatcgtcgtacatgaagtaccacagcaccggcacgcggatgatgtcggcgtcggtgatcggcgtttcccgcttgagcgtggcgatgttctcgtcgatgatgcgttcggcgttgaggttgaggtcgacgatctcctggctggccccatagctgatgaggttgtgcgccccaccggggttgctgaccagcggttcgtcgccgtggccggcggcctcaagcttcttcacgaggtcgacccccatcttcggcgaagcgacgaccaacttccagcccagtttgttgttcgccgggacggtcgagaggaactcgtcgatgtggccgaccgacaggaacgacgtgtcgagatagatcggcttctggacgccctgcgactcgaagaacccgcggatcgtggccgacggctccagcggctcgttctcttcctcgtcgctcgggatgttctccttcgtacggtgccccatgaggacgcggccggccgggtagcccggcatcggcggcagcgactcgatgttgccgcccgaatccagggtgaagctcttggggttcgtccccaggctgaggacgccgacgcccggcccgcgcagcccatacatcgcctggtacaggttgacctgatcacgcacggtgatgagggtgatgtgcccgttcttggggttcaccaccttggtctcgtagtacgggtcgatcggcttggggtggacgtcctggaagtcctcttcgctatcgaagtggtcgtagtcgacgccgcgcatctggtcggtgcgcagcagcacccgcatggtccgcggcccgtcggcggtcggcatcgactggtacatcggctcgaacgaatcctgtgtccacacgtccgacgagggcgtaaacggcttgacctcggtgccgttggctttgccgagcttgccgagttcgtcgaccatcgtctgctcgaagtggctggccttgcccgtgggggtcagcagcgtctggatcgtttccgtgtggttctgggtgaccagcggcgcctcgcgtagcgtcgccgtcagcgccttgcgggccttgccgtcagtgatcgtcagcgtgacggcaaccgagccgtcccacgacccgtcacggacgacgtcggtgccctcgaggcccagcgtgaggccggccttgaggtcggccgccgagaactgcgtcgtcggcgtcaccagcgtccactcgtccccgcgcttggcgaagacgtggaccttggtcgccgacgccttgtcgacgctgagggtcgccgacgcggaatcgcgcagcttgggcagcggcgaggacgccagcggggccaggtccttggcgtcctcggggccattgacgacctcgtcggcggcgtcggagcacttcttgagctcgtcgagcttcagcggcaccttgtccttagtgagtgggcagcgcttcgacgaatcgtcgatgttcgcgaggaacaccgcgccagaccgcacggtcgcggcggccttttcggtgtcggagccgtcggtcgggttcgccacgccgtcacggttcgtgtcggcgacgaaacgcgcgtcgtcggtgcccacaggggccggcgcggcgggctgggtcgtctcggtcggcgtctcgctgggcgagggcgttggcttcgtcggctgtgcggcggtcttcgatgagcccggatgcgccttggtgtgatgccccgcggccagatggtagccgggagggcagccttccgcggcctgggcctgcggcgcggcgtgggggagcagcacgagccccagcccgaggacgagggcggtcgcgatccccgcggcgtgatgccgtttgcgggaggtcgtgaggaaaatggcaccggcaacaaggcagagggcggctgtaacgcacgccgccgcgatcgtcgcgccagtcgaggccagcgtcgggacgcagttatcaggaacagcgcccgcgtggagtccggatgggaacacgagagtcctttcgtgagagagattatcgagggtaagtaaataggctaacaaacaataggtgtacctcataattgctggttgggtggggagggcgtcctcgcgtagtggcggattggtggggctagattcggggtgcggcggcctcgtgggcggttaaggcggtgacggtgcggttggtgaggtggttgcgggttgggcagggagggggtggccgtgaacgtgattaaaa

SEQ ID NO: 587 - DNA, 23318 bp, synthetic construct
  source 1..23318: mol_type = other DNA
  misc_feature 1..23318: note = Synthetic
tgtttaaggttatccattggtacttcatgatgagtagtttattgtgagcaacggtgaggttaatagatagtttttagttctgtggataacttttgaatgtagtaagtgttttttaaacagttttttatgaaaagagtctaaaaaattagaaagttcagagaaagttagcgttaaatagactgtttttggaagtaattgtctattaagacttcgaagaagcacagttcgatacagcaggaccgcgctacactgtaaatatgacttacgagattgaaatcggacgcggaaaacgagcccgccgcgcttacactctagacgacattgccctaattcctgcgaagcgtacgcgcgacccagaggacgtgaacatttcctggcagattgatgcctaccacgtggaaacaccaatcatgggtgctccaatggattcgacaatgagcccggaaaccgctataaaactaggtaaactaggtggtattggcgtattggatttagagggtttatggacacgctatgaggatcctaccccaatctttgaagagattcgttcattacccgcagatgcttctaatactcgtttacagcagatttattctgagccgattaaacgtgagctgatcagccagcgtttagccgaaatccgtgacgctggtgttgttgtagcaggtaaactaagcccgcagcgcacccagaagtattggaaagacgtggtagatgcgggtgtggatattttcgtgatccgcggtactacggtgtctgccgaacacgtatcttctaaagcgcagccgttaaatttgaagcgttttatttacgagctggatgtgccagtgatcgtgggtggcgtagcgacatacacggcggctctacatttgatgcgtacaggggcagcgggtgtgctggttggtttcggcggttcagcagcacattctacacgacgcctgctgggtattcatgcgccgatggcaacggcgattgcggacgtggcagctgctcgacgcgattatttagatgagtccggagggcggtacgtgcacgttatcgctgatggttctgtaggtcgtaccggtgatttacctaaggcgattggttgtggcgcggacgcggtaatgttgggcgctgctctggctcgtgcgacggatgttcctggtgggggctggcactgggggtccgaggcttatcacccagagttgcctcgtgggcaccgtgcggaagttggaaccgtgggtactttggaagaaatcatgcatggcccatcctcacgagctgacggtaccgtgaacttcctagggtctttgaaacgcactatggcgtctacgggttattcggaactaaaagacctgcagcgcgtagacatggtagtttcaccttatagtccagaataattctgtgacagtaattgtagtttcaggggcgtcggggctgataggacgggcgctggtggacgagctgctagccgcaggctacgcagtgaggaaactcgtgcgccggacaaacaccgacagccacggtaagtgggaaacctcagcttgcgataatgccaatgctgaacaacgagtacgcgaatactactggaaccccgcaacaggggaaatcgacttaaaagttttcgacaccgaaaaccaacagccagttgaagccgtcatctgcctcaacggagctggaatcgcagataaaccctggacgcgctcgcggaaacacctcttagaaacctcacgcattcaacccgtccgaaccttagttaaagccttcaacgccttacctgagacagaccgccctcggaaatttttaagtgcctcagctgtgggaatctacggggcaaatgccagcaatgcaaatcaagaactgtctgaaactgtggcaactggcactgactttttagcgcagctttgccggaagtgggaggcagaagctaaccttgcacacgaacttggcgttcagacaataaacctgcgtaccgggctggtgcttgccgaaaatggtgggctactcaaagcctttcgcacgctttataagtatgggttgggcgcgcagctcggcgacggtgaaaactggatgccaactattgccctcaaagactacgtgcgggcagtcctgcacatcttaaaacactcagaaatcagcgggtcagtgaacctagtcggcccgcagccgattaaagccaaggacctccatgctcgcctggcgcgggaaatgaaccgaccaaaatggctgaaaattccgcaaatcctgctgaactatgcgccggaacaagtgaagctcctagcgttagcgaaccagcgggtagttccacaaaaactgctggacacggggtttacattcaggtgacaatagagctaacactgcaaaacgacacttaggtaaaagatgaaatcattaggcgcgaaaaaactggcgattgttctggggtttgtcttggcggttggcggatacgcagcacttcaaggaccagcgcagttacactaccacaacgttcgcagtacgatttcaaactattgtagtgaggatctttcaacgaccgtttttgacacttacttgtcgcaagcctggtatgacaataagcatcgtccaggtacagacgctaatgaacacatggcgagccagattcgtgaagaatgtgcgcaggctccgggattccagctgtgggtaagtgagctggatcagattggaactaacgagagtgcgagcaggttgagtaactgggtgtctgagtttcataagcaacaggacgaagcctatgcttacgcggagttctcttatgcttacatgcagtaccagttcgctaagaaagcggtgctttttccagccatgcgtttgacgccgattgatttaggctttgctccacatgaagatttggacatcttagaaaatggttttgagtcgattcttaacatcggtggagtggatgccggtggtgtactggcttctgctgagcaggcgcgtgaaaagattgcggtgattcagcagaaggtgcgtgaatctgaggtgggtccagagatggaagatttgctgaaggcactggacccggtttacccggttgctgacccggctaagtctcaggggttgctgccattcttcctgcctgagcgttttgagatgcctgaaggggatgcgtatgctcaggctcgcccgcagttccagaatgggttgaagtttgaccgggtggagactcaggattataggcatccggtggttttctattccggttttggcagtggtagcgtggctttttctcaagttgagcagaccccgcaggattttatccttgagttgcgtcgtaactatgattatttgccgattccgtctggctatgggaacgagtattgtgtgtatgcggagagtgagagcgcttgctggctgccggctgcggatggcaggtatttccgcgcaaagttgcaaggtagtttaagttcggctgagtcgcgcgcggctttgcagggctggatgcggatggttgcggaaggcaagtagttttctgtagagattttcgagggcggtttgctgggtgttttacttgcctggtggcgtccaccccaccaaaacctttacaatagtggtgcacatatgtgcccaatgggtggctgttgaaacagctacaacgcacttgagtaaagggaagtcggtgacgacgatgccagggaaagcccttggaatgaatacttcagcaacgctgctgtctcataaggatattcagtctatcgacgccgctaaactctattactcgggcatgagtcagcaagaagttgctgatacactgcatctttctcgccctacaatttcgaagctactttcgcatgcccaagagaaaggttttgtgcgtattaccgtgcatgatccgcgtacggaggatcaggctttacaagagcgtttaatccagcgtttcggtttgagtgatgtgcgggtggttttccctggtactgctgatcgtcagaaagttaatgagtctttggggcgggctgctgcggatttgttgacttcgttggtggctgagggggatacgattggggtggcttggtcgcgtacggttgaggcgatgagtcgtgctttggtgaaaactccgcgtcgtaatgtgaaggttgtgcagatccgcggtggcgtgggtgctgcagagacgggtttttctgagatttcgacgattaatcgttttgcagaggcttttgagggtgagccgcatatgttggctttgccgacggtttttgagactgtgcaggtgaagacggcggttgagaaggaacgtcaggtggttgaggttctggagatgggtcgtacggcgcgtttcgcggttttcacggtgggtgaggttagttcggatgcttatatgatgcagctttctgcgttacgtccggaggagcgtgagttgttgttgcagcgtagttgtggtgatatttgttcacgttttgtggatggtaaggggcgtatttgtttgcccgatttgaattcgcgtacggtgagtatttctttgccgcatttgcgtcgggttccgcagaagttgttggttgttggtggggaagagaaagcggagattgcgaaggtggcgcttagctatggttatgtgagccatttggtgattgatgcggctacggcgatggcaattttggattagttgttggttttgtttttcgagggcggatagtcctacttaaattttttttaaatggtgatctttgagggctatctgccacaaactggcacatatgtgcctagaattaattgacaaacgtaaaagtagagcgtagttttagagtatcgcaactcacaaaagcgttgtgcattcgggttgcgcgctagaaactcattaaaaatacaggcacaaatgtaaaaaatgagctgatagcaaaaccgtattcgacgaaggagtccgaacactcatgacacaactcagcaaatacgttgaccacactgccttggctgcagccgcaaccccagcagatatcaaaaaactggcagcagaagctaaagaacacgaattcttctctgtctgtgttaaccctgtgtacgttccactcgcgaaagcagaactcgcaggcagtgacgtcaaagtatgtaccgtcatcggcttccccttaggggcctcatccagcgcagtaaaagcattggaaaccaaacaggcaatcgctgatggtgctgacgaagtagacatggtaatccaaatcggagctgcaaaagcaggcgactaccaaaccgtagaagcagacattcgcgcagtcgtggaagccgcaaacggcgccgccctcgtgaaagtaatccttgaaacctgcctgctcagcaacgagcaaatcgtcgaaacctgcctggctgctaagcgtgccggtgcagaatacgtgaaaacctcaaccggtttctccacccacggtgcaaccatagaagcagtgaagctaatgcgcgaaaccgtaggtgaagaaatgggagtcaaggcttccggtggaatccgcaccgcagccgatttcaacgcaatgatcacagccggagcaagccgcatcggtgcctccgcaggtccaatcctcctggaaggaaactgaaacaaaatgagcgcaacccacaccaccaacgaagccggtgcagttgccggtaaccgttcattcggtatcatcaaagacccaaccatccaacaaaaagacggctacttggaccgtaccccatggttccagtacatcctgctgtccatctgcttcccaatgtggggcgtagcagcctccctcaacgacattctgatcacccagttcaaggcgatcttcaccctctctgacttcgcatccgcattcgtgcagtcagcattctacggcggctacttcttaatcgctatcccagcatcccgcgtaatccgccactccacctacaagaccggtattctaatcggcctgaccttctacattgttggctgctccatgttcttcccagctagccacgtagcaacctactctgtcttcctggcagcactcttcgcaatcgcagttggcctgtccttcctggaaacctccgctaacacctactcttccatgattggtccaaaggacaagtccaccctgcgcctcaacgtttcccagaccttctacccactgggctccatcgctggtattctgctgggcaagtacctcatcttcactgacggtgacgcgctacacaagcagctgggtgatttggaaggcgaagcaaaagcagctttcgcacaggaaatgctacagcgcaccctgcaaccatacatggttatcattggtatcctcgcaatcctgctggtaatcattgcgataactcagttcccacactgtaagccactgcgtgagggcgcaaaggaagcacaggcatccattggtgaaaccctcagctacctggctcgtaacgccgcattccgcaagggcatttttgcacagttcatgtacgtgggaatgcagaccgcagtgtggtccttcactatccgcttggcactgaccttggacacttcattgaatgaacgcaacgcagctaacttcatgattggtgctttcgcagctttcttcattggtaagttcgtagctaacttgttgatttctcgttttgatactgacaaggttctgttggcttactctgttttgggtgtcctgtctgttctgtacatcgtaatggttcctaacatgtctgctgtttacatggcgattgttacttccggcttgttcggcccatgctgggcaactatttactctcgcactttggacactattgctgataagcgtcatcaggaaacgggtggtgcagtcatcgttatgtctatcatcggtggtgctgtaatccctgttatccagggtctgatttctgactatactggctctatgcagttctctttcattgtcaacgcagtctgcttcgcagtagttggctggtacttcttggggaagctcactgcttctaagaaagttgcgtgattgaagatggctacgaaattattcttggatcgtgcgcagttcagcgcggaacctaaggtgattgcagagaatgatgaattcactgtttctattcgtaagtatgagacggggattgagtctttgactttgacgaatagtcgtgggtttgttgaaatcttgccttacatgggggcgaccatttgggcagcagagtttgatggccgtgacttgcggatgacgaatatgttctctcagcctcagccagctgagcagattgtcgacaattatggttgtttcgcattccactctggcttgctggctggcgggtgtccttcaccagaagatactcatcctttgcatggtgaatttccttgcgctgacatgcagaaagcttgggtagagatttccgagggcgaagcacgagtggtttcccgctatgaatacgtgcagggttttggacaccactatgaggctttccccgcggtgaaacttaccgctggttctgcattgtttgatatcactttggatgttaagaatttgtctaagtatcagccaatgcctttgcagtacatgtgccacatgaactacgcattcgtacagggtgggaagatgtcttctagtttgcctgatgacgctttccagttgcgtcgcagtattccagctcacgtgacaccgacccctgagtggacgaagttgaatgaggatattttatccggtaagttcgacgctaactctttagagggggctgaggcgtttgaccctgaaatcgtgtattttgcggataatttgccacagtacggtgagcgagctgaatttgatttaacgtctcctgatggggttactttcacagcggcgtttaatactgcagatttcccagtggctactcgttggattctgcacaatgaagatcagaaggttgcggcattcgtgctgccaggtacttctcgtccggaaggtttcaaagcagctgaagctgctggcatgttggtttggttagcagcaggtgaagttaagtccttctgcgtgactactggtattaaggggtagtgaaaatgggtattgcagtaatcggttccaacatggttgacttgatttcttacatcaccaggatgccggaagaaggcgagaccattgaggctcctgacttccagatgggctgtggcggtaagggagctaaccaggcgattgtgtcagcacgtttaggttctgaagttgtgatggttacccgcgttggtgatgacttgttcgcagaaaacactatccgcaacttctctgaaaatggtattgacaccacccacgtgctacgcacggaaggttcctcaggtgttgcaccaatttttgttgatcagcagtcccacaattccatcattattgttaagggcgctaacaaccagctttccgctgaggatattgaatctgcagcagaacgtattaagggttgtaagctgattgttttgcagttggaagttccattggaaactgtttacgctgccgttgaattcggtgaaaagcatggtattccagtgttgttgaacccagccccagctgcacctgacttggtactggaccgggttaagacctgtgagttcattgtgccaaacgaaaccgaactgtccttgctaactggcatgccagtggatacgcagaatgatattcgtaatgcttccgcagtgctgttgaacgtgggcattaagaacgttatcgtgaccttgggttcacgtggcgtttactggactaacggtgagactgaagagttctttggtccttccctagttcaggctcgtgacactactggggcaggtgacgcattcattggttgcttctctcacatgtgggtaaagactggtgatattgctaagtccctgcagactgcgggcctatacgcgggtgactctgtaacccgtttgggaactcagacttcttacgctgatgctttggatttccagtccaggtatccagaggttgagttgtaaaagttaaactggttgtctagaacctgggggagctacatgggagctcccccaggttatttaattactgaatcagaatgtaagaatagggtgtgtgaacttaagagtatttatctaggtgaatgtgaagcgaaaatgagtcgtgatgatactgaatccaaatttgggttgaagctagagcgttgggaggctaagacccagacagtgatggctgttttagcggtactgtttttaacgctttacgcttatgaggtgttagcgcaaccgaatgctgttgtagttaataggttagaaactggtatttttgtgatttggttggtgttcttagctgattacttgattcgtttatttttggcaaaaaatcgttttcagtggattaaagcaaacttgattgatttggcgtcggtagcgttacctgtgttgcgtcctctacgtttaattcggttggtgacacttttgtctgttttgcagcgcactacgggtgagaaacttagggataggattatcagttatacgctttttagcacgattttattagtgtttgtttcttctttagcgattttagaagctgaacgtccagcagcaggagcgaacattacgtcgttttctgacgcgctctggtggtcagtagttactatcactactgttggctacggtgattacacgccggttactcagactggtcgtgtcattactttagggttaatgctgggaggtatggcattgatcggtattatcacagcaactttagcgtcttggattactgaacgggcgtcttcggaagtgcaacgagttgaggatgaaacgtataaccgtatcgctgctttggaagaaacgattaacttgttaagagaagaactgaaaaatttgcagcttgctagagaagaaaaataaggggaagtggtatgaacagttgaagaatctaggggtttaaggattatattccggttttgtataggtttaaactatgtatttcgaattttggggttgttttttgcgtgtactgggattatactggtgttaagactgattctcagtaagtaccgcctcgttagcggtacggaattctccaaccgacctctttaaggggtcggttcttttttataacatattcataaaatgaatgattttgtcagtggatagttttagactaagtttatggataataaaaactatcgcattggcattgatgttggcttaaactctattggtttctgtgcagtcgaagtagaccagcacgatactccacttggtttcttaaacctctctgtatatcggcatgacgctggtattgaccctaatggtaagaaaacaaatactacgcgcctagctatgtctggcgttgcgcgacgcacccggcgtttattccgcaaacgtaaacgccgcttagctgcgttagaccgattcatagaggcgcaaggctggacgcttcctgaccatgctgattacaaagatccttatactccttggctagttcgagctgagctagcgcaaacaccgattcgtgatgaaaatgacctacatgaaaaattagctatcgcagttcgacatattgcgcgacaccgtggatggcgttcaccgtgggtgccggtgcgctcactacatgttgaacagccaccctcagaccagtatttggcattgaaagaacgagttgaggcaaagacactgttgcaaatgccagagggcgcaactccagcggaaatggttgtagctttagatttgtctgtagatgttaacttacgccctaagaatcgtgagaaaaccgatacccggccagaaaataagaaacctggttttctggggggaaaattgatgcaatctgataatgcgaacgaacttcgtaagattgctaaaattcaaggacttgatgatgctttattacgtgagttaattgaacttgtatttgccgcagattcgccgaagggagcttccggagaactcgtaggatacgatgtgcttccagggcagcatggaaagcgtcgtgccgaaaaagctcatccagctttccaacgctatcggattgcgtcaattgtaagcaatctgcgtatccgccatctgggttcaggagcagacgaacgtttagatgtggaaactcagaaacgcgtatttgaatatttacttaatgcaaaaccaactgcggatatcacgtggagtgatgtcgctgaagaaattggtgttgaacgtaatctgttgatggggacggcaactcaaaccgctgacggggaacgtgcttcagcgaaaccaccagttgatgtcactaacgtggcgtttgcgacctgcaagattaaaccacttaaagagtggtggttgaacgctgactatgaggcgcgttgcgttatggtttctgctctgtctcatgcagagaagttaactgaaggaactgctgcggaagttgaggtagcagaatttttacagaatctttctgatgaagataatgagaaacttgattcatttagtctgcctatcggtagagcagcttattcagtggattctttagaacgtttaactaaacggatgattgaaaatggcgaggatctgtttgaagctcgagttaatgaatttggggttagtgaggattggcgtcctccggcagaacctattggtgcgcgggttggaaatcctgcggtagatagggttcttaaagcagtaaaccggtatctaatggccgctgaagctgaatggggcgcacccctgtcagtaaatattgagcacgtgcgggagggttttatctcaaagagacaagcagttgagattgaccgtgaaaaccagaaacgctatcagcgaaatcaagctgtccgttctcaaatcgcagatcatattaacgcaaccagtggtgttcgtggatctgatgtgactaggtatttagctattcaacgacagaatggagaatgcctatactgtggaactgctattacgtttgtaaactctgagatggatcatattgttcctcgcgcggggttagggtccacgaatactcgtgacaacctggtagcaacctgtgaacgttgtaataaatcaaaatctaataaaccattcgctgtttgggcagcagaatgtggaattccaggtgtatcagtggcagaagccttgaaacgagtagatttttggattgcagatggttttgcttcatcgaaggaacatcgggaattacaaaaaggcgtcaaagataggttgaaacgtaaagtctctgaccctgagattgataaccgttctatggaatccgtagcatggatggctcgggaacttgcacaccgtgttcaatactatttcgatgagaaacataccggcactaaagtgcgtgtattccgcggttcgttaacttctgctgcacgtaaagcctctggttttgaaagccgagtgaactttatcggcgggaatggaaaaacccgattggatcgtcgccaccacgctatggacgccgctactgtagcgatgttgcgaaactcagtagctaaaaccctggttttacgtggtaacatccgtgcctctgaacgcgcaattggtgccgcggaaacgtggaaatctttccgtggtgaaaacgttgcagataggcaaatttttgagagctggtcagaaaatatgcgggttttggttgaaaaattcaacctagctttgtataacgatgaagtcagtatctttagtagcttgcgtctgcagttaggcaacggcaaagctcatgatgacactattactaaacttcaaatgcataaagtgggggatgcttggtcactaactgaaattgatcgggcatcaaccccagctctctggtgtgctctaacacgtcagccagacttcacttggaaggatgggctgccagctaatgaggatcgaacaatcattgtgaatggcacgcattatgggccattagataaagttgggattttcggtaaagctgcagcctcacttctggtgcggggtgggtctgtagatattggtagcgcaattcatcacgcgcgaatctaccgtatagcaggtaagaaaccgacttatggtatggtccgtgtttttgccccagatttgctgcgttaccggaatgaggatttatttaacgtagaactgcctccccagtctgtttcaatgcgttatgcggaaccgaaagtacgtgaagctattcgtgaaggaaaagctgagtaccttgggtggctggtagttggggatgagttgttgttggatttgagcagtgagacatctgggcagattgcagaattgcagcaggatttcccagggactacacactggaccgtagctggattcttctcaccatcaagacttcgtttaaggcctgtgtatttggctcaggaaggtttgggtgaggacgtttctgagggcagtaaatctattattgcggggcaaggttggcgtcctgcggttaataaggtttttggttccgctatgccggaagtgattcgtcgtgatggtttggggcgtaagcggaggtttagttattctgggcttccggtttcgtggcaaggctagattagggtaggaatatgcctcgcgggtggagagttctggattgtagttctatgtgcggtcagatttcttctgcccgcggggctatttctattgagccggatggtaaggaaccagtgttggtgcctatttctgatgtggctgttttgcttattgggcatagggtggtgttttcgggtggcgcgttgcatcgttgtttatcggctggtgttgcggttatgctttgtgattggcgtggggttcctgagggtggtgcttttggttggagtgatcatactagggtagctgccaggcggattgcgcaggcgcagctttctgagccacgtcggaagaatgcttggaagcagattattaaagagaagcttcgtgggcaggctagtgctttagatgatttgggtttgcgtggtggggatttcttgagggagttaaggaagcaggttcgttcgggggatccggctaatgttgaggctcaggctgctaagttttattggaaggcgttgggtggtgaggggtttaatcgggtgccgggtgcgcgttttggtgtgaatgggatgttggattatgcctatgcgattgtgcgtgggcatgggattcgcgcggtgctttctgcggggttagagccgtctttgggtgtttttcatcatggtaggtctaatgctttttgtttggtggatgatttgctagaggtgtttcgtccagcggttgatgctcaggtttttggcttactgggggacggtgaggttgagtttgatgaagttaaacatgatttagttgatattgcttgtggaaagttttctgtagatggtttgactattccagcggtttttgaagattttgcgcagcagtttggtctttatattgaggatgatgttgaaaagttagttccacctgtttggagtttcagaaatggcagatgatcctatgtggctagttgtaatgtttgatttacctgtggttactaaagctcaaagaagagctgcgacgcagtatcggaataggctacttgattgtggtttttcgatggtgcagtttagtgtttatgcgcggtatcgaccaactggtggtactgatgtgccagttatgaatgctgttacacgtggcattccggcgggtggtaaagttcgtgtgatgactgtcactgacaaacagtggtcgtcaatgatgcgtttttctaataataaggaagaaactgagcctgaaacgccagaacaactaacaattttttaatcgttaaaatctgacttttccttgaaaaactgggatattccctctgatatcaagtatatcagagggaattaagactgattcccagcgtggctttccacgagttcttccaagcatcaagtatatcagagggaattaagactgattcccagcgtcgataaaaacgggcaaacaaaacccacaagtatatcagagggaattaagactgattcccagcaccgctatcaattaacttttcacgcatacaagtatatcagagggaattaagactgattcccagctagaccgctgtctaggcttcgtgcggctcaagtatatcagagggaattaagactgattcccagcgcattctggctaatcacccaccgcgacacaagtatatcagagggaattaagactgattcccagccgacaatcaatgttaataaccctttcaccaagtatatcagagggaattaagactgattcccagcgtaacttgctgggcgtccacgtagacttgcaagtatatcagagggaattaagactgattcccagcttgcgcatgctttgtcgtcgccaccgtgcaagtatatcagagggaattaagactgattcccagcaaaacatacagatacgtcccagcagtctcaagtatatcagagggaattaagactgattcccagcggcttgtagtccgcgtatttccggcagtcaagtatatcagagggaattaagactgattcccagcgtcatttcaaggttattttttcaaattccaagtatatcagagggaattaagactgattcccagcctctgggctaactccttctttatgtctacaagtatatcagagggaattaagactgattcccagcacgtttcaaccattccccgctacctggacaagtatatcagagggaattaagactgattcccagcatcaccccggtgagtgttgaccgtagcgcaagtatatcagagggaattaagactgattcccagcggcgtcgctggttatgcctcgggggattcaagtatatcagagggaattaagactgattcccagcaacgtgaaatcgacggtttcacccgcgtcaagtatatcagagggaattaagactgattcccagctacggcgaatacgaatccataccccacgcaagtatatcagagggaattaagactgattcccagctccactgcggttgttaccagcgcgagcacaagtatatcagagggaattaagactgattcccagcttctatgccgttgggtgagttgcgtcgccaagtatatcagagggaattaagactgattcccagcgatggcgacgccgtatttttcgattgggcaagtatatcagagggaattaagactgattcccagccgttgtccgatttgctggtgtgctttcccaagtatatcagagggaattaagactgattcccagcgcgtccaagccaacccggcacccgccagcaagtatatcagagggaattaagactgattcccagcttgggcaacagtgactttgaaagtgttgcaagtatatcagagggaattaagactgattcccagcgcagcgaccattgggtcacgggcgataccaagtatatcagagggaattaagactgattcccagcgcggagcaggctttcaatgaagttgattcaagtatatcagagggaattaagactgattcccagcgaagcgcgcgttaagtgattatgcttttcaagtatatcagagggaattaagactgattcccagcgctcaccacgtaaaagagagctgatagccaagtatatcagagggaattaagactgattcccagcgagctgggtggaaggcgatagccttttccaagtatatcagagggaattaagactgattcccagccacgctggcaaatatccatgggtgttaaacaagtatatcagagggaattaagactgattcccagcgggttaatcgttagggaatctgtaaacccaagtatatcagagggaattaagactgattcccagcgcagtgggaagcgtattatgattcgattcaagtatatcagagggaattaagactgattcccagcgcgttggagaccattcaagaaagcgtcccaagtatatcagagggaattaagactgattcccagaaatcatattcaagttcgattctgcgtttcaagtatatcagagggaattaagactgattcccagcagcctggtagcccgtcgccggtaagccccaagtatatcagagggaattaagactgattcccagccaagcccgcgcaaaaaggcatggaggaacaagtatatcagagggaattaagactgattcccagccgtagcagcttaaggttgaggggagccacaagtatatcagagggaattaagactgattcccagctctacgcggcgggcttgccatagctcgccaagtgtatcagagggaattaagactgattcccagcataccgaccaccagtcacccaaccttcccaagtatatcagagggaattaagattgattcccagcttagcagcccgtaaggcaactgagctaccaagtatatcagagggaaatatgactaaaacccaacgggctttgaaccgttgggtgctgtatcttagggcagtagaaaatcagggcaatggccaatcggcaggttgtctgtagtaagagtgaaaagttaaatccacactgtttagggatttaagatagcagttaataccagcacgtacactaaacgcgacctcagaaaggatagaggtcgcgtttagtgcgtttaaaccggttaaaggttgcgtttagtgcggtgagttaggtgcaacgccctcggaaatgaagaaacggcgcgaaacgaaagctaaacccgcaaccacaatcgcacccgtaaaagaaagcataaagaataagccagccacgtccttaaaatagttaaaaagtaatgcaactaaaccaaacaccaggctcataaccccatgcaaaaccgcgaaaaacgctgtcaaaccaacgaaaatctgcagttgcggcgcaatcggagccacctgctgtggaaccagcccccggcacaagaaccgaaacggcgtcgcagcaaaatccaactccgttaaaggaccatccaccttaaacagcgcattcaccttaaagaaaccacggccccaaacgaaagccacccaaaagaaaaccaggggagccacaacgctcaaggcaaccagtggaaccagcacaaacacgctcatttcttcacgacctcaaaccccaaagacaaacccaaatcatcaatccggcgtagccatgcgtcagccaaagcatcagaaggcatacgccaatccccacgcggtgaaagtgaacccgcaggtaaaactttcacaccattaggaactgcggtgcgcttaaactgattctggaagaaacgacggaagaataaacgctgccacatgaggatatcttccaaaccatactgaacgcggtccccctcagggtagcccaaaggccattcgcccgcagctgcgtcccgccacgcatgccacgcgcggaacgcaatcttttccacccggtagccgtactttagcgtgtagtaaagagtgaaatcatgcaggctgtatggaccaatcgaagattgtgtagactgaggctcctcacccgctttcaacggaattaactcaggagtaatctctgtatccaaaatggaattcaaaatatcattcactggctcattgaacttaccagaagacactacccagcggactaaatgctgcataagcgtctttggtacgccagggttcactgaataatgcgacatgtggtcgcccacgccgtaagtacaccagcccaacgccagctcagacaagtcgcccgtgccaatcacaatgccgccacgcgcattcgcaatgcggaagaggaagtccgtgcgcaaaccagcctgcacgttttcgaaagtcacgtcataaacttcttcgccacgcccaaacgggtggcccatttctttcaacatttgcgtggcagcagggcgaatatccagggtttcaaacgtggttcccagcgcttctgacaatgcttgcgcatttgaacgcgtatgttccgtagtggcgaaacctggcatggtgaaagtaagaatatattcccgagggcgtcctaaccggtccattgcctcaacgcaaactaacagtgcctgggtggaatctaaaccaccggaaacacctaggactggtttaacgtttgggccaatggactctaagcgacgcatcagtgaagaaacctgaatgttgtaggcttcgaaacagtcttcatccatggttgctggatcacttggaacgtatgggaaacgctgaatctgccgttgtagacctaaatctgtatgtggagggttcagctcaaactcaattacttgagtgtcctcagcagacacgtgcgtgaacgtattcatgcgctgctgctggtggcgcaaacggtccaagtcaatgtcagcaatagttagttgcaggccccggtggaaacgctgattttctttaaccaggtcaccggcttcataaatcagagcttgaccgtcccaagctaaatcattcgtggattcaccttcgccagaggaagtataaatgtaggcgcaagccccgcggtgagaggctgactggcacatcagacgacggtcacgcgcacgtccaaccgtgactggggaagaagacaagttagcaataatcgtggcgccgcaagcagaggcatcagcggaaactggggaagttacccacagttcttcacagatttcaggtgctactacgaaagctggcagatcagttgcctgcagggctgggcaggcaaaacctggaactacgtctttgccgatcttaaactcggcaggtacctgccaggcagaaatctgggcaaaccaacgaacctcgtagaattcgccgtagtttggaatatgtagctttggctttactgccaggaagtgtcccttgtgaatggcaatcgccgtgttatagaggttcgcagcgtgacgaagtggggaacccaccagaattagaggagtgagctctttagaggcttctttgatttcttgcagagctttaatcacttcgtcatacatgacgtcagagaggaacaggtcttccgcagtgtagccggtgagggaaagttctgggaaaactaccagtgagcaaccttggttgtgggcttcggtggcggcttcaatgatgcggcgagcgttagtggctgggtcggctaaagctactgggagggtgacggctgcgacgcgggcaaaaccttggtcgtagaggctgtaaaagttcatggttacctgatttccgctcagcgtcgaagccgagttttgcttatagttgttgatttttaatgctagttaaagtatatcttgggttggcagtaccgtccgaacgtgcgagttacagttccggcgttttgtctgcgtccgagagctcacttgcatatgagtttttgggtggttggtgggcaatagtcatatgggagttcgtgttcgcatgtgagtttttggaggtggatgcgcacggctcattggcaaaccagtcgcttcctccccaagcctccggacactagaatccacgggctccccgaactccacgcacaaacagaaaggggaggtttctcgaaggaaacctccccacctgaactattaggttcagatcaggctcattgcttgctgtgcgatagctagttcttcgttggttggaactaccagaaccttgattgcggaattttcagtggagattacgcgtggttctttagaacgaactgcgttcttttccaaatccaactttattcccatgaaagcaagacgttcacaaacttcagcgcggaggtcagggtcattttcgccgatgcctgcagtgaaggttagagtatccaaaccacccaataccgcagtgtaagcacccacatacttaattagacggtggacaacaacatccagggcggcgcgggcttccgcgtctcctgcggttgcgcggtcacggattgcgcgcatgtcgttgtcacctgtaagtcctttaaggcctgactgcttgttaaataaagtgtcaatttcgtcagtgctcatgccacccacgcgagacagatggaatactgcagctgggtcgatgtcaccagtacgagtacccattaccagaccttccagcggggtaaggcccatggaggtatcaacagcgtgaccgtttttaactgcggaagctgacgcgccgttacctagatgcagaacaatctgctttagttctgaatcgcctaggaattcagttaccttaccggaaacatactggtgggaggtgccgtgtgcaccgtagcggcgaatagagtatttcgcagcaacttccttatctaacgcgtaggttgcggcttcagctggcaatgactggaagaatgcggtgtcgaaaacggctacgtgagggacatccatgagttcgcgtgcaacgtcaatgcctttaaggtgtgctgggttgtgtagtggtgccaggggagcgaagccttcaatgaggtcgcgaacttcgtcggtgataatcgctgggccggagaagtaggaaccaccctggacgacgcggtgaccgacagctacgattcctgcttcagacagtgctggaccaacctggtcgaagagttccagaacttttgcaagagcaactgaatggtcggctactggggtttccagttttacttcttgctcaccgtatgcgtgcttgatgaaagcgatttcttcaccaatgcgttctaccaggccagaggcgatggctgcaccgttttctgggtttaccagctggtacttcagggaagaggaaccggagttaataactagaacagtcacgaatgtgcctttcgatattttctttattttccgaggacgcccgcccacacttaccttttcagattgaaatgttgggtttgggaaaacgtcctcggataaatccttttgagtgtgagagtcagttctgtgcttgaacggcggtgatagcgatggtgtttacaatatcttctactaacgcgccacgggacaggtcgtttactggcttgttcagaccctgcagtactggaccaactgcgacggcaccagcggaacgctgtactgccttgtaggtggtgttgccagtgttgaggtctgggaatacgaatacggttgcgcgaccggcaacttcagagtcaggtagttttgctttcgcaacagcagcatccacagaggcgtcgaactggataggaccctccaatgccaggtctgggcgtttttcacgagcaatgcgggtagcttcaataacggcttctacatctgggccggaaccagacgcgccggtggagtaggaaatcagtgcaatccgtggatcaactccaaaagccactgcggtttctgcagaagaaatcgcaatatctgctagctgttctggagttgggttaggattaactgcgcagtcaccaaaaactagtacgcggtcttccattagcattaagaaaacagaagaaacaatggaggttcctggcttggtcttgatgatctggaaggatgggacgatggtttctgcggtggtgtgggaggcgccggataccatgccgtctgcgtcaccgaggtgaaccatcatagtgccgaagtaagagacatcgctcatcttagcttcagcctgttcaacggttacgcccttcttttcgcgcaggcgcacgaattctgcgacgtagcgttcgcggtaggctgggtcgtttacggaaactacggttgccttggacaggtccaggccgagtgcttctgcgcgggcgaatacttcaccagtttcaccgagcaggataatgtcagctacgtctgcttcgaggataatagctgccgctttgagtacgcgatcatcttcggattctggtaggacgatgcggcgtttctgcgcgcgagcacgatcctttaaagcgttttcgaacattaaaggagttacgacgtgagttttttcagcggttgcttcaatcagagcgtagtcgtttagttcggtgattacgcgcatgtcacccaggtgcttagagatggctacgcgggcaccttcagttgggttaaggacaattagtgctgaaactggggcgtgtacgctgtttagttcattaacagctaacttgcagtagtctgccagtcgttctggggtacggactgcggagtctacgagcagggctacggttgcgccgaggttgatggcagtgcggccggcgcgggtgagttcacctgggttgatgaggtcaccgtcgatgaggccaacgatgaggactgcgtcgaagtcgtggttgaaagcagtgaacttggagattacctggttcatggctgcggtttcgtttgcgacgatgtgggagcgggtggtgccccagtcgccaccgaattcagtcaggattgggtcttgctctgggtgggcgttgatgaatgggcggaagactccgactttgccgtagttggcgcgcagggtttccagtgcctgacgtacggtttctacgccaccggagatgttttcagaagcagttaaaaagagcagctccgtcattggaggagtttcctttcctaacattagttaaagagttcgtttaaaagaatcctaccttcctattatcagggaaaaaatctgggcttggcggggaataaagcatgagaagatagacatttttagttccgagggcgttctttttagtgctacagtaagactctaaggtaaaagcatggtaaaagtaggggttttaggtgagtaacccggttagtttggaacaacgcattgccgacgttgaagctcgcgctcaggctgagcaagtgaccttaccgccg

SEQ ID NO: 588 - DNA, 19464 bp, synthetic construct
  source 1..19464: mol_type = other DNA
  misc_feature 1..19464: note = Synthetic
ctcaaaccaccagccccgagccaacggacacgaaaactacctccaccccgcaacctacttctgaaaaaccaaccccatcacaggaacctcccaccacaaccgaacagcctagcgagcagcccacccccagtgagagcagcccccaaacaaagtaagaggacgcgcccaccctacccaaatgactaaacgaagggtaagagtgaacgcgccctaaggcttgacggttttacttagtggctttactggcgctaaccgctgcccctacaatcccggcggtgttacgcagttccgccggaacaatcggggttttaatatccaataggggtaagaatttctcgtgtttacgagaaacgcccccgcctactacaaacaaatccggactaaacagcttctctagttcctgatagtaacgggttaggcgtttcgcccatttcttccaacccaaatcatcacgtttacgcaccgaggcagctgcccggctttccgcgtcatgaccattaatctctacgtgaccgagttcagtattaggaactaacaccccatcaataaacagggcagatccaatcccggttcctaaggtagtgaaaatagtaaccccaggctgatctttgaaaacgccgtatgcttgctcggcaaccccggcagaatcagcatcgtttagaactgtaactgtgcgtccgaaagctttagaaaacacttccgccgcatcgcagcccacccattcttgacccaggttagcgataaatggaactacccctcctggaaggggagccgggaaacaaacccccaccggtacgtcctcggacaaatcaaaatgcttgaaaacctcaaacgcggtttcggaaatcgcctcggggggttgccgggtaaggggtttctatccggaaacgctcggcggtaaattctccagtttctaaatcaaccggggctcctttgattccagaaccgccgatatcgataccaaacgcgatagccatttattactccttgctgggcagagtcagtatttctgcgccgtattcagttaccacaacggtgtgttcaaactgggcagtccgggaacgatccttagttactactgtccagccattgtcccactgttcccattcgattgtacccaaagtgagcatcggttcgatggtaaataccattcctggttctaaaactgtgttgtaggagggggcgcaatcgtagtgggggacaatcagaccggaatggaaagcctcgcccaccccgtgaccggtaaagtcccgtaccactccgtagctgaaccgtttcgcgtaagcctcaatgactcgcccaatgatatttagctcccgacccggctttaccgctttaatcccgcgcatcatggcgttacgggtgcgttccatcagtagctgggattctttatccacctgacccacgttaaacatggcgcaggtatctccgtgtaccccgtccttgtaggcggtaatatcgacgttcacaatatctccagcttggagcggtttatcatcgggaattccatggcaaataacttcattgaccgaggtgcatagagatttgggggaagcccatatagtccaggcaagacggatatgctccctgagaaacaatatattcgtggccgattctatctagctcatccgtggttattcccgggcggatagctttacccacgatgacgagggcgtccgcggcgatttgtcccgcaacccggattttttcgatagtttccggagatttcgtatccgaggatgtcaccacttcgggaccgtcatggaagagatattcgggacgctcgattgctttgggaacgctcaatttgggggctgatatttcccggttgttgagttcccaggggggcgcgttcggctagttgctggggggaaaatccttgatactcgttcatatttctatcctagtcggaggtaggggggttatttgcttgtagagtttttcaaggtcgataagaccgggggttgcggcgcgtgggaagtggctagagggcgcggggtggtggattgtcgaagcagttagcagaataggggaacccgtgagctgccggtagtcgtttattgaaaccaggacggggtgagatgcagaaatgtaatagcaggggcgagcaaaacctagacagattcgcgagcaacgtactgcaaaatctgcccggtgggagcttcccctaaatccagattgtcgccctcacgttgagcaatatgcattatttccttgtatgccagggtgtgagtatcaaccattactgaggaaatagcggggtgagaaaccctgcccgagggcgaatcgtagccacccacaaccgaggcatcttgaggaaccattttcccgcattcgcgcagaccatgcacgattgccatagcagtcatatcgccaaccgcacaaaacccgtctagcttggggtgcttttgaaacgctctcaacatataggagggaatgtttgccggatcttccggcaatgccaattggattggggcaggtaaacccgccgcttggcaagccatctgagcaaagaaataataaacagtcgcggcttcgtcaggatatttggcgcgccaatgagcgaacgctagattcttgcgattacgagccgctaatgcctgtacctggatttttaccagctcgaaagtcattaagctggcgggattatgccggtcagttccctgcattactgaatctagaacctttgctccagatttatccagttcatcaagaactttttggtctaaaggcaggagaggcaaaatcgcagtatcattagcttttaccgtggagagcagattttcgggataatcttcaagatggactgtcccaaaaaccccaattcccgacttaattagcaaactggtgatattgcgtaggagagcagaattaatggcgccgatatctgtgcagggcgcaacgatagctactttcgtttttccagctagagtcgccaaaatgcctcctttattaagaaccctaatctattttacatattccagtcgttcctgctcagtatgttggtctataaatctgttaggcaagggaatatttggaggaagtatcggttcgtgggtctaaattacctctggatttgctaggcaactagagtgtaataaaagcgagaaaaacagtgacgaaaggtgaatctgtgtctgacgcgaccccacctatctcccctctagaccaagaagggattttcaaggcagttaccgcaggtaaaaaggattttgcagccgcccagtctttagaagaattgaaaagggcgcgtacggctcacctaggtgaaaattccccgataatcctggctaaccgggcaattcgtaacctagataaagccgataaagcccaggctggaaagaacctgggtggtgccaagaaacagctgcactcggcctatgatgagcgttgctgcgtcctcgaaaagaaaaaggaagcccaaaccttggcagcggaagctctggacgtaacccagccggtagcacgttaccctcttggtgctcgccatcccctggaaaccttgatggaagatatttctgactttttcgtgtctatggggtgggaaatcgcggaaggtccagaggttgaacacgaatggttcaactttgattctctaaacattgaccctgatcacccggcacgccgggaacaagacactctgtatattgacggtcgttccctgggggctgaaacttcgggcgagggaaatctggtgctgcgtacccacacttccccagttcaggcacgggtaatgttagggaggggagtgccggtatatatcgcttgccccggtaaagtattccgcgccgatgaactagatgccacccacactccggtattccaccaggtagaagggctggcgattgataagggcttaaccatggctgacctgaaaggaactctcgatcatttcgcgcaatccatgttcgggatggaagctaaaacccggctgcgcccctcatttttccctttcaccgagcccagtgcggaaatggatttgtggttcccgcaaaagaaaggtggcccgggctggatagaatggggaggttgcggcatggttaatccgaatgtgcttgtagcctgcggaatcgacccgaatgtgtattccgggttcgcgttcgggatgggggtagaacgcaccctgatgctgcgtcacggcatcaccgatatgcacgacattgttgagggcgacgtgcgattttcaaaacaattcggcaccaccgggagaggaaactaataatgccttttgtagcgcttgattggctaaaagatcacgtcgagattattcccggcactaccgtggaacaactctctagcgacctggtaaaagttggtttagaagaagaaaccattcacccggcttcggtaactgggccgctggtagctgggcgcgtcctcaccctggatgccaaggagcaatccaatggaaaagtcattaattattgccgcgtagatgttggtcagtttaatgatgctccgggcactgggaaagaaccttccgagttgcccagtcggggaattatttgtggtgcccacaattttaaggtcggggatttggtagtagtttccttgccgggagcggttctaccgggtggtttccagattgcgcagcgtaaaacctatgggcatatttctgacggcatgatttgctccctgcgggaactggggcttggggaagaccataacggcattatcgtccttgaccagcttcttcctggtaaagccgcagccggggagctacctgcccctggtgaatcggtgattgaactgctgggattgggggaggaaaccctagaaatcaatatcacccctgatcgtggttactgtttcgctatgcgcggggtggggcgggaatatgctcattccaccggggctaagttcaccgacctggggttggcggaaaaccttccttctggggcactcccggcggtcagtgacgatggtttctcggtgaaaatcgcagatgatgctggcgttaatggcaaagttgggtgtgatcgtttcgttacccgcattgtgactggcgttgatacccaagctgctaccccggattggatggtgcgccgcctagaacaggctgggatgcgctctatttccctggcggtagatgccactaactatgtgatgctggatttggggcagcctttacacgcctatgacctggataaagtatgtgagccgattgtggttcgccgggctaagtcggaagaaaaactaactacgcttgatgatgtggagcgccccctagattctggggatttgttgattactgactccccagagggcgcggaaggctcccgggtgctgggcctggcgggtatcatggggggtgcttctacggaggtaaccgacagtacagtaaatgtgctgatagaggcagctcattttgagtctatttcgatttctcgttctgcgagccgtcacaagctgcctacggaagcctctaagcgttttgagcgcggcgtagactttgagctggcaccggtagctgcccaacgggtagtggatattctggtggaatacggtggtggtagcgccagtgggcgggtcagcgacctcaataacactaagccgtttgcggagattgtaatgccgctacatgaacccgcacggctaaccggggtggaatacgatcaagaaaccataaccgggttgctgaaagctgttggctgcaaagtgcgcttagaggacggcaacgtgattgctaggccgccgtcttggcgacctgacttgaccggaccggcacacctggttgaagaaattgcccgtctagctggctatgacacgattcctcgcgcagaccgcgcccgattgctgggcgcggatacacccctaagcagcgtgctcgccgggatgcggctcgcgcattggcacaggggggactggtgcaggtgctgtcctatccttttattgccgaggacgtatttgatagcgaactgctaggagagcaggatatgcggaggaaagcggtgcgggtcgctaacccgctcgccgatgatcagcccttactgcgcacctccttgttagatactttgctggcggtagcccggcgtaatatcgcccgcggcaatgagcagtgtgcgatatttgagaccggtttggtgacccgaggaatggggactgaactcaccggttctttcggggtagcagagaaaccaaatcctgaccaacagcgcgccctcgttaaaggggttccctatcagccggaacatatcgccggggtactggtaggttttgcggaacttccgggggctttgggttctggtcgcctatatgattgggctgatgcggtcgcatttgtgcgcacggtggcgcagactttggcggtatcgatgggagtgcagggtaaagatggacgccagcgcctagctaaagacaatatgatgggtgagccgggctctcccgaagcagtcgcgccgttccatccggggcggtgtgcgcggatagtggtgcggggagcctgtgttggtttggcagggcaactacacccggcagtttgccgtaactttggtttacccgagacagcgtgcgctttcgagattgatttcgagaagtttactgaagcaatgccgaagaaagatttgcaggtgaaaccggtttctgctttcccgcctgcaaaagaagatattgccttggtggtggatagtgatattccggcagtggacgtgcagcaggtgattgcaaaacaggctggcgacttgctggaagaggtacgcttatttgatattttcagtggggaacaactgggcacgggcaagaaatccttggcgttctcgctgaagattcgctccgccgagggcacgctcagtgccgatgagattcaggcggtacgcaaccggattattaaggctactgccaagaaattcaaggctactttacgtgcctaaggttggtatgtggactggagattgcggagcgttcctgtcgggggctttgtgtgggttaataccctaaggttaatgcccggttcgtggtggcggaatcaggattttgaatccccctatttataggggaggacacagagtgccccgtgcgggactcgaacccgcgaccaacgaattatgagttcgctgctactaaccgactgagctaacggggcgaatctagcctaccggattgttggcggattatttaattgcggctatttaggctggtgtaagcggttgctaaagccggtatcctaaagagaggtctgctgcttagagggtaaagatagtttagggtggtggtgatggctatttttagtaggttacggcgcaaaacggttcccgcggcagtccagtcgtgcctgacgtcctcagatcgagtttttgatttcctgcctattgattcgaatcgtttcctgttggtgacgatgcgggcgttattctttattgattgtggggaaatagggggtgcgagagtgaggcgcaggtgcagcgctacgggtggtatcagattgctaacgcgcgctgggacagcgaaaatggcacgctccgtatagttttccacgagggcgaggatttgttgatttctccggctcaggccccggggtatggttttatggacattatccgggaagcgttaagtgagacgcaggtgtttgccactcctttgcagctgccctcaaggcagagagttaccgcacagattttgcgtgacgataaccgcaatttatatctgtatccacctatatctagttttcaaaactgtgctgaccagcagtatttacgttctgcggtgtgtgaatgggaacaaaaattgggggtaactgtccgctttgaggattaggtggtttgcaccctctcacggtaggcttatctaggttaatcccccatagctcaatggtagagcattcgactgttaatcgaagggttactggttcgagtccagttgggggagcttaaaaccccttgtcttagtgccttttagggttctacgctttctttattttctccgtttagttcttgtttttaacgtcgcaggggtagcagccggttcttgctgcttttcagttaagtccggcggggttctaacccgttttaccctcccgatacgttttcaccctcccgctttcgcagaatcagcaagtaatcgcgcctattacccgcatctggagggtgataatacaccgggagggtgtttcagggagttatttctcgatttgcttgcactttttttgcttaacgccttagagttaaaaaagaactgaatctcagtaagcttcgcctcgttagcgaagttgaatgctcagccttttggctatttttccacctcatcttttgaggtggaagtgtgttttctcccacttagtcatgtaatttgtttatcctggttctatgaacaacaaggaaaatacccctaaagataagcggcgttatcggattggtattgatgtggggcggaactctactgggttttgtgctcttgagattgatgatgacgacaatccgattgcatttctaaatctttcagtgctgctacacgatgctggggtcggtaaagatggcggtaaaactcaggaaactcggaaggctatttcgggacgaactcgcagaacgcgtcgcctcatcaggaacaggcgtaaacgactcgcggagttggataagtttttggctggtctcggttggtcgctgccaaatttagaaaaatatccagatccacacgaaccgtggaaagttcgcgctcaacttgttgaagaatatatagaggatgagcggatacgccaagaaaaactggcaattgcgataaggcatatagcacggcatagaggctggcgctcgccttgggtatcggttagcagtctacatgtttcgcacccggaatccgatgaagtcgttgctttgaggtcgcgagttgcagaaaaaactggccgaattttgcccgagggattaaccccaggtcagttgctttatctacttgatagcggggagaagttacgtggggacgccggtattttagctggtaaactcctgcaaactgattacgctgcagagcttaaaaaagatattttcccgtcagaaaataagcgaagatttaggcaatcagttaatcgataaggttttcgccgcaaaatcacccaaaggtagtgccgccgaaaaggtggggaaagatgctttgccagggcaggagcatttagaacgcgcggaaaaggctcatccggcttttcagcgttatcgaattgccaccattatcgctaatctgcggatatgcgagggcgaggatggacagaaagaacgccgcttgactggtgaagaaacgatgtccttgttcaagttcttaagcgacccagaccgtaagaaggttcccacctggatagaggtggctcaagttttggggattgaacgccaggatttggtaggaaccgggaaattgacggctgatggggagcgaacggggaacactccgccggttgatgaaacgaatatccgtttgactaagtgcagtatcaagcccgtgcaacagtggtggcgtgcagcgagttacctggagaggtgtgcgtttattgagcaaatatctcgcgcttcctcacccggtgaggctagtagccgtgaagagcagatagctgctgaatttgtcgctagtctaaatgatgaagatttggagaaattggagtcatcggtgaagctcccgattggcagggcagcctattcggtagagagtttggggcgaataactgaacggattttagccgataatgtcgatttgcagcaggctcgagaactagagttccaggtttcgcaggagtggaagccgcctgcagttccggtgggtgaaccggtgggtaatccagtggtggacagggttttgaagggcgttaatcgctggttgctgcgagcagaagccgaatgggggattccgcaacaggtcaatattgagcacgtgcgagaagccttcatgtctaaggcaaaggcgaatgaactgcaacgtttccaagcgcaacgttttaagaaaaacgaggaggctcggcagcagatagaggggagtcagaatctttcggggttgccccgcatcgctgcgattcgcaaacaacaggcgttgcagcggcaacattgcgagtgtctttactgcggcacccatattacttttgccactgcagagatggatcacatcgtcccgcggcgaggggtgggatctacaaataccagggataatctggtggcggtttgtaggcggtgtaaccacgagaaaagcaatattccttttgcggtttgggctgcgcaaacaaatatcccaggggttagccagaaagaggcgatttctcgggttaaagggtggtttaccgatacctcggttaaggatgataaacgtttgcgagcgggggtgattgacaggctatcgcgtacgaaagcagatcccgaaattgataaccgctctatggaagctgtcagttggatggcgcgcgagctggctcaccggattgagcagcgttatcgcaccccgcaaggtcagttggctccgaagaatgacactagcggagggggtgaatcgacgtctgataataaagttacggtacgagtgtttaatggctcgattaccgctgctgctcgcagagcttcaggttttgaagggcgggttaatctgattggaggacggggaaaaacccgcctggacaggcgtcatcatgctatggatgccgccactattgcgatgatgcgtcccgcagtggcacagactttggtggagcgagagaacctgcggcgtggtcaagttttggctggtggagagcaaaattggaagagttggaatggtagcacttttgctcagcaaaagatttattcagtttggctagagcagatgcgttatctgacagaaatctttaaccaagcgttggctgatgaccagattccagtgttctctaatttccgtttgcggctcggggacggaaaactgcatgaggaagtgaagaaagtacatcgcaaacgcctgggtgatgcctggtcgatggatgatattgatcgggcagaaactccggctttgtggtgtgctttgacccgcttgtctgattttgtatgggcagagggtctgccggctaatccagaacgaaaaatagtggttaatggcagtcattttgctgcagatgacagtcttggaatcttcccaacgaatgcccctatgttgaaggtgcgcggcggctgcgtcgaggtgggaacttctatccaccatgcgcggatttaccgaattttgggtcgcaagaaaccggtatatgccatgctcagagtatttacaattgatttatcgaataaagctggggttgatttatttcaggttgatttgcctgaacaaagcatttcggtgcgtaatgccgaaatgaagttacgggaggcttttcgggaaggcaatgctgagtatttaggttggcttgtagtcgatgacgagttggaactggatttatctgcggaaagaaaaggaacaattgccgagttactatcggagtatcctggaatatcgcattggtcggtagatgggtttcctgggaacagtaggctcagactccgtcctctctatttggctggggagggagtgccggaagatgctttgccgggaaccaaagaaattttacagggtcgaggctggtggccagctatcaacaagctgtttaacacggcaaaaccaagggtaattcgccgggacgtgcttggaaatattcgcgataattcttcgcgactacccagtagctggtctatttaagggggaaaccatggctgcctggcggattattgatttgacccagttttctgggtcggtttcctcgaaaacaggagctatagttttacatccagaagataaaccgcaggcgactctaccagtagctgatgttgcggtagttcttatcgggatgggagttcgcctctccggagctgtgttgcatcgcttaaccgccgcagatgtgtgtgttttgctctgcgattggcggggtattcccgaggcgggagcttttgcttggcggcctcactctcgggtcgcagcgcggcgggtggcacaggcgggtatgagcgttcctaaacaaaaaactgcgtggaaagcagtggtgaggcggaaaatagaaaatcaagcgaaaactttgctgctgtgtggaaaagcaaaagacagtaaaaggttgttggagttagcaaagctagtacgttctggcgattctgaaaatacagaaggcagagcggcccgctattattggtcggcgctattagggaaggacttttcgcgtcaaccagggttgggtgatggcattaatgcaatgttggattatggctatacgattgtgcgcggtcacggggttcgagcagtgctagctgccggtttagagccgtcactggggatatttcaccacaatcgagctaatctattttgcttagttgacgacttgatggaaatctttcgaccgctaattgatttggaagtttaccgccttgtacaggctggtaaatcttccgtggatgattgtaaagccgagctggttgcggcggctagtagccagtatcgcgaggatggtattggtattcctgctacctttgaggatttcgctcagttatttggtctttacgtagagaatcaagtaaaaagcttttctcctcctaaatggtttaagtagtttccatgagtaaaaaaccgatgtggtgtctggttatgttcgatttaccggtggatactgcccgacatcgacgcgaagcaaatgcatatcgccgaatgctattggatttagggttcagtatggtgcagttcagtgtctacgccaagtacactcctgcggggttaagtgacgtgaccaccattgggcgacttcgtgctggtattcctcccgagggaaacattcgtatgattttcttaacggataaacaatggtctcgaacgtttcatttttccaatggaacccctagtaaagcagaggaaaaacctgagcaactatcaattttttgaagaaaaattgggtgtaaaaccctatacaacctggggctatttacccctaacaagtatatcaggggtaaaataagaactgaatcccagccgaactctgcctcattgttcgcggctagcaagtatatcaggggtaaataagaactgaatcccagcctaactgtggcgtacagttcgagtttttcaagtatatcagggggtaaataagaactgaatcccagcttatggaagtgatcccacaaggcaagtacaagtatatcaggggtaaataagaactgaatcccagctaagcggttatctagtccctatctgtggcaagtatatcaggggtaaataagaactgaatcccagcaagaagttaggcggcgtctactagctagcaagtatatcaggggtaaataagaactgaatcccaacctatttggaatcgccccaagggtaagtagctaaagctatcgggtaagggtattcctgcctcatatccggtattatagtaagcaaggaggaaataaaagtgaaaataaaagcaatgccccttgcattcggtactttcgctcttttcgtattgaccgaaatagttagctttccattagtggcaaatgcagttttgtctctagctataggggtaggcggggtatctgccctagtcttagcaatccgccagcatggctaaaaaatacttgtcaagcgctggcgctgctagccacctaggattatcccctagtacggtcgcaacctaccgtgctaggggaatcttcccaccgcctaacgtgataattggtgagggaaaagcgcaagttttcgggtggtctaaagaaacgttagacatatggcaagccaaccgcccgggaaaacctggcagaccgaaagggtcgtgaatagagcctaatgctcgtaaatagcgtcttcaatgacaaaaattgggtttagtatccgcctttttgtgctggctctggttttgagggaaaccgaaagaatgccccctcggacagtccaagggggtaacaaaagagaaaggattaaatatgctgaacctcgaaatcattagcatattgattgacctttcacttgctattgtagcctggctcacctggtcgggcaagtataataaatatctgaaaggttagccccctccgataggagatggggctttctctaaaaccaggaggaatgcaatgtttatccagatactccaactggtaatatcgctagtagctcttgctggtgttatcgccgtctaccgccaaaacaagcgaaacgactagcagatgattaactatttaacggtgaacgggatagcccgaagattcgggctatcctctcacacaataaaaagctacatagagctaggcagattccccgcccccgatgccgcgattggagcaggaaaagccatcaaatacggctggctaccccaaacagtagacaactggcaagccagccgcccgggcaaacctggcagaccaaaaaggcagcatcaagcagcagccctaaccgctgcgctcaaagtttctttagcagcctttcctctctcctgcgatggagtattcttcaaaccgttttaccctcccgatacgtttcaccctcccgctttcgcagaatcagcaagtaatcgcgcctattacccgcatctggagggtggtaatgcaccgggagggtgttttggttattaacccctatctatatttttggcgtgctacccacgcgaatgggtagcacgccaaaatcttaatactaggggaaagttcgggctaatgcccgaaagttctctcggtggaacctacttgagtacccaggtagcggccgcttctttatccaaaagattcccgaaataggaaatgctggctgcatcagttttaattggaacaatcccgctaacagtgccaccggcttttagagttccattgctcaacggctctttgtcaagaaaagcgatttccggatcttccgtgttccctgacgaagaggtttgtttccaatcataactggcgtaatctaccggttcagaaccggtgtttttgtaacttaccgtcaccagcaggtatttttttacctgcctgatcagttttttcggttttggaatctaccgatacttgtaaaccattatccaaagtcactgctttcccaacagccagtttgctagtgtcttcgttcttttttgctgtcgccagaatcctttttctcatccttcttagcgtcaccagaatcagctttttcgctggtggatactacggtagagccagcatttagctcttttgtggcttcatcaagagcttttccaaacacccattgagtacaaatgacgattacgatggcaataacgttaatgacaacggcagcaatcgtaagacctttccctcccacttttcctttacggatagagaaaatccctacgattcccaggattagaccgataatggctatcaagaaagaaatgttattaagaattggaatccaagaaccgactattgcaataattccaagaaccaaagccgcaattcctagtcccgattttttctgcggagttggcgctggctgcataaactgtccctgaggattttgcgcttcaaaaggctgattttcagacatgattacttactttccatagatgcggatactaaatgaatctgcaggattctctggttaatccgaaccctacaaatcaatatctgaaacacgagaataaagcggttatattgccaaaatccggtcaataattccccgcattattttcactgttcattacatttgattctcgcggggggggtactatgtcaagttaatagccggatggattctaaaagatttttggtgaccttaaaggattgcgacaaccacccccttaagaaaagtaggtggttgcgggatgaccgggtgcttgccgtatgaccgggtggtttcgggaaggcgaggtggtcacaaaacggaataggacgtaagggagggtcgccctaccccctaggaaatgggggacggccgcgaaaaggtaaacggggcgatttgggaacctgccctgcctcctagaaatgagtgtcgcacagttggtgaatggggggggtgctagtctttacccatggaacatgaactcccgaaacctaacctcaaacctaaccccaaacctaagttggattcaccagaaaaaccggagagactcgtaccagaacccgcagggatagttaatgcgatagatgctcaggacgtggtgaaactctacggcaataaccttgccttagaccatctttatctgcaaataccggccggctcatttttcgggctggtaggtcctaatggggctggaaaatccacgtttctgtctatcgctaccggtcttttagaacctgatagaggcacagttttcattaatggcatcagtatgtgggacgaacccgtagcggcaaaggcagcgttgggggtattacccgacgggatgcatatgtttgaccgtctcagcgggattgaacacttaacatttgtcgctcagctgcgcggtcttgataaacagactgcaattcagcgctcccgttcacttttgcaagcatttgaactgccgctagataaaaagaaaacgataagcgaatactcgaccggtatgcgcaagaaaatcggtttagctttagcgctggtcacctccccgcgcctagtggttttggatgaaccttttgaagcggtcgatccggtttcggcaaacaccctacaacaggtgttaaaagaatatgtgaagctagggggaacagtagtgttatcttcccatgtgatggcgaccgtggaatcattatgtacccatgtggcagtgattaatcagggtcgtattctggtatccggaaccaccgaagaagtcgcggcagggcaagacctcaactcgcgcttcctgcagttggtagggggacatcagcaacgtgaaggagacctgtcatggttgggacgctaatccggttaaacctgcggttgcaaaccaaacagttcactaaacagtggtggcgaatagtcctcggtgtcctagctatcatctacgtggcacttatattacttggggtggcaaccggcttttggcaagcaggtcacgcggggcttaccgctccgattcaaatctattacgcgctgcttatcgtcctggtgtggatgatgatggtatcggcatcggtagctggcgaacaaagcctgaccccccaggcgttaggccttatatcgcccctactcggcgcgcagcttacgggttgctcgcggctaatatcgtcagtgtttcctcttgtgtagttttcgttatctacgaggtgtcgctggcggggtggctagctgccggtagccttggtgcgagtgtgctcaccgttctaagtgggctgctaggggtatttttgattgcagcgttcactcagatattgcaaactcggatggtgtcgcgattaactgccaagcgcgctagttctcgccagctttttaccggtatcggtatgctggtggtaatcgctttgggatacttcctggtgactatgatcccgcattggtttgctgatagcggtggcgcaaccgcgtttttcccgctgttggtgcaaaaactgaccggaagcacggcgcagattttttggtgtttcttggctcttactccgcttgctcctttcctgctggctcctttcgtgatggctcacttttattgggggctggcgctctccctcgtctctacctgcttttatggggttctaatcttgagggtgtggccgaaggtttttgcgaatgctctaatggggcgggggcaggttttagcggaagtatccgctgcaaagaacttagatgcctcctttaatgaaaatagtgaggacgtctggaggattcctctgttagcgcgagcgttacctctgtcgccggtaggacaaattcattgggcaagaataagttattaccagcgaaaagacccgcgccaaattatttctctatcttcgatactgtatgtggcagttatttttgggattatgttgtgggcaaaccatctcgggagaaatggtttttttgggcgttaaacggcactatctctggtagcggtaacggccgcaactgcgctgctgaatatgtggtccaatgattcttccgcctactggtatcagattattgccggggttgccggtaaaactgacagaaccgtgcgtgttggggttcttgctagctttcaacttccggtgatggtggcgattactttgatttttggtttcgcactgaaaatggacacctccgccattttgaaatctgccattttagcctgctgctacctgttagtggctttgggtgcaaatgctttgatttctgcggtggttactattcccggcccggcacctggacagtcggctctgcgtaacaattcgggaggaagtggaaaatctatgctggctgccatggcatcctcaatggcggcgttgttgctgtgcgctctcccttcgggattaattatgctggtctgcgtcctccttaatacctcttgggtctcgctcttgatagctgccctcattaccgctgcggtgctggtggggggaatctacggcggcggaaaactgttagaacgcttccaggtgcgtaatctacgccgagtgatggcgtggccaaaacatatttatagcggggaataaactaataagccgcagataggcgtgctttgccgcgtatggggtagcgaaattgggggttagtgcctaaaaagcttcgcgtagttttctgtcactttggcgttaaaactggtgagaagcgctaacaaccaccctaaaaactgagataaatagggggtaaaacctggtctgtcggcggagatggagggattcgaaccctcgaggggctatccaccccaactcccttagcaggggagcgcactaggccactatgcgacatctccaatgtcaaagcactcccacagtttaacggacggggtgagagtgtccaaaaactagctccgtgtatcgggtcacttaggcgatagcagctaatctttcaccctcgtccctcgaccagtcagctacgcttttagcgaggatagatggcacaacgaaataacccgagtaggctgaaactatagcggattggtgattccaaaaatgggggaggtagttttgtcgcgcacattcacttccttcaaataccgcaactaccggctgtggtggctatccaatatcttcgcttccaccgccacctggatgcaaagagtcgctcaagactgggtggtattaaccgtgcttaccgctcactctggtttcgcggtagggctggtcaccgccttgcagttcctgccacaattgttgctatctatacctgccggaatagttgccgaccgcttcgatcggcgtcacatcatccaaatctgtcaatgcgtagtcgcccttagcggacttttaaccggagtgttgttacttaccggggtagccgccctctggcatatctatataatcgcctggtgagtggggtagccgattgtttaacctcccctgcgcgccaagcctttatttcggaactggtcaccgagcaggatttacctaatgcggtggggttaaactctatggctttttaattctgcccgtttaatcggtccgggactggcggggtttgtgattgccggaa

SEQ ID NO: 589 - DNA, 8314 bp, synthetic construct
  source 1..8314: mol_type = other DNA
  misc_feature 1..8314: note = Synthetic
tgcgggacttgaacccgcgacccacgaattatgagttcgctgctactaaccaactgagctaacggggcgaatctagcctaccggatggtgggcagaatactgaattttgtctagggtggggaacgtgactaacattttgcgaaaattgcgggggcgcaggatcccggatgcggtaaaagccgtcctgacctcctcggatagagtttttgaattcctaacggtagcggaggatcgctttctggttgtgaccatgcaggcattaactgaagtggaatctgggcaggtaaagtcacgttttggctgggatgaagtttctcacgcccgctgggatagcgagacgggaacgctgcggattgttttccatgagggcaaagatctggttcttaccccgattgaagctcccaaacacaactttatggacatcatccgggaggcgctgagcgaggcgcaggtgtttattacccctctagagctgccttccggacagagagttagcgcacagatattgcgtgacgataaccgcaatttacgtttacatccgccgatatctagttttcaaaaccccgatgaccagcagtatttgcgttcagtagtgagcgaatgggaacactcacggtaggcttattcaagtcgatcccccatagctcaacggtagagcattcgactgttaatcgaagggttactggttcgaatccagttgggggagcttaaaacctcagtgcttgcaggcactgaggatttttgttttagctccggtggtagaggctttcgaagctaatgtcaggtgggtattttccctgataaatagcgctggtaagcagaattgcttgctcttttttaaatttgaacttagagttgaagagaactgaatctcagtaagcttcgcctcgttagcgaagttgaatgctcagccttttggctattatttccactgcatcttttgtggcgtaagtgtgttttaccccactttgttgcatggtttgcttatccttattctatgaacgagaaggaaaatacccctaaagataggcggcgttatcggattggcattgatgtagggcggaactctactggcttctgtgctctcgagattgatgatgatgacaatccgatttcctttttgaacctttcagtgctgctgcacgatgccggggttggtaaagatggcggtaaaattcaggaaactcggaaggctatttctggaagaactcgccgagcgcgccgtctgattaggaacaggcggagacggctcgcggagttggataagtttttggttgagctcggttggccgctacccgatttggaaaagtatcccgacccgcacgaaccgtggaaagtccgtgccctgctggttgaggaatacatagaggatgagcggctacgccaggaaaaactggcgattgcgatccggcatatagcgcggcatcgaggctggcgctcgccttgggtgtcggttagcagtctgcatgtttcgcatcccgattctgatgaactcattgctttgcgggcgcgagtagcagaaaaaactgggcggattttgcccgcagggttgactccggggcagctgctttatctacttgatagtggggaaaagatacgtggtgatgccggtattttggctggtaaactcttacaaactgattacgcgacagagcttaaaaagattttttctcgtcagcgacttagcgaagattttggcaatcagataatcgataaggtttttgccgtaaagtcccccaaaggtagtgctgccgaaaaggtagggaaagatgcattgccagggcaagagcatctagatcgcgctgaaaaggcacatccggtttttcagcgttatcgaatcgccaccattatcgctaatttgcggattcgcgagggtgagggtggacagaacgaacgccgcttgactggcgaagaaacaacttccttgttcgagttcttaagcaacccagatcgcaagaagcttcccacctggatagaggtggctaaagttttagggatcgaacgccaggatttgttcggaaccgggaaattgacggcggatggggagcgaaccgggaatactccgccagtagatgaaacgaatatccgtttgactaagtgtggtatcaagccagtgcaacagtggtggcgtgcagcaagttacctggaaaggtgtgcgtttattgatcagatatctcgcgcatcctcacccggggaagctaccaatcgtgaagaacagatagctgctgattttatcgccagcctgaatgatgaagacttagagaaactagaggcatcggtgaggctcccgatcggcagggcggcctattcggtagagagcttggagcgaataacggaacggattttagtcgataatgtcgatttgcagcaggctcgggaagtggagttcggggtttcgccggagtggaagcctcccgcagttccggtgggtgaacccgtgggaaatccagtggtagacagggttttgaaaggggttaaccgctggttactgcgagccgaagccgagtgggggattccccaacaggtcaatatagagcacgtacgcgaagcattcatgtccaaggcgaaggcaaatgaactgcaacgttttcaagcgcagcgttttaagaagaacgaggaggctcggcagcagatagagggaagccagaatctttcggggttgccccgtatcgctgcgattcgcaagcaacaagcgttgcagcgacaacattgtgaatgcttgtactgtggaacccatattacatttgctactgccgaaatggatcatatcgtcccgcggcgaggggtggatctacgaataccagggataatctggtggcagtttgcaggcgctgtaaccaagagaaaagcaatattcctttcgcggtttgggccgcgcagacaaatatcccgggggttagtcagaaagaagcgatttctagagtcaaaggttggtttaccgatacttccgttaaagatgacaaaagtttacgggcgggggttattgacaggttatcgcgtaccaaagcagaccccgaaattgacaaccgctctatggaagcagtcagttggatggcgcgcgaactggctcatcgaattgagcagcgctatcgcatcccgctaggtcaatcggcgacagcaattgatactagcgaaggggaggacgcggactctgaaaataaagttaaggtacgagtgtttaacggctcgattaccgcagctgcccgcagagcttcaggttttgaagggcgagttaatctgattggcggacgaggaaaaacccgtctggacaggcgtcatcatgctatggatgccgccaccatcgcgatgatgcgcccggcagtagcgcagacgttggtggaacgagaaaaccttcggcgtggccagattatggctggtggtgagcaaaattggaagagctggaaaggtagcacctttgcgcagcaaaagatctatgcagtttggctagagcagatgcgttatctggcagagatttataaccaagcattggctgatgaccagattccggtgttctctaacttcaggttacggctcggggacgggaaactgcatgaggaagtgaaaaagctgcatagtaaacaattgggggatgcttggtcgatgaatgatattgatcgggcagaaacccccgctttgtggtgcgcgttgacccgcttgcctgactttgtgtgggcagagggattacctgctaatccggaacgaaaaatagtggttaacggcagtcattttgctgcagatgacagtgtcggaattttcccaacgaatgcccctacgatgaagttgcgcaacggatgcgtggaggtgggaacttctatccaccatgcgcggatttaccgaattttgggtcgcaaaaaaccggtatatgccatgcttagagtgtttacggtcgatttaccgaataaagctggggttgatctatttcaggttcatttgccagaacaaagtatttcgatgcgcaatgccgaaatgaagttgcgtgaggcttttcgggaaggcaatgccaagtatctgggttggctagtagtcgatgacgagctggaactggatttatctgcggaaagaaaaggggcaattgccgagttgctatcggagtatcctggaatatcgcattggtcggtagatgggtttcccatgaaaatcacactcagactgcgtccactttatttggcgggagagggaatgccggaggatgctttgccgggaaccaaagaaattttacagggtcgaggctggtggccagctatcaacaagttgtttaacgcagcaaaaccaagggtaattcgccgggacgtgcttggaaatattcgcgataattcttcgcgactacccaatagctggtctatttaagggggaaaccatggcttcctggcggattattgatttaacgcagttttctgggtcggtttcctcgaaaacaggagctatagttttacatccagaagataaaccgcaggtgactctaccagtggctgatgttgcggtagttcttatcgggatgggagttcacctctccggagctgtgttgcaccgtttaaccgccgcagatgtgtgtgttttgctctgcgattggcgggggattcccgaggcgggagcctttgcttggcggcctcactctcgggtcgcagcgcggcgggtggcacaggcgggtatgagcgttcctaaacaaaaaactgcctggaaagcagtggtgaggcggaaaatagaaaatcaagcgaaaactttgctgctgtgtgggaaagatatagacagtaaaaagctgctggagttagtaaggctggtacgttctggcgatcccgataacaccgaaggcagagcagcccgctattattggttggcgctgttcgggaaagagttctcgcgtcaaccggggttgggtgatggcattaattccatgttggattatggttatacgattgtgcgcggtcacggggttagagcggtgctagctgccgggttagaaccgtcactggggatattccatcacaatcgagctaatctgttttgcttagttgacgatttgatggaaatctttcgaccgttaattgatttggaggtttaccgccttgaaaaggccggtaaatccgcggcggctgattgtaaagccgagttggtggcggctgccagtagtcagtatcgagatgatggtatcggtattcccacagcatttgaggatctcgctcagttatttggcctttacgttgagagtcaagtaaaaagcttttctcctcctaaatggtttaagtagtttctatgagtaagaagcccatgtggtgtctggtgatgttcgacttgccggtggataccgcccgccatcggcgcgaagcaaacgcataccggcgaatgctgttggatttagggttcagcatggtgcagtttagtgtctacgcaaaatatactcctgcgggattaagcgacgtaaccaccatcggtaaagtccgtgccggtattcctcccgaaggaaacgttcgcatgattttcttaacagataaacaatggtctcgaacgttccatttttcaaacggaactcctagcaaagcagaggaaaaaccggaacaactatcaattttttgagcaaaaattgagcgtgaaaccccgtgtaaactgggattatttacccctactcaagcatatcaggggtaaatacgaactgaatcccagcttctgaaaggaggaacattgtggaaagtcaagcatatcaggggtaaatacgaactgaatcccagcacgcgctagaaaacctttcggctaaaaccaagcatatcaggggtaaataagaactgaatcccagccccggtggcaatccccgcgccgttttggcaagcatatcaggggtaaataagaactgaatcccagcaaaggaaaaataaatgattgttgatggtcaagcatatcaggggtaaataagaactgaatcccagctcctagcggtagttgaagccattcctacccaagcatatcaggggtaaataagaactgaatcccagctatgggggtaaagggtaacggtgaggaacaagcatatcaggggtaaataagaactgaatcccagcagactatcggctggcgtctcgtgtccctcaagcatatcaggggtaaataagaactgaatccccagattctcctcattcagtgcaatagagacatagtaaaaagtgaccgtattaaggtgcttactggaactttagttgaaatactaatagtccttgggacgtatgtaacaggaatagctgccgttgtaaaccttatttggaatcacctcaagggtgagtatctaaagctatcgggtaaggggtaggagagctctatgtccgatattatggctagtgaggaggaaacgaaatgaagataaaagcaatgtccctagcgttcgctactttcgctattttcgtgttgaccgaaatagttagctttccatcagtggcaaacacagctctatccctagctattgggattggtggagtatccgccctattcttagcgatccgacagcatggctaaaaaatatttctcaagtgctggagctgctgggtatctagggttatctcctagcacggttgcgacctaccgtgctagaggaatcttcccacctcctgacgtgataatcggagagggaaaagcgcaagttttcgggtggtctcaggagacgctagaccattggcaagccacacgccccggcaaacctggcagaccgaaagggtcgtaaatagtaacttcgatggaaacattttgggattggtatcctccttttgatattgattccaagaagacatagccccggcaatgctgcaatatatcgtatcaaccagcgcaaatagctaggctaagaaaagctgcactgatcaggagatagctcatgcttatcggaatgctgttatcgtgcacttcctggacggatgtcagattcgtatcggaccaacccccggtggcaaactcttggaaataggggttaatcaagacggggatatttttcacgccatgaaagccagggcgaaatttttgaggaaaggatggatgaaatgaaaactgacgaagaattgctagcagaaatcgcggcggatcccgagccggaaatgacgattactgatccctccttaattaaggtttatcaggcgctgattgaaaccgttagagcagatagacagctagacgaagcggttaacgaggctcgtaatcaaggtcaaacctggcaggcgatcggtgagattatcggtatgacccggcagggcgcaatgaaaaagttcgctgcctaaaaaacctgctatcccatggggtgagcggcaggaagtggggtgagggcagagagctctcttagttcttaatggcgcatgagacttacgtccattgagggatgctgctcagtctgataagattttaatcgtttgctctggtgatttgaggcaccgtaatgagcgctccaaatttcaaagttgagggttgagataggtcattgaggggtgacctaaaggagatttttacgtaatgaagcagcatgccacaaaactaactgctaccggattcgctttggcgctggcgggaactctaccggccacagggatcgcgcaagccgctcccgagcctaccgggcccgctgatcccacaggtactgaacagcaaaaccagcaaaccaatccgaaaattcaatcggaaaagaacctggaagccgcgaagaataccgcccagcagagcgcaaataaggccacggaggcggaaactcaagcgcaagtagctgcgaagaaagcgcaggaagctgccgaacaatccggagaaaagtctgcggccagcgaaaaggcgaagcaagacgccctcgatgccctagtgaaagcgcagaaagagagcgcgcaagcggcaagtgatgcagccagcctgcttgaaaaagccaatgagaagaaaacggctgccgagagcgccgcaaaagctgcgggtgaagccgtaaccaaagccgagcaagcaaaggcggaagcagataaagcagtcgcagataatcctgcccccgatgctggacagctgcaggcagccaaagacaaggtagctgccgccgaaaaagccaagcaagaggcagacgccaaagcggccgcagcacaaaaagcgctgcaagacgcacaggcaagcgcgcaaactgcggctacgattttgcaatccgccacggaaacggtcaatcaggctacccaagcaaaacaagatgccgaagctgatgtacgcgccaaggaacaaaaagttagcgagctagaagccaaagttaaacagctgagtgaggacgccgagcaggccttaaaggacgcgcaggcagcggtagaggcagctaaagcacaggtga

SEQ ID NO: 590 - DNA, 23375 bp, synthetic construct
  source 1..23375: mol_type = other DNA
  misc_feature 1..23375: note = Synthetic
tgttgtattgcctgcagcaaatgcacacagattatgcgaaacggaggcacaccaggctgcgtggttaaagacagcgaggtgtacctgccaatatacaataaattttgtataaaaaaaggagaagattaaatgccaaagtgcgcactgataaccggagcagcggggggtatcgggtatgcctgtgtaaagcagcttttaaaggacggctttttgattgtagctatggatgttatccaaaaatccttggccagcgagatgtttggcacacttaaaaatgtcatatattttgaaggcagcattgcaagtgcagaagacagaaaaaaagtagtcgatgttgcggttgaaaactatggaagaatagatgcgcttatcaatgtggcaggtatcgcacccaccgtgcgcgcagatattcttgaaatgaccgaggaaagttatgataaggtaatggaaataaatacaaaaggtaccctctttttaacccaacttgtggcaaagcaaatgctttcccaacccgctgatgataaaatcaggggcaccatagttaatatttcttcaatttctgcatacacaagctcaataaaccgcggggaatattgtatttccaaggccggtgtttcaatgattaccaaactgtttgccgaccgactggcaaatgagggtattcttgttaacgaaatccggccaggaataattaaaaccggcatgactagcaccgttaaggaaaaatacgataagttaattgacgaggggcttcttcccataaaacgctgggggctgccggaggatattgccaacgcagtgtctgtgttgtgtagcggtaagctttcatatactactggtcagtccatcgatgtagacggaggatttcatatcaggaggctgtaatggaacggaattttattcagatagataacctaaaaatagaggttgtatcattaaacactgccgttgtgggaagcggcgctgcgggttttaacgccgccttgcaacttaaaagacatggacagcaggatattgccattgtaaccgaaggaataaacatgggcacatcaagaaacactggttcggacaagcaaacctattacaagcttactttaagcggtgatattcccgactcggtgtttggtatggcaaaggatttatttggcggcaaatgcatggacggtgatattgctcttaccgaagccgctttatctgcccgatgtttttacaacctttgtgagcttggtgtgcccttccctaccaacaaatacggcgagtatgtcggttataaaaccgaccacgattcaaggtcccgcgccacctcttgcggaccgctgacttcaaaactgatgacacaggcgctacagaaaagttgtgaagagcttaatattaaaatctttgatggttatctggtaattgccataataactgacaatgaaaaggccgttgggctgctggctctgaacctgaatatgacagaggacccaaatcgccgatttatgctttttaactgcaaaaacataatttatgcaacgggcggccctgccggaatgtacgccgactcggtttatcccatggaacacaagggcagcaacggggttgcgtttgaggcgggggttatggggagaaaccttaccgaatggcagtacggccttgcatcagttaatccaagatggaatgtatcgggaagctatatgcaggtgcttccccgctttatatcggtcgacaacgacggcaaccaatatgaatttttaggtgaatatttcaaagatatatatcaatgcctgtcaaccatatttttaaagggatatcagtggccgtttgacagccgtaaaattttgaatggctcttcgataattgatttattagtcttccgcgaaaacctcagaggccggcgggtataccttgactttagaagcaatccttttggaataaaaaatattgattttaacaaactcagcaaagaggcggctaaatatttattggacaccgcctccctgcagtcaacacccattgaacggctgcttcatatgaacagccttgcgtatgatttatttttaagcaaaggcgttgatcttgccaaagatatgcttgaaatagcgctttgtgcgcagcataacaatggcggacttgcagtcgatgtatggtggcagaccaatattaagggattctttgccgcgggtgaggttgcgggaacccacggagtataccgcccgggcggcagcgctttaaattcaggacaggttgggtcattaagggctgcccagtatatatctgccaaaggtaaaggtaagcctttgaaattagagattttcaaaaaccttgccgagccaaaagtaaaagaatacataaaactgattcaagatatatctggcagcgaaaacaatgtagacaaatactataaatgggcaacaggcttaatgagccaggcaggctctgcagttagaaataaagaaaaaatacaaattgcactgcgggaaattaaagaactgcttaaaaattttaacaccaaaataagcgttgctttaccagattcccttgccgacgctttcaggctgaaagaaacattaattagccaatatgtatatctcagcgcctttttgaattacattgataatggtggcaaatctagaggttctgctatttactacgataaatcaggaaccctgccagaggggctcgatgagtttttccgtttcagcgaggacacaggtgaatttgatgggcttatacaggaagtaaagtttgacagcaaggacaaaactgttgaatacacgtggagaaaggtgcgtcctcttcccaccccgggtggggtgtttgaaacggtatggaaggaatatagagaaaaaggaattatcgaataaaccgataattccttttcatttctaaactatatatagcttaaccgccaaagggtatttcctcaattacctcaattaacccgctgcgctggtagagagatggcaggattcttacagtataccccctgccgttttggcacagccatctgaaaatcggctttcggggcactgcgcaggctgagagaatactggcaatcaccccgccatgggtaataacaactccttcattttccccagaagacagtaaatgatttacaacctggttaagtgccaagcaggtcctgattttgaaatcccttcccggctcaccgccgggcggcgaatcggcttttccggaggtccatttaataaagtctgcgtccttttcaagctcgtgtgcggttttgccttcaaaccgcccaaaattatattccctaaggttatctaccactatcggattaatatccggatacaaaatctccattgactgccggcaacgcagcagagggcttacaaatcctatacgtacatcggggtagactgcatttattttaagccagtttaactcttcaataccttctttgtttagtggcagatcagttacaccgatatattgaccgtttttattgccgtctgttaaaccatgcctcagcagatgcaccttcaaacttttcaaatggaactttcctcctaacttagtgtcaacattttgtacaaaatatctatatacttattgaaaaatttttaatataatattggataacagataaaatgaggtgggtctgtgtgagcaataagttttccaaaaccatatcggcgctgcgcaaagaaagggggatatcacaaaaaaatgccgctgccaatcttggaatatcccaggcactcctttcccactatgaaagaggaataagggaatgcgggctcgattttttaataaaagctgctgattattacggtgttagttgtgactatcttctcgggcatgacacatgcccttttactgataaaaatagcgatgatactatacatacaagtccacagcgcctgctagcatgtgtgttggatattgtaaacgatttaatatgccgcctgcaaaacgaagagttaaaaaccgaagtacagaattttctttatttatctgtatataggatcatcaggattttatgccagttgtattcagtagacgaatcgatatttatgtttgacaattccatataccagcaactttcattgggcgaaatgcaattgtgcgaaacacgcatgaagcttgtcccaacgaaatccatgccaaagtactcaagcctcgaagaacttacaaacgggaacccaaaccaatataaagcgttaaaagactttatttccatgaccgaagaaatattaaacttaaaacttaaatgaaaattatgcggggtagacgccactaccccgcatattttatttctttttatttttacgtcctttggcacgttctcttttatctttgaattctatccacttgacccacagcggaccggttaaacaaatggtcgaatacgaaccggaaataatgcccaacgccattggaatagcaaagctgcggagagtcgtcaatccgtatatttctgcaaccactattactgtcagcattgcaataagggtagcaaccgaggtcatcagtgttctgcctaaagtctgattaatacttaaattaacaagctctccaatcggtgttttggtatcctttttgcggttgtccctgattcggtcatagataacaatagtatcattcagcgaataaccaagaattgtcaacacgaccgccataaagtttgcgtctatctgcaatttgaaaatcacacaggtaaaaaaagcaaccagtatatcatggaacagcgcaacccaggccatgattccggcggaaataccaccgattcttctaaacctgattccaatataaattataactaaaatacttgcaagcagtactgcggcaatacttttggcaaaaaagctctttgccaaaaggggatttacggtgttagagtctccaagctgaatattattatcggggaatttttcctgaagcgcctcggtgagcgacttttgaatctctgtggacaccgcctcatctgccgcaagagtaattattagcttctttgaagcaccggttatatccgtgctttctataacatcaaccggctttcctatcgtttcttcaatcacggtatcggcatcattaagggaaagctcattctcaaaggtgtaggtaaaccttgtgccgcctttaaagttgatatcgagattaaccccgaaaacaaacatgaatattatgccgataataaaaatcatcgccgaacaaattaagtacttctttatattaccaacaaaatttatattcttacgcattcttggcacctccatacagccacggcttgcggaatgccttgaaccttgatatgctctttaacatcaggcgggacgcggtaacacccattacaaagttgaatataacgcccattaaaagtgtgtagccgaacgagtatattgagccggttatcgaggaactaaagaagttcataatccaagcaatcattttataggttaagctgttcggagacccgaatgcgcccatcaatatgattgatacaattataaccgtaatatttccgtctaatatagcactccagccggtttcatatcccgaatcaatagcaccgtcgattgtcttgcccttacggagttcctccttgatatgttcggatgtgataacgtttgcgtcaacacccataccaatcgagaggattatacccgcaataccgggtatggtaagcgtaaagctggggaaattggggaaaaaaccggaaacacaggctatcattccaccgacctggcctataagcgcaatacttgctatcgctccgggcaggcggtatcttaatatcatcagcaggcatacaagtatcagcgcaactataccggcgactaacattacatttaacgcctgggcacccagtgtggggctaattatctgaagttttgaatcatcgacatttaatgcaaagggaagcgaaccggcattaattttgtttgcgagttttgtcgcctcctcggcatttgccattccttcaatataacatttgccttcggtaataacagcgtttaccgtcggagcggaaatcatctggtcgtccatccagatggatatttgctttccataatatttctgtgtagcttctgcaaatttggcagcgccagaacttgtcagttcaaggtgtacaatatatctgccattttcatctaccccgggataagctctcgccacgtccttagagccctcaagtattaaatcatccctggttgtaccaccgtagaaggtaagcattgcggtctcacccaattcctggaccgcctcagcgggatcgaatttgctctcaccaggtttccatgggaagcggactattacctgtttattgctattatccgtataaacttcgctatctgtgatattaaggtttactaaccgggtttcgattttttctttagcagccgccatattttcatcggttatctggcttttatcaatgtccggcacaaaaatagcttcaacaccgccgctgatatctataccccagcggatttcgtcagcgccttttatataaacctttttaatgtcgccgtagtagttatacactccaaaaaaggcggcataggtcagcgcaatgatcagtatggctactataaaaaaaaccggtttgcctactctcttcatcggccaagtcctccatttttctttatctgaacagtttgcattgcttaacggatatgtgttcaaatttactaaaacatatccagactaacgctgtttaattatattagttttgaacagtaaagtcaatgaaaagccaaaatttttgctgcggaattaataaatttaaatcatcttttcaagtgcggcatatttaacacaaatacataacagttctgtggcagccgcaagttcagaaatatccgggaaggtgggtgcaattctaatgttgctgtcgtcagggtctttcccatacggatatgtcgcccccgcaggggttaccaccaaacctgcctgtttgcacaactcggtgacacgggacgcacagccgcttaaaacccacaggctaataaaatatccgccattgggtttggtccaatgtgcaataccggtatcccctagctcctggtcgaatattcttaacaccgtttcaaatttaggcttgataatctgcgcgtggcgcttcatatgggccttaatgtcatccaggtttttaaacatcctaatatgtcttaactgatttatcttatcagggcctatagtctgaatggtcagccttttctttatttcggaaatatttgcggaacttgccgccattgcagccacgcccgctcccgcaaaagttattttagaggtggaggtaaacattataaccatatcttcattgccgtttttggaacactctttgtatatatttaacagcttgtccccttcatcattcaaatcatgaacggcataggcattgtcccagaaaatcctaaaatcaggtgccgccggtttaactgcggcgagcctttttactgcctcatcagagtatgtaaatccctctggattttcgtatttggggacgcaccaaattcccttaatagccggatcgccttcaatcagcttacatatggtatcaatatccgggccgttgggtttgttctgcaccgtaatcatttctattccaaaatattcgcaaatggcaaaatgccggtcgtatcccggggcagggcacacaaacttcaccttgccttgggacgaccaaggttgtccgcccaggcctttaaacatggcttgctgtacagtgtcgaacattaaattcaaggaggaatttccacctactataacattttccgctggtacttcaagaatttcagcaaaaagcgctttaagttcgggcaacccgtcaaccaaaccataattgcggcagtcggttccgtagctgtccttgtacccattttcactgttaaccatgtttaatagctcaaggctaagatcaagctgctccttgcagggtttacctctggacatatctaatttaagcccgcgccggcaaaaatcctcatacctctgcttaatagcttcaagttcggagcggagctgttctttgttcatttcactatactttaacatgcatatatcctccactatacgggttgctaacttcataaattttaatacatttacttgtatatttcaagaataatatgcaattacttcaaatgctttcgcaaacaatataaaaaagttattttggcttataaattgactttgcgctcctaaaatgatataattagcgacgcataaaatttatatatccgcccgtggcgcagctggatagcgcaatggattccgattccagaggtcgggggttcaaatccctccgggcgggccatgctcaaaacctgtcgaaaaggcagcaattgtttttgagacaggttttgtcataataaattggagaaattattaaagaaagtgataataagtgaaaggcaaatttattgtatctgcattttgcggaatattttttgctattgttactttttatgttttggaatatataaagtttgagaatgctttgttgatttctatttttgctggattgatgttttatttgatgcttctaatttttcttttattatacgaaaacattttaaataagcggtattatgaagcagaaaaaaacattaaatcaaatatttggtttaaatttaacggtaatatcaacactgcaaattcagttagaaatgctaatatttattttacagacgatggtattgtatttatatcattggatacaaagccctatgtaattgaagaagtattaattcaaaatattgaaaaaattcaatcagattatattaataaattgaatatatatactaacgataatcgactgtttattatcacttcctcggaagtaaaagagctattcccaatattaaacgaacataattggatgaataaggtataaaatgaaacccgcttaaatgcgggtttttcttttgtccacgcggatttaaagttatcccctattttcttacagatcttaaatccaatgccgtggaaggcgacggaaacggccagtatcccgcagaagctattgccgcgctacagaatgctactgacaccgctgccgcgatagctgagaattcacatctgtcccagaaggaaatcgacgacgctgtcaacgcacttgaagaggctacaatatctttaatgcttcaaaaatcagcgtgaacaccgataaagcttgccgattccctcacgcaggccaaaataattcaaaagagcaattatactgacgaatcatggaatgccatgcaaaaggccatttccgaagctaaagtcctgttattaaaggaagacgtaacacaagaagaacttgatgcggcattaaaagcgattaatgatcctataaatgccatttcaaaaaaaacaaacatataccctgataccggtgatgacttcaggtcttctgttatgattctgcttgcatctctttcatcagttgttctgtttacatcccttgccaaaagaaagaaaagggcaattttaaacaaaactaattaggctatttcaacaaaagacacctttattggtgccttttgttttttgtttatagaattcctctaatatccgctcggtacagttttttcgccaccatggcattttacactttattatagcaaaacacatcgcccggcattgcaaaagcgatgtgttttaattttgttgttcttaatagtcttcattataggtttacgatttgttgaaaaaaatggagtattactttgcattccatattaaataatggtaggttttggttgaccaaacaatttatttattatacaataattttgtcaattaatgttatcttttgaaaaaaaacacacagaaaactgcgtgcaaaataaaaaaaggcggattgcttgtcggataccgccataccccacggcataatgccttatcttagaactgctgatggatattgatagacttataataagccttcaataaagtttacctctgatggatattgataaacttatacataagcaattccaagtttagtcttataatacaatatgattataaaattgtcaagtgtaaagaaggaggaatatttatggcaaacaaggtcagaatcgggctggatattggcatcggctcaatagggtgggctgtgattaccggcggtcccaaaaactcaaaattagaaaacttcggtgtaagaatatttgactccggtgagcttgacaacggcaaaaacagaaaaagtcaggaacgtcgacatttccgtggagccagaagacttatacgacggcgctattttagaaaggaatggctaaagtcgcatttatcctatataggattccttgatgaaagtgtaatgcaagaatatgagttaataaaagatcaaaatgttcactatttaaaagcaaaaggtgtctttgaaaaattaacaaaagccgagttatataaatgtatgatacatacctgtaaccacagaggctaccgtgatttttacgaaaatgattatactcttgacagcgatgatgaaacatctgtcaatagagttgctgcaaacgaatttgaatccatgttccgaaaaagcggctgcagaacggtttctcaatttattagccaaaactttgttaatgaagccgggcaaatcgaatttagaaacaggaattctcgcaaagaaaattatttgctaatccgccgcagcctactacaggacgagctccgcatcattcttaacaagcaagctgaatatcattcgtgtctcactaaaaataacattgatataatagacaaaattatattttcccagcgcaattttgaagatggtcctggagacaaaaatgacgaattccgtagatacacaggcttccttaaatcacttggctcctgtccattctatccggaagacaaaagaggttttagaggcaccgtaatagcagatgtttttgcagtaattaatattctttcacaataccggtttattgataaaaatacagaaaaatattatctaaaacccgatgttgctaaacagcttgttgatcatttgcttaaaaacgccaatcttacaataacagatgtaaaaagaatacttaaggcaaataatttcgagctgcaaaaaagcaataacagtgatgacaaagcacttgccaaagcaattagatttctaaaaattgcaaaagccagtattgaaaaagccggcgaggattgggagatttggatttcagaagagcaatttgactgcgaaaagccctcaaaactgcataaaataggcgaagtattatcaaaataccaaacaccctcctacagaaaaaacgagcttgaaaagctcggttttatgtcgccggcagttattaaagagttttcctctaaaaaaataagcggaaccgcacgggccggataccgctatatgtgtgacgctattcatgcttttttacgcggcgatatctatggcaattttcaagcaaacaggatgaaacagcttagccaagagaaagcaaatgaatctaaacgtagtattaaacttttaccgcaacatattgatgatgaagatattaagcagaatcctgtagttttccgagccataaacgaaacccgaaaggtgcttaatgccattattgagttgtatggctctccggaaactattgtcgttgaagttgcaagtgagttaaactcaagctttgtagaacgcgaaagaattgcgaaacttcaaaaggaaaacgaaatcaaaaacgataaagcgaagcagaaaatcgcagaattacttaacatttctgtagaagaagtaactgttgttatgctcgaaagatataaactatacgaggagcaggagggcaaatgtttatattccagcaaaccattaggggaactgactgacgtattgaaaaatacggacaaaaaatacgaaatagatcacattgttccattttccttaatactggataatacccttaacaacaaagcccttgtttttagtgtcgaaaatcaggcaaaaggccagcgtacgccattaatgtatctcgacgccgaaaaagcagcagcttttaaagccagagccaatgaaatgagaaccagaaaagaaaaccacattagtgaaagaaagtataggtatttgatgcttgataacatatacggaaaagaagccgaagaattgttgtcacaatggaaatcccgaaacattaatgacacccgtgccataacaaaatatattgtttcattattaagcaaaaaccttgtgttcagtggcaacagcgggcaaccggtttatggggttaaaggtgcattgacttcaaagtttaggaagttatggcttaatcctaaaacttggggaaatccagataaaaaccgagactcttatctgaatcacgctgttgacgcagttgtcgtggccaatcttacactaccatatattgaaatcgcttctgacaatttcaaacttcagcaaatttataaaaaatacagatcccaatccgtacccgaatatcaaaactatcttgaaaaatgtttagacaaaatgcaaaaatactataattttccaagggaatactcaaaaaatttattaactaaaacagaacgggtaccctcatatctccctaatattgcagaagaggttgatatccgttttaacgacgaggacgaggaactgttccaaaaaaacataaattattattataaagacctttcaagctttgttgtaaagccccacatgccgattacatcccataaacaagaaaagaaattccgcgggcaaattgccgattctaatcccataagagttgttgaaattgattccgaaccttataaaattttaagaaaagaaatcggctctttgaccaaaaaggatatagacaggctatacaccggcgataagacacttatatctactcttgaaagaatttttgagggaaaagacgacaaatataccgtagaaaaatacttaaaagaaaatggcctgacagaattccggacggattccgggcagccggttcataaagtgtccatcatctccggaaagatatctaatttcttcaaaaaacccatatcggaaaataattactcaatactcggtggattaaattactattgcgttgaggtatataaggaccataaaggcaacacaagaatatggggtatcaggtatgtagacataaaacacaaaggcaaaaaattgtatataattaaagaacgtctaccggaagactattgtagccatgttatgtatcttttcccgaatgattatattcggatatataaagatggaaaaataaagtttgaagggtattataaaagcgtctacaacataaaccaagcaagcctttattattctaaaaggaacagtccaacagaaccaagaaaatgtataacaatttcaaaaaaggatgaaatcaaaaaataccatatcgatattctaggaaggttgggtggtgaaattaaatgttccgcaccgttgtcgttaatttcggagaaagacttagtgtaaaagacaactggcttattatttccacagccgagggagaaaagcaaatcccaatagaagatatttattcggttgtggttgataaccaacgtacatatatgtccattccttgtttaaacgcgcttaccagttccggagcccatttgttgctttgtgacgggaagcacaaccccgtgtcggttgtgcttccccttaacactcactatcgaccgcttaatgtaataaaaaaacagctgtcgctaactcaggattttaaagacaacatttgggacagaattgtaaagcataaagttttaaatcaagctaaagtattggaactttgcggctgcaacagcgaatatgctgcgcgcttgagagaattggccgaggaagtggtggatggcgacagcgggaaccgtgaaggcattgccgccaaaatgtattttaggtgcctgtttggttccaattttatcagaatgaacgatgatgctacaaatgccgcattaaactatggctacgcggtgatccgttcatctataagcaaggcgttatgcggctatggctttaattgcgttttgggtattcatcatattaacgaatcaaacccgtttaatttggcagatgatttgatggaacccttccgcccgattattgacttatgggtcgccgacaattttgaagaactgcttaatgaacttacacggcagcaaagaaatgaacttgcggctatcgttaataatgtggtggaatttggcggtaaaaaaatgagaattcgaaatgctgtagaaaaatatattcaaagcttttcaactgctgtagagagaaacaacgcaaaatatatccttttcccgaaaataatacgccaggatctttattttgaggaatagagagatggtaaacagaaatatgagaatactcgtattttttgatttgcccgttatgactaaaaagcaaaggaaaaattacgccgctttccgcaaatttttgattaaagacggatatcaaatgctgcaattttcggtttatagccgtgttacgcgcaatcatgacgatgccagaaaacataccaatcgccttcgaaacaacttgccgcccgaaggttctgtaagggtaatggtagtaaccgaaaaacaatacaattcaatggaaatcctggtcggcgatcttacggcaagtgaatgttttttatccccacgcgagctaattgaagtataggttgatttttaaatggaatatgatattataaatttaaggttttagttctctgatggatattgatagacttatattgaagggcataaaatttacatgctaatcacgttttagttctctgatggatattgatagacttatattaaattatcaattctcaaaacgacgtataagttttagttctctgatggatattgatagacttatatcaccgttctccagtattgacgcttcatcccgttttagttctctgatggatattgatagacttatatgttgattaatgattgtgcctacccccatacgttttagttctctgatggatattgatagacttatatttggacaaaaagtggattcattatgggaaggttttagttctctgatggatattgatagacttatataggcagacgaggcgtatatgcgtacttctggttttagttctctgatggatattgatagacttatatcattgtggggtctttttcattctgccagttgttttagttctctgatggatattgatagacttatatcaacttgcagccagtaccgtgacagaagccgttttagttctctgatggatattgatagacttatattcaagatactaatatgtctggcttcaggtggttttagttctctgatggatattgatagacttatattatcacaaaaagcgtcacccatgtgcaaatgttttagttctctgatggatattgatagacttatatacaacttgtatgtgaaatatgcggtggtatgttttagttctctgatggatattgatagacttatattggcgattgtatcgtcacttggcatgatacgttttagttctctgatggatattgatagacttatatggtaaaaacatgaaagaaactaagcatgatgttttagttctctgatggatattgatagacttatatccgatggaactttggtcttgccaattatgtgttttagttttctgatgagtattgatatttaaatttacacagttttatagggatattcagaaagccccaacgaaaactctaccggggctattttagttattacatacttaattccctgcatcaattcacctgtcaactaataatatttatttttcgggggaatattattttaataaagtattgacaggtgaagtgcaaatgaaaaaactgctttacattacggttaactcaaaggatgaaacccagtcgtccagcaaaacggttggcagaagattggtcaatgcaattctggaaaaactacctgatgttcagcttgaagaattagatttatataaggaccacattccacagttaaaggcctgttatttcgaggatagaaacgcaattgtaagcaccgaagcaaaaagcaggctatctgcagaagaacaaaacgaggttgacacaatcattaaattatgcgaccaattcagggacgcagacatttatgttttggcagcgccaatgtggaatatgtctttcccctccccgctaaaagagtacctcgactgtgtaattcaggtaggtaaaacagttgagtttaggaacaacaaaccccatgggacacttaacaataagcatagggtatttatctatgtacaatcctccggcggtaaaatcccgtggctgacaaggcctgcgataaatcagggcgtgaattacgtgcaggatattaccaaattccttggaatagacactttcgaggaattgcttgtggacggaacgggaaccaccgaagccgaacgccaggaagcaattcaaaaggcaaccgaggaaatatatgaactggttgacaaaatgtttgattaacaaatcctgtcaaacgacaggatttaatattatatatagcaattggctattttttcttgtaaactattgagatatttactattttattgactttattttgaatagcgtctataataacaataatggtatttgatactatttattcttaaggaggttgtttcaatgtccaaattccagcggttttttacctgtaaacattgtggaaacatggtaggcttaatagtcaacggcaactccgacttaatttgctgcggcgaggtaatgaccgagcttgttcccaacacagttgacgcttctcaggaaaagcatgttcccgtggcgaaatataataacgggattttagatgttcaagtcggcagcgtacctcatccgatgaccgaagaacattacatatgctgggtatatgtccagaccaaaaatggcgggcaaagaaaatccttaaagcccggcgaagaaccaaaggttcagtttgccataatagacgacgaaccaattgcggtatttgaatactgcaatcttcacggtctatggatggctgaattataaaaaaacggaggaaagaaatatgtcaaaatacgtatgcagtatttgcggctatgtttatgaccccgaagtgggcgacccggacaacggaattgctccaggaaccaagttcgaagacctgccggatgattgggtatgtccggtgtgtggcgcagaaaaggacatgttcgagcctgaggaataaaagatttaacggcaccaaatttggtgccgtttttattatgtgcacaatcagattaaggcaacggatagtttacagccatctcaaccgctcgttttactatttcaagctgttttaagcttatgccctctggcacaaaagaaattttatctatgtttttatccaaaagtacactataccagcaaagtgctgcggcatatctgcctaaattgtttaaatgatagccgtcgcgcgtaagattctcccctataaaacttgcccgcagggtttggattgccgtaccggcaggtattataaaactaaaggcttgattatctgcaattctggattttactgcgtttactatacagttatacatgtttttttgattacggttgtaaatagcaaaatcggggtggtcgcttgtagtttcatatgcccaggtcatatgccaggcaagccgtgcttgcgggttggttttatttttattaacatacgctattaaatcgtccaaatcctgattataggtatccacaacccctgaatgcccgctgtactgctgaagggttattatatcccagtcctcatcctgaatcccgtataaaagcggcttgtttttgtgcgggacccattccccagcgttatttttaaaataaatatagttctctcttcctgttcttgcattgtttatgtgggtacgtaaactgcagccgccaataaacaggtttccaagcacaacatccttataaccgccgttttttgctatgtcatacagataaaacatagcatcctcgctaaaactatttcctacagccaatatttttaatctctttttatacactttggcactccctttatccgctattaaaactttcgactaagcttattagcgtaatatttcaaacatatctatattctttctcctttgcttcataagcgagagaacctcgttaatatccggcaaactcggctgtgcccccatgcgcgaaatggtaatggcagcagcggtattggcaaactccagcgccatttcaggctcggcacccaaacaggttgcggtacaaaatgccgcgataaaactatcccctgctgcggtagtatcaacaatctccaagccctcaaccgcaggacttttaataaaactgtctttatttccaaataccgctccgttcgctccaagcgtgataatcgcattttctacaccagaacggttaagtttttcaaccgcccttttggcagattcatcatcagttacggcaatcccagtaagatcgtgcgcctcatgctcatttggggatatgtaggtaatacactttaaaaattcatgggacagcggtgcagccggggcggggttgagcatgacaggaacccctttgccatatgctattcgggctactatttcgtttatttgaatcggaatttcaagctgtagcataaccatatcatattgttcgattgtatcatataaaaacattatatcctgcggctctaacttcatattggcgccgggaaccacaataatgcggttggcacttttgccgtctttaatctctatctgaacatttgcaatacctgttggaacgccatcaattactgtggtcttagaaacttctacgccagattcttgcgcaatttctagaagtgccttcccatagctatcatttcccaccttgcctaccatggtaacctgtgcaccaagccttgccgcctgaaccgcctggtttgcccccttccccccaggcgccgtttgaaaaccgcatcctattaccgtctcgccactgtttgggaaccggttagtactcactattaaatccatggcaaaactgccgacgactaaaattcttggtctcaatacaattcacacccctatatttaatttagattgctttacttagacatccttgagtgcataaaaatcctttaacagccgtagttttctttttttgttgggtatccatgtaaattaacaccagacccccgtttttgccgaagacccttgtaccgacggcactgttgcatatgatacagttgaaaaagctcgccttggcgacttaaactatcagcctaagcttggatattataaactgctacttcccccaacgacgtaagtaattgcatttagttttctatgtttggcattagttctttcataacctttcccaggctgtcgtttataaccaaatcggcgattgaatcatactgagtcggcgttttgtttattaaaaccagtttattgcccttaaaatacctaataagccctgccgccgggtatacggataaagaggtgcctccaacaatcagcatatcagcattatgtattgcagaaattgagttttcaagcgtatccgtgtccagctgctcctcatataaaaccacatcaggcttgataatgccgccacattcacatttaggaatcccttcgctgttaatgattttttctattccataaaactttccgcactttaagcaataattgcggtaaatgcttccatgcagttcgtatactgtcttgctgcctgccatctggtgcagcccatcaatattctgagtcacgaccgccttaagcttgccaagctgctctagcttcgccaagacaatatgggttatgttgggtttggcatcgaggaatatcattttgtccctgtaaaacctgtaaaattcctcggtgttagtcataaaaaatgtatgcgacaggattacttcgggaggatagtcatacttttgattataaagtccgtctacacttctaaaatcaggtatgccgctttcggtagaaacaccggcgccgccaaaaaacacaatattgtcactgtttttaactagcccaaggaaactcatgttttatcacctttaaatatcgtgtataattacattttaactccatttaaaaattttgcaaatatacggcacatactaataaaaatagctgtcttgtatgtgggggtttaagatgcttgatttatttaaagagcggtttgttgattacggacttaatgagaatcttgcttattatctgtccaatattgccacagtcttaacaatattagtagcatgtgtaatttcaaatgtaataacaaaaaagttaacactaagattgctttgcttttacatatccaggagcaaagccaaatgggacgatgtatttttaaagaaaaaagtcttcaataggcttgctcaaattgtgccggcattaatcatccatgaatcggcagtatttttcccggcatatcaggcctggattcagcgaattgccttttcatacatcattttaatagtgttattgactctaaacagaattattgattcgattgattatatttacagccagcacgatgtttccaaaacaagaccgattaaaggatatcttcaggttttaaaaatatttcttgccaccgtcgcggtaattattattatcagcacactaatagaccgttcaccctggctacttttaagcggccttggtgccgcaaccgcagtgctgatactgatatttcaaaatacaattcttggtcttgtatcaggtatccagcttgccactaacaatatgattcaaataggtgactggatagaaatgccttcacacggggtggacggtaatgttatagaaataacgctgcatacagtaaaggtcagaaactgggataaaaccattgttaccattccgccgcaggtgttaatttcagaatccttcaaaaactggaagggcatgcaggaagcaggaggaagaaggataaaacgcagtatttatcttgacatgaacagtataaaattctgtgatggagaaatgctcgaacggtttaaaaaaatccagtatattaaggaatatatcgaaattaagaccaaagatattgaaaattataaccgggaatacaatatcgataatgccagtattgtgaacggcagacatttaaccaacattggaaccttcagggcgtacgttcaaaggtatctaaaaaaccatcccagactaaacaaaaacatgagtattatggtaaggcagctcgaaccctgtgagcacggtttgcctattgaaatatatgcgtttaccgacacaaccaactggaccgaatacgaaactatccagtcggatatctttgaccatattctggccatagtccccgaatttgaccttaaaatttatcaaaatccgtcaggcagcgatattagagccctaaagtccaattaaccaaaactttgctttagcggcataatttaattccgtgtcgtattgcggcagtgcgaatttgcataatatacgtgttaaataattgccattataattgatatgggttaaaatataatttgtcagcaaattttcgaaaatattttggagtgtaacatgacagatttggaaaaaaagtttatagatttgcgccgcaaggtagttgaaaaagattttgcaagaatgaacgatatgcagttcaaagccgttaccacaacccaaggcccggttttagtgcttgccggcgccggtagcggcaaaaccaccgttttggttaacaggatatcctaccttataaagtatggaaatgcatacaattcagactatataccacactttacgcaagcagatttacatgtagcagaggattacataagcggaacggtcaatgaactaccctccggagtctttacagtaaatcccgcaaggccgtgggaagtactggcaattacatttaccaataaagccgccaacgaacttaaagaaagaatagaaaagatgcttggtagcgccgctttggaggtcaccgcaggcacctttcattcggtctgtgcaaagatactcaggcgttatgccgatcggctaggattctccccgcactataccatatatgataccgatgaccagaagcggctgatgaaggatgttttatcacaacttaaaatagatgaaaaaatacttcctgtaagatcggttttgtcaattatcagttcggcaaaggataagttaatttctcccgaacagtttgccgcaagctgcggaaatgactacagactgcaactggttgccaaggcatataatttttatcaaaaatgcctgcaaagcgccgacgccatggatttcgacgatttaatcgtaaacaccgtgaagctgtttgagcaaaaccccgatgtactggacatttatcaaaacaaatacaaatacataatggtggacgaataccaggacaccaaccatgcccagtatgttttggttagcaaactcgccgaaaaatacggcaacatctgcgttgttggcgatgatgaccagagcatttaccgtttccgcggcgcgactattgacaatatacttaattttgacaggcagtataaaaacgcaaaggtaattagactagagcaaaactaccggtccacccaaaccattctgaatgtcgcaaacgcggtaattgccaacaacactgggcgcaaaggcaaaaacctctggacccataatcccggaggagaacctgtggttatttttaccgcctcaaacgaacaggacgaggcacgatttgtggccgattcgattctgtccaaagtacaaaatggcatgaagttttctgactttgcagtgctctatcgcatgaatgcacaatccaataccattgaaaacgtgtttgtgcgttcgggtataccgtacaggattattggcggataccggttttatgagcgcaaggaaattaaagatgtaatagcctatctcaatgtaattaacaaccctgccgacaacattaggcttgtaagaataatcaacgagccaaaacgcggcatcggagaagcaaccatatcagccgcacagcggattgcagacggcttgggcgtacctttgtatgaagtgctaaaaaacgccgactactaccccgacctttcgcgggcaagcaaaaaaatagccgagtttgtgaaaaccatggaggaattaatcagcgccgccgatacaatatctgtacatgagctgttagaactcaccctcgataaaaccggctatatggctgccttgcaatcccaaggcgaggaagcccaggaccggatcgacaatattaatgagctttcctcaagcatactgctgtatgaaagcgaaaatccggacccctccctcgcaggatttttggaggaagtcgcactggtcagcgatattgattcctatgattcctcggctgacgcagtagtcatgatgaccctgcattctgctaaaggactggaatttaataatgtgtatatcatcggaatggaagaggggatttttcccggcacccagtcaatctacgggccgcccgatgaaattgaggaagaacgccgtttggcttatgtgggaataaca

SEQ ID NO: 591 - DNA, 23357 bp, synthetic construct
  misc_feature 1..23357: note = Synthetic
  source 1..23357: mol_type = other DNA
cagcttttcacgccagactggattgtccggtatatggtggaaaacagcctggggcgtttgtggctggagcactgtcaggcagaagcgggactatcaaacgagtatttaaatgccagctattttggctggaaatattatctggaggaagccgagcaggagccggaggtacgggtacagctggaaatgctgcgccaagataccaaaaatctcagcccggaagacattaaagtgattgatccctgcatgggcagcggtcatatcctcgtttatgcctttgaggtgctgatgcagatttatgaaagttgcggttatacccagcgggatgccgccagactgattattgaaaagaacctttacggtctcgatatcgatgaccgggcttttcagctggcctattttgccgtgatgatgaaggggcgaaaatataatcgccggattttaaccagtgaaatacaaacaaacctttgtagcattcaggaaagcaacgcgattaaaacggggttgatcagctttattgcggatggtgaaaaaaaactcttgagagacacccaagcactgattgaagtgtttacggatgccaaagaatacgggagtattctggaaatgccggagatcgattttgtggggattagtaaacgggttaacgagattaatgaagcagtttatgacaatattatggatcgcattattcaggatgatgtcaggaatcacttgataccactgatcaaacaggcagaaatcatggtacaaaaatacgatgctgtgattaccaatccaccgtatatgggaagtagtgggatgggaacagaattatcgggaaatattaacaataacttttcatttggaaaggtagatttaggtattgtatttattgaaaagtgcattagattttgtaagacattggctttctgtgggatgttaactcaacaggcatttatgtttctgcaaagctatgagaaagttagaatgtttttacaaggtaatgatattattaatatggtacatctcggtgcacatgcttttgaagaaatcgctggagagattgtacaaacaacagcatttgtagtgcgcaaaagtaatatcgaaaacttttgtagttcttatgctcgtttagtggaattagatagtcagaaaaaaaaggaattagcatatttaaaaagggaaaatatttattatacacaaaaacataaattttttaaaatacccaacaagcctatggtttattgggcatctgattcagcaatgaatctatttgaagaaaatattctctttaacaatgtttctgaaattaggtcaggaataagtactggtgataatgatcggttttatcggctatggtatgagtgttattcaaataatataggatttcggtctgatgaaacaccggaaaatagcaattataaatggttcccaatagtacgtgctggtaattatagaaaatggtggggaaatgcggagaatgttttgaatctgcataatgcagctattgagataaaaatgagcaaaaacaacttcagattgaggacacctgaatattataataaactgggaataacatggtgtagggtgggaactgaaaaagttggatttagaattaaagcagaaaatttaaattttggggaaaatagtcctacattatttgttgatgaaatgaatgctcattacacgtgtgcgttgttaaattcaagagttgcagcatatctgttatttctaataaatcctacaattaattttcaagtcggtgatataaaaaacatcccttttattttgagtccccaaaaaaaaatacttgtagacagcatttcgcaggaatgcattgatatttcacgttgtgaatgggactctttcgaaacctcttgggatttcaaacgtcatccattattagacaatcaaaatcgccactatgcctctttcgcaaatgatgatagaattttccccaaaaatgaaattgatcaaatcccatccaaacattcgcttgctttagcctaccgcaattggcaaaccttcaccgaaaaccaattcgcccaactcaaagctaacgaagaaaaactcaaccggatttttattgaaatctatggtctggcagacgaactcacccccgaggtggaagacaaggacgtcaccatccgcaaggccgatctgggccgggatatccgatccctgatttcctatgcggtgggctgtatgctggggcgctattctttggatacacccggccttgcctatgccggtggcgagtgggaagctgatcaatacaccaccatcatcccggacaaggacaatattatccccatcaccgattcggaatattttgatgacgacatggtagcccgactggttaactttatcaaagtggtttatggggaagcatctctggaagaaaatctggactttattgccggtgccttggggaataaggggaacaccgcccgggaagtcatccgtaattatttccttaaagatttctacaaagaccacgtcaaaatctatcagaagcgaccgatttactggctctttgatagcggcaaagaaaatggttttaaagcgttaatctacatgcaccgctacgatcaggacaccgtcggccgggtgcgaaccgattaccttcataaaatacaggccaagttggaagatagtcttaaccactgcaatgtcatcctcgccagtgaagccccagccggggagaaagctgcagcagtgaagaaaaaggaaaaactgatcaagcaactggccgaaaccaggctttatgaccaggccatcgcccacatcgccctgagccgcctcgctatcgatctggatgacggggtcaaggtgaactacgccaaattccaggatgtcgaagtcgccagtgaagggaagaaagcggttaaggttaatctgctggctaagatataaagttgagtctggcgatttgaaaagattacgttccgatggctcaaaaaaatggtcgtatcgagcggatatcccatttaaacttcttgtaatttgtgtagagatgacttaaaataattacatcaaaacatagatacaaaaattaatatcgataatttagtggtgaaatgatgaaaaatgaaagacgagaaaaaatagttaaggtgtttcgtgaaaatggttcagtagtcagaacaaagacactgagggatcataaaataaccagtcgtgatcttgaagaattaattgttaaaggtgacgtggttaaggttaaaacagggtactatgctttaaatgaaacaatgaaaaaactgacggattttgaattggtctatcagattattccgaatggcgttatcagtgttttttcggcggcttcggtttatgaactgtcaacggtaaaccccatggcagtgagtgtaacgattccttctgacagaattaaaccgattttgccggattatcctctcattgagttgttctatgtctcacaaaagaatctttcgttgggagtcgtcaattttcatgtaaatgataaagtcataccaatctataaccgggaaaggacggtgtgtgacttttttaaatacagcgccagagttgataatgagctggccttggaagtgctaaaaaactatatggcagggaacaaaaaaaatttaccgcttctttttgattatgctgtaaaactcagagtgaaaaaatttatcaaaccttatgtagaggcgttattatgagcaaagcggacagtataaaagccagactaaaaaatctggcaataaaggaaggtaaacaatttgactattatttaatgctgtattttattgaacgactcctttatcgtttatccatatcaaagtattcggatgtctttatattaaaagggggacttttcctttatacgatacttgatgaaaatgcaagagcaactaaagatgtggatatgctggcaaaggaaatatcaaatcagctggattcaataaaagggatatttttggaaatcagcagcattgatgtcgatgatggggtgaaatttatcaatgattccatagaagtcgaacggattaaagaggatgctgattacgaaggagtgcgtgtcaagcttttggcaaagttggataacacaaaaaaaatactgcagttggatattgggtttggagatgtgattgttcctgaagcaaaagagatcgaatatccatctctactaaagatggagaaaacaaaagtaaaagcatattcggtagaatcagtcattgcagaaaagtttgaagcgatggtttatcttggagagtttaatagtcgaatgaaggatttctacgatatttatagtctcagtaaaaaatttgactttgatggacctgttttacaaaaagcgattgtggcaacattcaaaaaacgaggcgtttcgctgaatcagaaacctcatatttttacgactgcatttatcaactctgttgataaaaaacgccaatgggagagctttaagaaacgaatcaaatttcaatcagaagtggattttgaaacggtgatgaaaagtattgtgtcttttttagaaccagttattgagcagattgatttgtttgaaaaatgttggtcctatagtgatcagaaatggaaataagcggctaggatcaatcggcatgataagatttaaagtcgaaaaataaaaaggcacgcggaacaaaatggcttagctgattaataatcgtccggcaccggtcgataaaaaagtaccaactaaatcgtgaaatttactgaaaaggggtatcgtatgaatctgcaaaccatccaagaacaaataaataaaaaatttcagggcgatggtcgaaggcttgttttctggtacgatgataagggggagtttatcaatgatattgatcgtctggtcttagacaatgcaacgatctatcgtttaaccggggacaacacgctatacaccaagtttttatttgagtgtgaggatcagaccaacaattacctgatctatgcacccttccccaagccagcggacaaagataaccatttggcagatactgcttactattcccggcaatttttcacggatcgcgtgtcgctgctgtgcagtacctatgctatcccggaaaagtatcaggaacagctttcccattacgggaaattctggaaatccaatgaacggattgataagtttgttgctttagggattgaagaatataatccggaaatcattgaaatcggactgtttgccgtgatggtaggagagacaacccccagtctggatgagattttgaaaaaaatgatcaaccgtggtggattaaaagagaataaatatttggttgaatttgaaaaaatggatctgctgtcgagtttctgggccttgtgcgctaaatattatggctatacagaggaaaacaaaagctttgaaaagttggttgccacgcttttggttacccatactgccaattcgtttaccggggaactgccaaaaagctggcagccttttgtttcgcataagaaaaacgatgtggctatttttgtgtctaattttatgaataatatttacttgcaggatcggtatgataaaatcgccagagaaattggccggaaattaaaagtcgatgattttttggcttcggttccgactgagaaatactttgagtgtgacaccttcgcagcctttgatgttcttatcatcaaggcggtggtcgaagacctggtcaatcggggcgctccgcttgcagaggaacatcgggaaatgatcagaaaccgtagtgcccgaaaacacttttcccaaacctatcagcaccattacaaagctttagataaggccgatcagctggttggcggtattcaggcattttcaaaagaactgcttgaagtagggaatgctgatggatttattcagatgtatgccaaaaaatgggaaagcatcgaccgctattaccgcggtttttatacagcctatgacaagatcccgggcgatgaggcattgcatcaattaagaggctgggttgaaaacttgtataccaatgcctatctgttgaagttgtcgattgcctgggcggataccctggaaaaggtcagtggctggcatcaattggccggcgaaaaacagtggcatttctatcaacggcaggtcgcaacggcggtaaaaagagaagtaaccgtggtgattatctccgatgccctccgttatgaggctggagttgaacttgataaacgcctgaatgagcgggcaaacactaaatcggaaatcagtccgatgatttcggtgctgccatcctttacccgtctgggcatggcggcgctgctgccgcatcaatccctgaccattaattcagcctgtgaagtgctggtcgatgggatgccatgtttatccagtgaacagcgggagaagatcttaaaaacctgtcatccgcgatcgcttgttgccagctatcaggcggtgatggcgatgaatcgcgagtccgtccgcaaactgatgaccggacaggagctgatcacgatctatcataatcagatcgatgcccggggcgatcatatggccacagaaaatgaagtgtttacggcagtagatgagacggtcagtgaacttatgaatctgattcaaaaactgaccgtcgataaatcaattaccaattacatcatcaccaccgatcatggttttatttacaagcgggataaattggacgaaagtgataaggtaaccttgtcgaaacagtccggcgattttatcaataagcggttcatcctttctaatgaattgccggacttaaagggcacgttgacctattcgctagattatgtcggaacccagaacagcgatgtattggttaccgttccccgcggggtcgatgttttcaaaaccccgggcggcgggcagaactttgttcacggtggcgccagcctccaggaaatagtgattcccctgataaaagtcaagaccgaaaaaagaaagcaaaacgtcgagaatgttgaggttgtcctaacctcagtgacccgcaagattaacaacctgattgtctatctggattttctccaaaaagaggctgttaccgatcgtctgcggccagctaggattgaagtttactttgaaaacgcgtccggcgataaaatatccgaccgtgaaatcatcgtggcggatcgaaaagaccaggatgttgataatcgcatgtttaaagaaaaatttatttttaaaaatcagaagtattcaaaagatgaaaagtacgatctggtcatgaaggatgtcggatcggatatggaagtggcacgacatgaatttatcatcgacattgcctttgcagatgatttcggattttagaaagtaaggttgaaaaatgagcaaatacattgatttgatgagatttttgagagaatcacaccaagtagcaattgaattgacatataaagaaattgaagaaataattggttcaaatttaccgccgtcggcgtatgacaacgctcaagcctggtggtcaaatagtagaagtcatactcaggcaaacgcttggttggatgctggttatgaaactgattcggtttcagagagttataaagatgaagtgattctatttgtgaaggttgattagatgaatgcattatctgaaaagctaatcgaaaattttgctgggaaaatcgtgcgcaaggatctgaccaagaaaattaaagagggtgccaatgtccctatttatgtactggagtacctgttagggatgtattgttcaaccactgacgaagacctcgtcacccaggggattgtgactgttaaaaatatcctgtcggataactttgtcaggccggatgaagcacagaagattatctcaaaactccgggaacgtggctcttatacagtgattgacaatgtttcggtgaaactgaattttcgcaatgatgtctatgaagcggagttctccaatctggggataaaaaatgtcccggtgccggaacagtatgcctcggattatgagcggttactctgcggtgggatctggtgtattattcagttggaatacttttttgatgaaggagacaaaagccgatgtcccttcattattcaaaagctgactcccatccagatgccaaacctggatttagatgaagtcattcgcggccgggaatgctttaccaaggatgaatggattgatgtgctgctgcgctcgatcggtatggaaccagacaaattcaatgatcgggtgaaatggctgctattaacccggatgattcccctggttgagaacaacttcaatctttgtgaactgggaccccggggaacgggtaaatcccatgtttataaagaaatctcgcccaacagtattcttgtttctggcggtcaaaccacggtcgccaatctcttttacaatatgtccaacaaaaccgtgggactggtggggatgtgggattgtgtggcctttgacgaagtggctgggattacctttaaagataaagacggcgttcagatcatgaaggattatatggcttccggttcgttttcccggggtaaagaagaaaagaatgcctcagcttcgatggtgtttgtcggtaatattaatcagagtgtcaatgtgctcttaaaaacctcgcaccttttcgaacccttccccgaggcgatggtctgtgacagcgcttttttcgatcggatgcactgttacgttcctggttgggagattcccaaataccgaccggaatttttcaccaacgactatggtctgatcacagattatctgtctgaatttttgcgagagctgcgaaaaacatcttattcagacatgtttgacgcttatttcaaactggggaataatctcaatcaacgggatgtgattgcggtcaggaagatggcgtccggcttgatgaagctggtttatccccacggtaaatgcgataagggtggggttgaggaaatcctccgtctggctcttgaaagccgtcgtcgggtcaaggaacaactgaaaaaaattggtggcatggaattctatgatgtgaatttctcctatattgacaatgaaagctttagtgaagagtttgtcccggtaccggaacagggcggcgggaaacttatccccgaaggtttgcataaacccgggcaggtttatactgtcagccggggaaaatccgggatgattggcgtctttaagctggaaactgaaatggttgccggctccggaaaatttgaacggaccggttttgggtcggatcgcgacgccaaagaagcaattgaaaccgcctaccgctatttaaaggccaacaatcgcaatattagcggcaccatcagcatgaccaccaaagattatctcatgcatttacaggatttaaacgggagtggcatcaccagtcagttgaccctggcagctttggtagcgctctgttcggcggcgatgaaaaaaccggtgatcagcagcctggcgattcttggcaatctcagcatcgggggaaccattatgaaggttgaagaactggccaatgtactccaggtctgcctcgatagcggtgccaaaaaggtgctgctgccgatagcttccaccgtcgatatggtcttggtgccaccggaactgatgggtaagttcaatctgattttctatcagagcccggaagatgcggtgtttaaggcgctgggagtggagtagaaaaagaaatactaagaaagcctataatacagttcttaggcctgtgttttaggctttctttttttgttatttatgctgacagataatttccgaaaaagtattgatggtaactggatagaatttgcctagaagttttcaagaaaacgagtaacaagttgcataagtatcaataaaggaatataattaaaccagaaaacatcttcaataaacaactttcgtttgttgaataaaaaaacaccccgaaaggtgcttgtcattaaaaaaggtggattgcttgacggttaccaccataccccacggcgacctcgttagaagtgccttatcttagaactactgatggatattgataaacttacactaaatcaataaaattatcgatggatattgataaactgacatattagtaattcttttcgatgtaattgtatacgattaaaaatgcattgtcaatctgtttaaggagaaaaattatgataaaataccgtctgggtctggatatcggcattggttcaatcggttgggcaatcatttctggcgattcaaaagcggctcgcattgaaaattttggcgtgcgaatttttgaatcgggagaactcgatcaactgggaaaagatcgaaaaagtcagcagcgaagaggctttcgggggacaagacggctggtgcgacggaagaaacaccgaaaagatcgggtgaaagggcatttgcagaatattggtttggtcaaaattgaggcgcttaatcagtattttgagacaaataatcaggacatctatgaaatccgggtaaaagctctggatgggaaaatcagtcccgaggagattggtgcttgtctgattcattttgccaataatcggggctataaggatttttatgcccaggaaggcgaaaaaaaagaccttgatgtggaagaagaagcagattatgaagcccttaacaattttgataagctctataagtcaacgaatttcagaactcctgcggagtgtattctgacgaaatttaaaaaggatgggcagtgttatccggattttagaaataataatttcaaggaaattcattatttaatcaatcgtgaatatttaaaaaatgaaatgcaccagatcctggcagaacaaagcaagtattatagaagcctgtcaccagctaatattgaaatgctgaatgtcattatctttaagcaacgggacttcgaagatggtcctggagatgaaaatgaaaaattcagacgctactcaggatttctggattcaattggaaaatgtatgtattacaaggattgggatcgcggttttcgcagtacggttatctcggatgtttatgcggtgaccaataccttgtcccaataccaattcctcgatagtgcaacaggagaatatcatttaaatccagaagcggcaaaagaactggttcattatctgcttaagacaggtaatctcacgatgactgaagtgaaaaagattttgaaaaattataatttaatcctgaaaaaaagcgacttatctgatgatgctgctctttcaaaagccattaagtatcttaaaacgatcaagaatgctatcgaaacctgcggtttagattggaatggttttattggtgaagtccagtttgatgtggaaaattattcaaaactgcatcaaatgggcgaactgatttcgaaatatcaaacgcctaaacgacgaaaagacgaactcaagaaattaccatggatgacggaacccttattaaaggaactatgctcaaagaaaataagcggtaccagtaatgtcagttacaaatatatgtgtgaggcaatcgaggcttttatgaacggagaaacctatgggaattttcaggccaacaaattaaaagaacggcaggaaaatatcagtgatgatcacaaaggtgtgcttttaaaaactctcgatgacccagaaataaaagataatccagtggtatttagagctattaatgaaaccaggaaattgattaatgccattgttcggcaatatggcagtccggagtgtatcaatttggaggttgccagtgagcttaatcggagtttttcggagcgcgtagaaattcaaaagtatcaaaaagaaaacgagaaaagtaatgacaaagtgaaaaaagcaatcgcagatctcttgcagatagaagtgggtgatgtgagtggtgcccagattgacaagtataaactctattatgaacaggattgcaaatgcctttactcgggaaaacccctagacgacattgggttggtcttgatggacaaaacgcatcgctatgagattgatcacgttgtcccctattcactcattttggataacaccctgaataacaaagcactggtgcttggcaatgaaaatcaggttaaaaaacagcggacgcccctgatgtatatgggtagtcagcaaaaagaagattttattgcccggatcaatgaaatgcataataaaaagcataatcagatatcggataaaaaatacaaatacctgatggttgaaaatctgtatgatgagaaaacacttagtatgttaagggattggaaatcaagaaatattaacgatacccgttacatcaccaaatatttgattagttatctgaaatctaatttgcagtttaacagtaaccgcagggaaccggtttatggtattaaaggtggaatcacttccagattcagaaagatatggttgcgagatacagattggggcagggacataaaggatcgggaatcatatctgaaccatgcggtggatgcggtcgttattgccaacttgacaccggcctatgtcgagatttcatcggacaatatgaaattgagccagataagcagacgctaccgtaatactacgaatgatgaatatcaggattatttaaaacgttgcatcaacaaaatggatgagcattatcatttttcaccggaatatacagagcggcttttaacaaaaaccaatcgggttccttcttttgtcgatcaactggaaaaagaagtgatcattcgttttgatgaagaaaatccggaattgtttgatgaacgggtgcaagaatattatggggatttatcggattttgtgattaagccccatctgcccatcgtttctcaaaaacaggaacggaaatatcggggatcgatggcggattcaaatcctataaaagtgtgtgaaattaatggggttttgatgaaagtcaatcgaaagaccattggtgaattaaaactaaaagatatggaatgtttaagaacggcagatacggatttgattgaaagcttggaagaagtttttgagtcattcccaaccgttgatgcatatcttaaggcccgcgaattaaagcagttcaaaaccaagaaggggcaaatagtcaatcgggtttcggttattcagggagcaattagcaactattacaaaaaagagatcagtgaacagaattactccattcttggggggatgaaatattattgtattgaagtgtatcagaataaaaaagatgaaaccgctatctggggaatcaaatacacggatctggtcaataaagataaaaagctttgggtgaaagagacggcgttgccagaagactacggaaaacacgtgatgtatttgtttaaaaatgattatattgaggtgtttaataagaagggcgagcagaaattttccggtttttataaatcgattttcaatataaatcaaaatcagctttattatgcgttggcaacaaaacctttgcaaaaaagaaaagccctttctatttcgaaaaaagattcactaaaaaaatatgatattgatattttaggtaacaaaggtggtgaaatcaaatgttccgcacccttatcattaatgccggcgaaaaaataaccgtaaagaacaattggctgatcgtatcagaaaatgaagaagaaaagaaaatcccgctctcggatatttattccattgtcattgacaatccccggaccactttgaccattgcggccttaaatgccattacccaaagcggcgcccatgttttattctgcgacgaaagtcatttgccagtttctcatacttacccgatgaatgggagctatgccccttttggaaaactgaaaatgcagattgaaatgacggagttcttcaaaggactgctgtggaagactatcatccaggagaaaattcaaaatcaggcaaaggtcttgtctctgtgcaaggtgccagatgagcatgtgcaacggatgctgaagtttagggacgaggttgactatgatgacgtcaccaatcgggaagggattgccgccaaatggttttttaatcggctttatggggctggttttgtcagagatcatgataatgccattaatgcagcgcttaactatggctataccattattcgatcgtccgttgccaaaacactggccgtgtttggctttagctgtgcattaggtgttcatcatattaaccgtcataatggtgcttttcttttgaatcccactcgcaggaaagggaaacgtcaaaaaatggtgttaattactaaatggtagaaaattaatatacaggaattagacgtctgtttcggggtattcggtactggtttctgaaggagtgggttggattgggtccgtaaatgcggttgttaaatcagggttaaacggttcactatctacggctgcagttgttgtgcttactgtaatagtgggggcctcagttggtgttgccattttaccgcctaaaaatcccgaaattaacgactgcaagtttataccagtactttcagagattccttcagtcacttgtgacatggtattgacgatatctttgaccattttggcggaattgccatcaccatacatggtgatgtgatcgacgttgttaagtggcgcagcaacatttcgggcaacttcgggaagggcatcgaagtacatttccataatggcggcatcgctgtatttcttcatcgcttcagctttggcatcaattccggcggcttcggccagacctttagctcggattgccgcagcttcggcaaaacctcgggcttcaatggcggcagcttcctgttctttggcgtagcgatcagcttcagcggccaatcgattggcttcagcatctttggcagcaataaacagtttcgcctccgcttctttttgcttttcaaacaaatcagcttcagccttttggttacgttggtatcgttcagcatcggcagttttgttgatctcagcttttaatcgttgctcgcgaacttcaacttctttagcggctaactcaatttcttttacctgtttaataatgttggcttcctgggtctttgtctcaatcgtttttcgctgttcttcctgctcaatttggtaagcggcgtcagcctgggccttagtcagatcagactggcgtttcagttcggctttgcggatatccagatcggtatttttctgggcaatttccaggtcggctttaattcgggcatcattggcaattttagcggcttcggattcggcaatcgcgacttctttttcggcgttggcacgagcaatcgccgcgccttttttgatctgcgatttgttttcagtaccgagatcctcaatcacgccagcctgatcgcggatcgattgaatgttgaaggaaattatctcaagacccatccgtttaagatccggcacagcgttttcctgcaccttttcggaaaaggattttcggtcggttaacatatctttcaggtcaagtgagccgatgatttcacggacatttccctcaaggacgtctttaacctggggaatgatggcgtcagttgattggtttaaaaaattctcggaagccagtaaaattgcctctggtgatgaaccgatcttgatctttaccgcgccatcaaccatcacatcgatgaagttattggttggtaccgattcaccggttttaacatcaacagacatcatttttaggtccagtttgtcaacgcgttcaagaaaaggaatcttgattcccgcttttccgatgatgacacgccgtttaataccagatatgacataggctgtatccgggggagctttgacgtagctcatcattaagagtgagataatgaacaatacgactacaattgggataatcagtgtaaaaattgacatttgtgcctcctgcaaaatttaattttgagatcaaaaaaagatactcatttctgtgcggatatgacaaccgcgcagattcttgagagtggataatatgtgtatgaactcaacaaattcattatataagaggttggattcaaagtcaaagattaaaaaagaatatggattgttttgtggggtgaatgttataattcaggtgatggtaaatttaaacgcaggcgataagtttatcgggagaatataagtaagaaaataaaacagttgaaataaaggagacacaatgggaattcaggaagaagcattaaagttacatgaagaatggcagggtaagctgagtattgacagtaaggtgccggtaaaaaacaaacatgatctgtcgatggcctatactccgggggtggcggaaccctgccgaatgattcataaaaataaggaagatgtgtacaagtataccggaaagggaaatatggtggcggtggttactgacgggtcggcagtgttggggttgggtgatattggcccggaagccgcccttccagtgatggaagggaaggctgttttgttcaaagaattcggcggtgtcgatgcgtttccgatctgtattccatcccaggatgtggaagtcatcatccagacggtcaagatgattgaaccgggatttggcgggattaatctggaagatattgcttcgcccagatgcgccgaaatcgaaagacgcttaaaaaaagaattggacattccggtttttcatgatgatcagcatggcacggcagtggtggtgacagcagccctgatgaatgctctgaaggtggtcggtaaacaatgggcgcaggtaacggtggccatgagcggcgccggagcagccggatcggccatcatcaagatgctgttgaatgttggcgtcaaagatattatcgcctgtagcagcaagggcatcctctcaaaagacgaacagtacagtaattgggttcatcaggagatagcggagatgaccaataaacatcacaaaaaagggactcttgccgatgctatcaacggcgctgatatttttatcggcgtgtcggcaccgggcatcgtcactcccgaaatggttcagaccatggctgaaaacgccattgtcctgccaatggccaatccggacccggaaattgatccggaactggctatccgagccggtgcaagggttgtcggaacgggacggtcggactatcccaatcagattaataatgtcctggctttcccgggcatttttagaggggcactggatgcccgagccagtgacatcaacgaagcgatgaaggttgccgcggcaaaagccattgccgacttgattggagaagatgaacggagtgctgattatattattgtgccggcctttgatccccgggttggaacggccgtggctgaagcagtccatcgagcggcggttgattctggtgtggccagacttaaataactaaaaaacaaaattcagtaattttaattgtgtttgtaatacctaagtgtttataatagtgttgtatcattaagaaatcaggaaggaaataataaaatgaaaatgagcaaagaagataaaatccgaatcatcattgatgctttggatgaggtgattccgattcctaaccataaagaggagcggatcaaagatgtcttgagaaaagccttaagaaccatcgaagaaaaagaaagcgaagattactaaacaaattaaaaagaagcagccagatttgagactttcatttccggggcttctttttttacagtttatttcgattaggtgggtaatctggatagctttgaatctgagcataaaataggttttatcagttgatttatttcaaaatccactcatccggcagagcttggatttcagaaaagaggatgttctgaaaatcgatccctgctttttcatccgggatggggacaagtgcagatttcattcgactaccttcattaaaaaaagtatcaatcactgattgggtcaaaactggaaaatactgtttcaatacgattctgccgcttgaaataaaaaagagcttttcaccatctcgtactggtattttcaaaaggatatctctggttgtcagatgcttataggcatgaagattatggctgatatatgccagacttttgatcaagtcccggtatgtggtggctcgttcgtaatgatattgggccgactctttatgcatacagatctctaattgattgatgaaacagtttaacttggtatcgtcggaaaaaatcagaagcaaggtctgtctgttcttcaaaaaatcttctgggctcattggctcgggaagcgtatgatagtgaaaatcgaagcggttgttctcctgaacaattggaaagaggtgggtgagcatatcgatcaatgataggattatctgttttctccgaaacggtccaaagctatgatcttcccgttccaggacaatcgataatcccctggaatgacttgaatgagtaacgtttagatagaaataccgtctgtcgtttttcatttgcgaattaaaataaggcttgagctccttgatcagctgacattccagcagtcgggcttctaaatgggtatcggtgacaatataatcgatatcatcaatgaaaaaaatcattctttcgatctttggttgcttgggggatttagtgaaataggatttcactctttttttcagacagttgctttttccgacatagataatttgaccagtggaatccaacatcttataaataccgggaagcggtggtatctggtttactttttgctctaaatggctcatcgtttcggtttccatatcatctttattttggttatggctaaaaatattttattctttcacctgcttatacaataacataacactagcttgtttaaccttgatcagggggaacttttgcagaaactgtacaaaaaaaaagtaaattcttgacatcttgagtaaaaagaattacaataagtttaaagtcaatgagtttggagtcaacgaaatgaaaacgaaacgtcaaatccaaaaagaagcaaccagaaaactgattttggatgccgcctatcaagtgtatgcaaatgaagggtttagcgccaccaccaatcaaatagccaaggcggctaatgtttcccatggtacgatctttgttcattttccaacggtagataatctcataatttgtttacttgaacgttttggttctgaaattaatgagcatttgcatctcctctcggaaaaggatgaaagtctggagacttttttagcggcccatattaatgttctgatctgttatgaagatttttataaaaggcttatttccgaaattaacagtttgccccaagaagcaaaatatgtgttcattaatatccaatcagtggtttcacttcatcttaatcaggtgatcgaacgtgataaggaacaaaaggtaattaaagaaataccgatgcatataatttttaatagctggttaggtttgatacactattatcttaccaataactatctttttgcagcagggtcagtgctaacggaccataaggatgaattgattttgaactatataaaattaattagaaaatgaaaggaatcaatgatatgaaagcttacgataatttttttctgcctgtcgatgatttggaacaagcaaaaaactatttttccaatgtattaggtttgaaattaaagtttgatttttctgacaagggcatggctgcatttaatgtgggggatgaagaaccggcgattatcttaaaggaaaagaataaattcccggacgcaaaaccgaccatctggtttgttgtggataacgtcaatgatgaatataaacggctttgcaataacggggttaattttataagtaagccgtttcaaattggaacgggtaacgcggttgaatttgaagatttattcggcaatcgattgggaatgactgattattgttaatggcaggtaatgatcgatattaaatgattcaaggaggtaaaaagatgaaaacatgtatagcatgcggaatgccaatgaagaaagaaagcgactttgcgatgggtgacaccaataaagagtactgtgtctattgcgcaaaggaagatggctcgatgcagtcatttgaagaaaagaaacagagcctggtaaatttcaccatcaaaacccaggggcttgacgaaactgtcgcagaaaaggcggtggaggcgatgatgcgtcaactgccggcatggaaaacgcgtttttagaaataggaaccgaacgaataaggatgaaaaaagtagccgtgatggtctctattgctgggaccatcacggctagtttcgttgattaattcttaaccccggtttttctgatcagtatccaagttaatccagttgcgatgatactgaagattgttaatgagaacattccaataaaggggttctgcgcggacatccccatggataggtctaaaaatttcagcaggatggttgaaatctgaccagagatgaacatatcgatgattggcaaaaccacaaagacgacgatataaaaaccaacgatataactgattttttgttttttattcatccgatagagggccacagtaatgaaataaccaagggtttgggcagcaataaaaagaaccgtcagaaaaaggaaactgataagatattcagatagaccgctaaatggaacagtgcctgtggattgatagatcatactcaataagctggaatacgcaatgccgcttgctggcgattcgattaactttccgagcgccaatagcagcagtgaaaacaatgccattgccacagccaatgttaccgcaacgcagatccgatttgcaaatagagattttcgcgagattccgttttgcagggcaaacaaaaaattttccttaaaagcgttcaggccgcaaacgaaaagaaatacggcgggagccatatcgagacctgcgatttggctggattgattcgtcgtcaggatgtcagatgaaaaggtgatctccatcggaacaagggccatcacggcaaggatgaccgcacagaagattaaaacggcattccggtgatccacaagctgatatttataaattgcatttaatttcattactttactcctcgtttgttaatttgatgaataatttctgtaaatccaggttggttatctcaatcccttcaggcacagtactcttattaagtgacccaataatagtggcggtttttaatccgcccagtacatcttcgccaataacttctttgtcggcgataaaggtatcgacatgcttgattgtgccggtaacggaatagccgttgcttaataaggtttcacaggattcattcaccagaatttcaccgtttttgataatcatgacatactccagcagattggcaatttcatcgattaaatgggtggaaataatcgcggtgaatggattatcgctatatttttcaatcaataaccggtaaaacatttcccgatgattggcgtccaggcccaataccggttcgtcaaacaagacatagggggtgttgaccgaaagggctatgatgattttaaaaatagaagtataaccagtcgacaacgatcggatttttttcttggtattcagtttaaattgcttggctaagttgagtgcatagtccaaatcaaagtccttaaaaaattgtttagtccacttgaatgcttcattacaggtcatactctcgggatacagatttttttctgacatcagatagagcagcccctgggccatgtcattttcaacgctggacaaatcatcgatggtaacttggccgctgtcagcaaagagtcgattggtgataatattcaaaagggtcgattttccagcgccgtttcgacccaataatccatatattttgtggggctcaaaagtcaggctcacctgattcaaagctaatgtgtcaccaaatgtttttgtcacattatttatttctattccgttcattcctgataacctctttctaccattcccaatatttcttcattggtgatacctaatttttttgcttcctcgatgagttttttaatataatgatcaaagaataattctttgcgtttgtcccgcagttttgaaaccgcaccgggagcgacaaacataccaacgccccgctttttaaaaatgatgccctcgtcaaccagaattgagatgcccttaagggccgtggccggattgattttataactgaccgacaattcagttatggatggaatctgaccgctttcctcaaacgctccagttaagatggcatcttcaataccatcggcaatttgaacaaagatcggccgttcatcttcaaaatttatttgcaaagggataccccctttcaagaatgttggttagttagttgactaattaaccatgatactattgtaaggctgagttgcatttttgtcaatactaattttataaacagtgaaatttttgcatgtgcaaatccggctcagggtgtttttgaaacctttttatgctatactcacaaatgaaaaccaatgcgcgtcgtccgctgataatggtctatttcgatttgggcggagagcgaaaatttaaagcaaatgaagaggggaaaagttaatgtacgaatattattataaaacacaggattttgggatgtgcctgatggagggaaaaggatctggggaagaagccatcattcctactgatcgagatattctaattgttggtgatgacatatttaaaggacacaaagaattggtacgggtagaatttcccgataccatcattgagatcggcggtttcgtttttgatggctgtgaaaatctcaaatttgtcaagcttcccgccaagctcaaagatttctggcaatatgcgatgacccgatgcggtatcgaagaaattgatataccgggaacggtggagcggatcgctgcttttacatttaacgagtgtacgcaacttaaaacggtgaaaattaatgaaggaacaaaaaagatactggcctgggcattcaaagattgtgttaatttaacagatgtctatttaccagcctccattgaagaaatcagtgataaagcgtttgaaggatgtccgaaagtcgtgctccatcggaaatgaacagtataaaaagatgtctaaaaaatgatcgctgtgttagaaaaaagaacacagagtgcttaaaaattaatcactttgtgttaaaaaaatataaaatattagcttttgaattggcataaaaattgctttacatctagcataagcatttatttagaaataagctgctgataaaaagctattaatatgggtattacctggatatacttgaattgaatcagaaaagcaaaattaaaaaatgaatacttaactaagaaagtggaggaaaaaatgacaaaaacagggaaaatgttagacatggcaaaaaaaatggcagaagcagctgctgaaaaagcaattcaaattgatgtgccaatggtgatcgttatttgtgatgcaggcggaaacatggtgttatttaaccggatggaagattctctattggccagcatggatattgctaccaataaggcttatacagcggtagcccttaaaatgagcaccgatacggcggcagatctggccaaagaatctggtcagctttttgggattgcatcttgtgacaaaggaagaatggttgtatttgggggtggtttcccaattgttgaagatggaaaaataattggcgggatcggcgtcagtgggggaagcgtggcagaagatatgacagtggctcaggcgggactggatgcgctgaaataagttttgaaattagcttgactgatccagttcaacta

SEQ ID NO: 592 - DNA, 22838 bp, synthetic construct
  misc_feature 1..22838: note = Synthetic
  source 1..22838: mol_type = other DNA
cttttaataaaaaagcgggaacatcccaccgtcacccagattaaatcggtcaaagaggtgatgaagggtctttttgcgatgactgccattgatgatgaagaggacaccatcatgaaaaccttcaaagcaagagcgatcagcaaattaagagaaatcgatgctcttttaattgaataccggtttgaaaaacgctatcctggaaagtcggtgctcttaaatggcaaagcgatgctggaatccatcttgacgataaaaaatgctctaatattttttaaacatgtccatgatcagcgggatgacctcctggatctgggcgatgatctggaaccgattatcagcttttttaacagcgaacagaaaaagattctcaaaacggcctttaaatatatggatatctatgaaaacagcaaaaactatattgtcgatgaagagcttaaagacactattgaagaaatccggctggtcgctaaaaagcccagcccctacaacgctatttttaaactgccagatgctttaagccgctatgccaaacgacatagtgcactgattgccgttgaagttgaaccgattcgggagcttgttttaaatgacgaaagggaggtgctggcacagctcacacccactgaagttaaagagaaatttgaaagccactatctcaaaatctttcgggaactgatcgataagctggaaggttccaatgaaattgccacggtcaaaaacatccgttatgaaagtgaaacgctaaaagaacggtttacgcatgagattgtcgcctataaaaataccttggtggtggtttatccaccgtcggagtcgggtgaggtagcggtgaatgaaccgccggagatcattaaaacaactaaaatcgtcaagcttaaaacgatgaaaattcctaccaccgtcaccatcgaaactgaaagcgatgtggaagcctttatccagaccgttaaaagcgaattattaaacgaactcaaccgcagtgatgatacgatcatcaatctgaccatttaagggagcccagacatgaacaagaccgccattaaagattttgccgtaactgcgcgaagaaaactcctggcatccgttacggacaaagccggaataatcggaattacaaccgacagcattaccaccgccattacctcggggaatggctttgctgtctttcccacgcactttggcactgaaaccaccctttccggaaaagaactgacccagcgggaaaacctgatcagtcagatcaaagaaaaaggttataacacggtgatggaagaggtggcctatacctggtttaaccgaattatcgccattcgctttatggaagtcaacgactatcttcccactaaggtgcgggtgctgtcttcagaaacaaaggataaattggaaccggatctggtcacccaggcgcccgatattgaactgggtttaaccccggccgaaaaggacgagatcctgagcctgaaaatgaaaaatgacatggacaatctatttcggatgctcttgattagacaatgcaacgccctggggggaattctgccggagctgtttgagaacacctcaacagccaaccgggattataccgaaattctcctggatattgcttacacgaaagaagacagcgtgattcgggatctgcttaagattgaggaggcagattttctggatgcggtggagattatcggatggatgtatcagtactacaataccgagcccaaagatgaaacctttgcgcttttaaaaaagaacgtaaaaattaccaaagagcggcttccttcggccacccagcttttcacccccgattggattgttcggtatctggtggaaaatagtttgggacgtttgtggcttgagcattgtcaggccgaagctggaatgacaaatgagtatttaaatggcagctatttgggctggaaatactatctggaagaggccgaacaggaaccggaggtgatggcacagctggaaaccctgcgccaagatgctaaaaatctcaacccggaagacatcaaagtgatggacccctgtatgggtagtggccatatcctcgtttatgcctttgaagtgctgatgcagatttatgaaagctgtggttatacccagcgggatgccgccagactgattattgaaaaaaacctttacggcctggatatcgatgaccgggcttttcagctggcctattttgccgtgatgatgaaggggcgaaaatataaccgtcggattttaaccagtgggatacaaacaaatctctgtagtattcaggaaagcaacgcgattaaaacggagttgatcagctttattgcagatgggaatgaaagtcttttaaaagatacccagacacttgttgaggtgtttacggatgccaaagaatacggcagtattctggaagtacctgtcattgattttgaagcgctgaataaacgggtcaacgcgattaacgaagcagtttatgacaatattatggatcgcattattcagaatgatgtcaggaatcacttgataccgctgatcaaacaggcggagatcatggcacaaaaatacgatgtggtgattaccaacccgccttatatgggaagcactggcatgggcctgaagctaggagactatgttaagaagcattatccggatagcaagagtgatttatttgcggtgtttatagaatgttgtgggcaaatgtcaaaaataaatggttatcaggcaatggtcaccatgcaatcttggatgttcctttcaagtttcgtgagattgagagagaatagcataaataacacttcgatttcaagtctcattcaaattggttataatagttttcccgaaataaattctaaagttgcacaagcggtagcttttgtagttaggcgcacagtcataagtaggtattcaggaaaatatcttgatctaacaaataattatactcaaatttatgataaagaattagcattttttgaacagaaaaaaatgggagcatattgtgtacaaagtgaaatattctcgaaaatccctggcaagccaattgcttattgggtaagtgaaagtgttgttcagaattttaataaaggaataagtatacagagtataagtgattttacaggctcacaacatattacggccgataatgaaaagtttctcagaaattggtgggaaattcactcatcggaaatcagaaatgatcactggaagttttatgcaaaaggaggagaatttagaaaatggtatggtaatttggaacttatagttgatttttcggatgaagcattatcattttataaagaaaataagacttcaaacttattaaatgaacgttactgggatcaagaaggtattacctatactgaattaacgagtagcattaatacatttaggtatttaccgcctaaatgtatttttgataaaaaaggaccaagtattgttagattagaaaaattagaatattgtttgggaattttaaattcaccagttgctaatatgtatttcaaagtgttaaacccatcaataagtacacaggtaagggacgttaagaatttgccaattattatagataatgataataaaccatgcattgataaattaactcaacaaaatattaacatagccaaaattgattgggatagcttcgaaacttcctgggattttaaatgccatcccttattagaattaggcagcgaaaatcgctacgatgtatcattcaaaaatgatggcaaagtttttccaaaagacaaaactgatcaaatcccattcaaacactcgcttgctttagcgtaccgcaattggcaaaccttcactgaaaaccaattcgcccaactcaaagccaacgaagaagaactcaaccggatcttcattgaaatctatggtctggaagacgaactcaccccggaggtggaagtcaaggatgtcaccattcgcaaggccgatctggggcgggatatccgttctctgatttcctatgcggtgggctgtatgctagggcgttattcactggatgcacccggcattgcctatgccggtggggaatgggaagtggacaactacactaccatcattccagataaggacaatatcatccccattaccgatgaagaatattttgatgacgacatggtagcccggctggttaactttatcaaagtagtttatggagacgcatccctggaagaaaatctcgactttattgccggggccttggggaataaaggcaatacctcccgggaggtcatccggaattattttctcaaggatttctataaagatcacgtaaaaatttatcagaaacggccgatttactggctctttgacagtggtaaagaaaacggctttaaagccctgatctatatgcaccgttacgatcaggacacggtcgggcgggtacgaaccgattaccttcataaagttcaggccaaacttgaagacatccttaaccactgtaatattatcctcgccagtgaagcctcgaccagcgagaaagcagcagcagtaaagaagaaggaaaaactgatcaaacaattggccgaaacgaggctctatgaccaggccatcgcccacatcgccctgagccgcatccccatcgatctggatgacggggttaaggtgaactacgctaaattccaggaagtggaagtcgccagtgaaggaaaaaaagcggttagggtcaacttgctggctaagatataaagtcgagtctaagggtttgggactgctatagtagtcaagtgattaaagatcgactgtatccattatggaaacagttgaaaatttataaccagctaaaacaggataacaaataaaatatgctaccaacattttcagccagtgaataattttcagaaactgaaaatgatggtagaatgttctaaattatcgatgaaaaaattgctgtctatgagttgctccaaaaatctaaaaataccagaagagaggtctatgtgatgaaaaatgggatcaacaaagaatggacgctccatgttgaaaactttgctaaaattgtctcggccgacataaaaatagcgccgctgatgtgttttgtaggagacaacaatagcggaaaaagctatttgatgagcttgctgtggggcttgctgacttatagcaaagattattttccgtccaaaccacctgaaacagccaattataaagtctgtgaagcgtttgttaaaaagaatattggcaaggacatgcaattgtcaaactcggaaatacagctatttattgactggtttaaccagatattggcaaaaaatgccagagcattaacaaaaaaaatctttaactatgagatggaaatcgggaaaatagaaatccgagactattcgatcaaagactctttgacgatgaaatggaacaatgatggggtacgctattcgtttagaaataataccatcacgattccgttaaaagaaaatcataccaaagaggatatttttataacctgtgtttatttctgttggaatattgtcatggaaggaatcgcagcgcctctttatacaccggttgtcaaaggtcgaagaagtggcgaaccggtctatttgccggcttctcgaatggggtttatgctaacctatttacagctattggatgcatctttgaccaatagcttttcgggaacggatgaaacgggtaacagtagtaccttgaccatgccctacgttgactttctgagattgatattaaaatttgaaaatgtcagcaaaatctcgaaaaagaatgaacaattgattgaatttattgaggagaggatgatcggtggaaaaatagcaattaaaaaagaatacgcgccgacttttaattatataccttttggatcaaagagagagcttcccctttatatttcatcttcggtagtggctgaggtttcgccgttgctgttattgttaaaatcaaatattcaattcaatactataatcattgaagaaccggaagcgcatttgcatccgagactccaatgggagatggcaaaattgattataaaactcgtaaatagtgggattccggtttggatcaccacccacagtgataccattttacagcatgtcaacaatatgataaaacttgataacaatgcggataaagccaaattgatggaagaatattcttattcaaaagacgatatgataaacagagaaatgatcgcaatgtatcaatttaactcagataatatgggaaagacaaatattgaaccgctggaatcgaacgaatacggctttattgtccccactttcaatgcggcattggaaaacctggtcaatgaagtgtatgcatttcaggaggattaaatgatagctgagacaagaattcagtatgctctggatcattttatcgcagaaaaatattttgatgcagaagcggaagaatatcttctaaaagagatgcgtgatagtggtaaaagtgaattaaagattaaaatcaccagggataatctctgtattgaagattttgatagccggggtaaatgcaactttgtgagaccagataaaaatatcggtatgaaaaaaagtgtagatcacttgatttttagaaaaatagaggatcaatgggaacttcatctgattgaaatgaagagttcgattggtgatcgtaagtggattgaaatcaaacaaaaatttagagccagttatttaaatgccaaggcgattgcagtttttgtaggaattacaattgataaagtcatactctacacaacatatgaaaaagcagatattactggcagacctagtgggacaacagatttaaaaagctacgcaccgaaactgggagaaaaattaatcaatatcaaaaaagaatgggacactggaatcgtagagctcaattttggtcattatgaggcgtttcagcataccaaaataaaaatgaccagatcagatgatcaaactacgctactgggagaatacacgatataaatacatgcaagggctttaaagctgataagggggtgacgtatgaatctgcaaacgatacaagaacaattaaataaagaattccagggagaaggacgaaggcttgttttctggtatgatgataacggcgaattcatcgaagatatagaaagcctgctattagataacgcaaggatccatcgtttaactggagacaatactctgtacaccaagttttttcttgagtgtgaggatcataactacctgatttatgctccttttccgaagcctggtgataaggataatcatttggcagatatggtttattattcccggcaattttttacggatcgcgtgtcgcttctgtgcagtacctatagtattccagaaaaacatcgggaacagctttcccagtatggaaaattctggaaagccaatgaacggattgataagtttattgctttagggattgcggaatataatccggaaatcattgaaatcggactgcttgcggtgttggcgggggtgaaaacccccagcctggatgagattctaaaaaaaatgattatcagtggcggtttaaaagagaataaatataaagaaaacaaatacctggatgagtttgaaaaaatggatattctgtccagtttttgggctttatgtgctaaatactacggctatgtggaagaaaacaaaacctttgaaaaactggtcgccacgcttttggttacccacactgccaattcgtttatcggggaactgccaaaaagctggcagccttttgtttcgcataagaaaaacgatgtagctatttttgtttccaattttatgaataatatttattcgcaggatcggtatgataaaatcgccagcgaaattggcaggaaattgaaggtcgatgattttctggcttcggtgccagttgagaattactttgaatgtgacaccttcgcagcctttgatgtttacatcattagggcgatggccgaagacctggtgaaccgaggtgcccctcttccagaggaacaccgggaaatgatcagaaaccgtagcgcccgaaaacacttttccccaacctacttgcatcattataaagctttggataaggctgatcagctggttggcggcattcaggctttttcacaggaattgctggaagttggaaatgccgatgaatttattcagatgtatgccacaaaatgggaaagcatcgaccgctattaccgtggtttttatacggcctatgacaagatccagggcgatgaggcgttgcatgaattaagaagctgggttgaaaacttgtataccaatgcctatctgcttaagttgtccattgcctgggcggacaccctggaaaaggtagccggatggcatcaattagccggcgaaaaacagtggcatttctatcaatggcaggtagctccggcgataaaaaaagaagtaaccgtggtgattatctccgatgcccttcgctatgaggctggagtagaacttgataaacgactcaatgagcgggccaataccaaatcggaaatcagtccgatgattgcggcgctgccatcctttacccgtctgggcatggcggcgttgttgcctcatcaatccttgaccattaattcagccggtgatgtgctggtggatgggatgccctgtttatccagtgaacaacgggagaagatcttaaaaacccgtcatccactatcggttgtcgccacctatcaggcggtgatggcaatgaatcggcagtccatccgcaagctcatgaccggacaagagctgatttatatctatcataatcagatcgatgcccggggtgaccatatggccacggaaaatgaagtgtttacggcagtggaggagacggtgagtgaactcataaatctgattcaaaaactgaccgtggataaatccattaccaattacatcatcacggcggatcatggctttatttacaagcgcgataagctcgatgaaagtgataagcttaccttgccaaaacagtccggcgactttattaataagcgatttatcctttctaatgaattgcccgacttaaatggaactttgacttatcctctggattacgccggagctcaaaataaggatgtgttggtttccgtgccccggggtgtggctgttttcaaaacccccggcggcgggcagaactttgtccacggtggggccagctttcaggaaatagtgattccactgataaaagtcaaaaccgaaaaaagaaagaaagatgtggaaaaggtgacggttgtccttacttcagtgacccgcaagattaccaacctgattgtctatctggattttctgcaaaatgaagccgttaccgatcgtctgcggccagccaaggttgaagtctactttgaaagtgagtccggagataaaatatccgaccgggaaatcatcgtggcggatcgaaaagaccaggaagttgataaacgtatgtttaaagaaaaatttatctttagaaatcagaactattcacaagatgaaaagtacgatctggtcatgaaggatgtcgtatcggagatagaattggcacgacatgaatttatcatcgatattgccttagtagatgattttggattttgaccaccaatgcaaaaaagcatggagagcagtgtgatcactgcatccatgcttttttttattaaagagggaaaagacgctatataagttgaattaacatttttgtaggggtgattattaatcgcccgcacactgcacatgccagctcaatttgcaaaattctttaatcaaacatatatagtctgaaaatcagtttaataatcaatcgtttccataaagataattgcataaatatccgcatgggcgtataatggaacaaggagtcatttatagtaaacattatcttgctcaagtaaataaaaagcaccccgaaaggtgctttgcattttaaaaaaggtggattgcttgacggttaccaccataccccacggcgacctcgttagaagtgccttatcttagaactactgatggatattgataaacttacactaaatcaataaaattatcgatggatattgataaacttacgcattagtaattctttgaattaattgtatacgattaaaaatgcattgtcaatctgtttaaggagaaaaattatgttaaaatatcgactgggtttagatatcggcattggttcaattggttgggcgatcatttcgggcgattcaaaggtggctcgtattgaaaatttcggggtgcggatttttgaatcaggagaagatccgcgacaaaatgaacgaaaaagtcagcagcggagaggttttcgaggggcgagacgattgatccgtcggaaaaagcacagaaaagaacggataaagggacatctgcagaatattggtttggtaaagattgaggaacttaatcagtattttgaaacaaataatcaggacatctatgaaattcgggttaaggcgctgaatgaaaaaatttccccgaaggagatcggcgcttgcctgatccattttgctaataatcggggctataaggatttttatgccttggaagtagaatcactcgatgccgaagaagaggcggattatgaagccctaaacaattttgataagctttataaatcatcaaattttagaactccggcggagtgcattttagaaaaatttaaaaaggacgggcagccttatcccgattttagaaacaatcatttcaaatcggttcattatttaattaatcgtgagtatttaaaaaatgaaatgcaccagatattagaagaacaaagtaagtattatgaatgcctatcgtcagctaatattgagagactggatgccattatctttgatcaacgggatttcgaagatggcccaggtgataaaaatgatgcgtatagacgttacaaaggatttttgctttcagttggaaagtgtatgtactacaaagatttggatcgcggctttcgtagcacggttatctcagatgtttatgcggtgataaataccttatctcaataccgatatgaggacagtgaaccgggtgactattatttaaaacccgaggctgccagggaattggttcaaaccttgcttaaaaccggaaatctgaccatgaccgaggcaaaaaagattgtaaaaaaacatggtatcacgatgtcaaagagtgatttttcagatgatagcgctctttcaaaagctatcaagtatcttaaagtgatcaagaatatgattgaatgttgcggtttggattggaatggttttattagtgaagaccaatttgatgtcgataattattcacggctgcatcagatgggcgaactaatttcaaaatatcaaacccctaaacgaagaaaggatgaacttaagaaactgtcctggatgactgaacccttgttaaaggagctgtgtgcaaagaaaattagtggcaccagtaatgtcagttataaatatatgtgcgaggcaattcaggcttttatgaatggcgaaacctatggtaattttcaggccaataaactcaaagaacggcaggaaaatatcagtccggaatatcgaagtatgcttttaaaaaccctggatgatccggagataaaagataatccggtggtgttccgcgctattaatgaaaccagaaagctgattaatgccattattcggaaatatggcagtccggagtgtatcaatttggaggttgccagtgagcttaatcggagttttacagagcgcgcagtgattcagaaaaaccaaaaggaaaatgaaaagaacaacgatagagtaaaaaaagaaatcgctgatcttttgcagattgaggttggcgatgccagtggcccccaaattgacaagtataaattatattatcaacagaattgtaaatgtctctattcgggcaaaaccttgggcgatattgaactagttttgagggataaatctcatcgctacgaagtcgaccatattgttccgtattcgcttatactggataataccctgcataataaagcactggtgctaggtaatgaaaatcaggttaagaaacagcgaacacccctgatgtatatggggaatcagcaaaaagaggattttattgcccggatcaatgaaatgcataataaaaaacaaaagcagatatcagataaaaaatacaaatacttaatgcttgaaaatcttaatgatgagaacatgttgcgagattggaaatcaagaaatattaacgatacccgttatatcactaaatatttaattggctatctaaaatccaatttgcagtttaacagtaaccgaccagaaccggtttatgggattaaaggcgggattacttctaagtttcgaagaatctggttgcgggacaccaattggggcaaggaaataaaagatcgggaatcatatctcaatcatgcggtggatgcggttgttatcgccaacttgacaccggcctatgtagaaatttcatcggacaatatgaaactgggccagatgagtagacgctaccggaataccacgaatgatgaatatcagaaatatttaaaagactgtcttgtcaaaatgagtgaattttatggctttaaacccgaatatacccagcgactgctaacaaaaacaaacagagtgccttcttttgtcgatcaactggaaaaagaagtggccattcgttttgatgaagaaaacccggaattgtttgatgaacgggtgcaagccttttatgggggggtgtctgattttgtgatcaaacctcatctgcccattgtttcacagaaacaggaacggaaataccgggggaagatttctgatgcagaaccaataaaagtatgcgaaattgatggggttttaatgaagatcaatcgagcaaatattagtgatttaaaaccaaaagatatggtgcgtttaagaacggctgatactgatttgattgaaagtctggaagaagtatttgagacatttccaactgttgatgcatatctcaagacctataacttaaaacagtttaaaacagtttaaaacaaagaagggtcaaactgttaaccgagtatcagtgatagagggttcaataagcaactattataaaaaagagatcagtgaacagaattattctattctcggaaaaatgaaatattactgtgtcgaggtgtaccaaaataaaaaaggtgaaacagccatctgggggattaagcatacggatcttactaataaagataaaaagctatgtttaaaagagaagtcattgccagagaactatggagaacatgtgatgtatctgtttaaaaatgattatattaaagtgtttagcaagaaaaaagatgaaatgaagtttttgggtttttataaatcagtagagaacgtaaatcaaaataaattgaaagtagctttaccaacaaaaccgaaacgaaaaacaccgcttactgtttcaaaatccgatgtattcaaaaaatatgatatcgatattctaggtaacaaagggggtgaaatcaaatgttccgcacccttatcattaataccggcgaaaaaataactgtaaaaaacaattggctgatcgtatccgaaaatgaggaagaaaagaaaattccactttcagatatttattccattgtcattgacaatccacggactaccttgaccattgctgccttaaacgccattacccaatgcggtgcccatattttattctgtgatgaaagccatttgccggtttcccacacttatccgatgaatggcagctatgcaccgtttggaaaactgaaaatgcagattgagatgacggagttttttaaaggtcttttatggaaaaccattatccaagggaaaataaaaaatcaggcgaaggtattgtctctctgcaaggtgccggatgagcacgtgcagcggatgttgaagttcagggatgaggtggactatgatgatgtcaccaatcgcgaagggattgcggccaagtggttttttaatcggctttatggggcgggttttgtcagagatcacgataacgctattaatgccgctcttaattatggttataccatcatgaggtcatcggttgctaaaacactggcggtattcggctttagctgtgcattgggtgttcaccatattaatcgtcacaacggttttaatctggccgatgatttaatggaaccattgcggccattggtggatttatgggtagatcagaatcaggaggacctggttaatgagctgacaaaagaaaatcgacgggatcttgttaatctggtgaatcacacggttctggtgggcaaccggaagtatcacttgcggtatgctctgacagaatatatttccagcctgacttcagcaattgctaaagaagatgtgaccttgttgaaaattccggaaattcagttgaatgatgtgttttttaaggggaatgatggtgaataacagagtcatgcgaattatagtaatgtttgatttaccaacgttaacgaaaagcgatcgccgcgaggcgtcattattccgaacaaacctgatcaagaatggattctttatggtgcaattatcggtatattgtagagtgacccgtaatcatgatgatgcccgaaaaaatgtaggcatcatcaaatcctttctcccaccccacggctcggtgagagtgctgacaattaccgaaaaacaatatgcgtctatgcagatcttaataggcgataaaacagcatctgaaacatttctcaatacggaagacattttggaactctaaaatcgcatcaacatgcggttttaggtcatgaaaaaataaaatcagattatgattgcaattagctaaaaaacatgttaaattgaatttaaggttttggttctctgatggatattgataaacttacacaatgccactgaagtattcaccaaagaagtagttttggttctctgatggatattgataaacttacacattccgatcgatctttacgctggtattactgttttggttctctgatggatattgataaacttacactaaaatctcaactgctacatgggcgggaagttttggttctctgatggatattgataaacttacacctttgctcacagctttaaatttgatattgggttttggttctctgatggatattgataaacttacactctcattattgattgaaagacttcgactttgttttggttctctgatggatattgataaacttacacctattcgttctcgatatcgtagccgatagcgttttggttctctgatggatattgataaacttacacccgggccaaccgctgcgaccaatgccccaggttttggttctctgatggatattgataaacttacacgatagtccttgagcttaatatccttaccccgttttggttctctgatggatattgataaacttacaccaaaaccaccaaccgtacagactaggcttggttttggttctctgatggatattgataaacttacacgtagggcttcttcttatcttgatactataggttttggttctctgatggatattgataaacttacacgaaataacgtaatataaactaacagcacttgttttggttctctgatggatattgataaacttacacagcccaagaaaactataagtacggtagcacgttttggttctctgatggatattgataaacttacactcatagacgctactaaagcgcccatcaacagttttggttctctgatggatattgataaacttacacttttatattcatcggaagtcaaaacctctagttttggttctctgatggatattgataaacttacacttactattccagtgatgatcgtagttagtggttttggttctctgatggatattgataaacttacacataagtttacaatgtgtcttaatccgatgacgttttggttctctgatggatattgataaacttacaccgcccaagtcggtgtatcgttgccaagcccgttttggttctctgatggatattgataaacttacacaaaccgttctgtctccctcagcttctacgcgttttggttctctgatggatattgataaacttacacgttgttgtctcatatttatttaccagccttgttttggttctctgatggatattgataaacttacactgttacatcttgcgtgtatggtgctgatggttttggttctctgatggatattgataaacttacacacgcttatccttaactgttacccatttcttgttttggttctctgatggatattgataaacttacacatccgtaacactgcatgtaattaacggcctgttttggttctctgatggatattgataaacttacacaaaccgttaatgcgttgaaataaatttcatgttttggttctctgatggatattgataaacttacacctttccacttaacgccgccgtatgggtcagttttggttctctgatggatattgataaacttacactggtttacccctttactttgtaatcaatgcgttttggttctctgatggatattgataaacttacacgaatttgacaagatggccattaaaacagtcgttttggttctctgatggatattgataaacttacacccggatttgttgtttttgtatacaatttacgttttggttctctgatggatattgataaacttacaccagtggctccgtctgcataccatggctgccgttttggttctctgatggatattgataaacttacacacgaaggttgcgttgcgttagtaccaatcggttttggttctctgatggatattgataaacttacactggaccatagcgacattgaaaccccggaccgttttggttctctgatggatattgataaacttacaccaataccttcatgatatcgtgaacccacatgttttggttctctgatggatattgataaacttacaccgtttgtttacacaattaacagcgtagtaagttttggttctctgatggatattgataaacttacactttataaaagtattgcttacaattctgggagttttggttctctgatggatattgataaacttacacgtaaaaaagacagtaaagagagtacagagcgttttggttctctgatggatattgataaacttacactgatgataaacaacagcatcagtatgcttggttttggttctccgatggatattgataaacttacacatatttttgatctgtacgaagaactccgctgttttggttctctgatggatattgtatacgctggaaaccggaatcgatctgctgcaggaagaaatggaatccatggcggaagcatttctggattacatgaatattaaaccatccatgaaacgcatggatagtgtgatggtggcttcaaactgtaaaaaaatgacccggctggaaattctgtacagctgtattgccaatatggtaaaggctattcatcaagctgataaaaccggatcgcaccgggaaacccattccaaaaaataaaaaaatccattacccccgacagcctccagaatccctcggatccggatgcaacctttcgacgcaaagctggaaaaaaccataaaggttatgtgggtaatatcatcgaaaccttcgatgaacgaggtgccatcattactggctatgattatgacatcaacagtcacagtgacagtcaattctgcaaataaacaatcagtaagttgggatatcagaatgaagcgaccaccttgctggccgttggagcctatgcaagcaccgacaattacgaacaggccgtccaaaacaatatcgaactggtcaccactgcattaagtcggtgacttttgacatttgttctaatatatgacaatatgtatgatatttgccgcatgtttaatcaggagggattctaaatgaccagacggaacaatgataaaaagaaaaacgaaattaccatacatagcagtgctgctgagtacttaacctttgtcgcttccagcggggagggcggcgttgaaatacgttacgaagatgagaatatttggcttacacaaaaaatgatggcggaactctatgatgtcagcgtttctgcaatcaatcagcatattaaaaaaatatttggcgacggagaacttgagtctgcagcagttattaagaaattcttaataactgctgcagatggtaaacggtacaagacaaatcattatagtctgcaattgattatcgcagtgggattcaaggttaacaacgaacgcgcagttcgttttaggaaatgggcgattcaaattgtcaaagattatacgatacaaggttggacaatggacgttgatcggctcaaaaaaggccatatgtttacagacgaatattttgaccgtcaactacaatatattcgcgaaattcggttatcagaacgcaaattttatcaaaaagtgaccgatatttatgccactgccttcgattatgacaaagatgccaatactactcgtgagtttttcaagttagtccaaaataaaatgcactgggctgttcatcgtcacacggcagctgagttgattgtggaacgagctgatgctaaaaaagagaatatgggtctgaccacatggcaggctgcaccccagggaaaaatcatcaaagcagatgtttcaattgcgaagaattatctaaatgaaaaagaaatggattatatgggacgtattgtgtccatttatttggattatgcagaattacaagctgaacgcaagattcctttatcgatggaagactgggcaaaaaggctcgacggttttttagagtttaatggtaacgaaattttaaagggggctggtaaaatatcccatgaacaggcaaaactccatgccgaaaccgagtttgaaaagtatcgtattgtgcaggatcgactttttgttagtgattttgatcggtttatgggattcgaagacaagccaatagagtaataaattgtaaaattggttataatcgaagactatcagtcgtaagtgcctcaaaagatgacgtatagcaagtttgatctaaacctgatatactgatgacatcattatttgaggcactttttgtagttatgattgagtctgcacacctcaggcaattcctgagaccatggcaggtatttttcaagtacttccggctggtgcagatagtcactgttggggatttctgtcagaaggtaattcagatattcgaatacattaagttcattagcccgggctgattccaccagcgtgtacagaaccgcattggcggttgcacctttaggcgaatcggcaaaaagccaggcgcggcgccctgttgcaaaaggtttgatgctggcctcacagagattgttggagatgggaagacgtccgtcttccaggaaggtttccagatatttcttctggtttttggaataattcagggctttagtcaacttttcatttgtcgttggaatggccgcagtttcgtcaacccacgaccaaaaggcatcgaggatggggcgtgacctttccagacgcttttctctgatctcctcataaggaagatcctttatttcgttctcaattttaaaaagcaggtcgatgtacgctcgtccttcggcaccctttgaacccgggatttctttcccattgctggtcaagggaatgctgtcgataaaatatctacgacagtgcgaccaacataagttgcgccggatattctcgacttgttcataagcggcatacgcatccgtcgttaaatagccatggaatccggaaagcagctgcctggcgatctcccctttgcgtgtcggcgaataatgaaagaaaacggctcggattgtctcgcatgccgcactacggatcacccacatataggattcgctgttggctttcctgccttcctcccggttacactgaatccgtgtctcatccatatgcagcacctcacaggtacgcagttcggcaagaatacgttcataaatcgaggttagccattcttcgctgcagcggtttgtccagttagccatgtttgaccgggatagaatgagccccaaccgataccagtctttttcctgacgggcaaaggggtaagcgattcaaaagatggcgtagtgcaaaataggtcgaattattgtagactaacctaaaagaacttacaggaggttcaggatacaatggacgaatcaaaaagacagctttgggaagagcgttttgaagaacaggcaaacagtggaatgacggtcgacgcctggtgtacctcaaagcagcttaacaaatatacctactattattggaagcagcggatccgaaaggcgaaaatggagccgatggagaaagggaccacagcaccactgtttgcaaaactggaaatgccaacggcttctgatgagcgaataccggtggcgggactgattatccgatggcggggttttgagctggttttgtcggatccccatgatatctctctggcaacacagtttatccgacagctttcacagtcatgatggatcggtttatcaacgacaccacccatatttatattgcgtgtggagccactgacttcagaaaacagatggatggcctggccgtcgttgttaatacggagttcaagctggatccattcgctgacaaatgtgcctttatcttctgcaaccggaaaagaaatgcccttaaagttttacgttacgatggcaacggctttattctggctagcaagaagctgctcaacggcatgaaatttcagtggcccagaaccccatcggaagtcagagaaataaccggccagcaggttcagtggttgcttcaggggcttgaaatcgagcagaaaaaagcccttcaaccagtgacgatgacgctggaaaacagctgcttttaaccgcttcaaaacagcgcaaataaatttgcaaaatggctttaaaatggcgttttaaagactttttattaccgataaatgtagcattctgaagctaaaaatggtataatagtaccaataaaaagcaaaggaatggatacggatgacaggacaagaagaactgctgatgctgcgggcgctggtggaaaaacagaaagaagagctggccgccaaagacgacatcattgccaaacagaatatccgcattgaaaatatggtgcaggcgctgctgcaagctcgcaaaaaactgtttggttcctccactgaaacatcgagaaacctggatggacaactatccctgtttgaaaaaacgcaggaactcgcgaaagaactgtttggtgaacagcagaaaataaccgtccccagtcatacccggaaagcccgccaacccggagtccgtcaggaaatgcttgccggtcttccgaaggagattgaagagtacatcattgggccggatgattcctgcgtcaagtgcggtggagcccttacggtcatcggcaaacggatcgtccgaaccgaagtgacctatgagccaccaaaactgaaggtgaagcagattgtccagcagattgcaaaatgtacccagtgtggcaaagaaggcagtgagaatcccaaggatcattttcagaaagccgccataccggtgccggtactcccgcattccattgccacgccgtctctggtggctcaggtcatgtaccagaagtttgccatgggcatgccctttgcccgtcaggaaaaagactggtatcggttggggctcattctatcccggtcaaacatggccaactggacaaaccgctgcagcgaagaatggctaacctcggtttatgaacgtattcttgccgaactgcgtacctgtgaggtgctgcatatggatgagacacggattcagtgtaaccgggaggaaggcaggaaagccaacagcgaatcctatatgtgggtgatccgtagtgcggcatgcgagacaatccgagccgttttctttcattattcgccgacacgcaaaggggagatcgccaggcagctgctttccggattccatggctatttaacgacggatgcgtatgccgcttatgaacaagtcgagaatatccggcgcaacttatgttggtcgcactgtcgtagatattttatcgacagcattcccttgaccagcaatgggaaagaaatcccgggttcaaagggtgccgaaggacgagcgtacatcgacctgctttttaaaattgagaacgaaataaaggatcttccttatgaggagatcagagaaaagcgtctggaaaggtcacgccccatcctcgatgccttttggtcgtgggttgacgaaactgcggccattccaacgacaaatgaaaagttgactaaagccctgaattattccaaaaaccagaagaaatatctggaaaccttcctggaagacggacgtcttcccatctccaacaatctctgtgaggccagcatcaaaccttttgcaacagggcgccgcgcctggctttttgccgattcgcctaaaggtgcaaccgccaatgcggttctgtacacgctggtggaatcagcccgggctaatgaacttaatgtattcgaatatctgaattaccttctgacagaaatccccaacagtgactatctgcaccagccggaagtacttgaaaaatacctgccatggtctcaggaattgcctgaggtgtgcagactcaatcataactacaaaaagtgcctcaaataatgatgtcatcagtatatcaggtttagatcaaacttgctatacgtcatcttttgaggcacttacggcaaagggcacgcccatggcaaacttctggtacatgacctgagccaccagagacggcgtggcaatggaatgcgggagtaccggcaccggtatggcggctttctgaaaatgatccttgggattctcactgccttctttgccacactgggtacattttgcaatctgctggacaatctgcttcaccttcagttttggtggctcataggtcacttcggttcggacgatccgtttgccgatgaccgtaagggctccaccgcacttgacgcaggaatcatccggcccaatgatgtactcttcaatctccttcggaagaccggcaagcatttcctgacggactccgggttggcgggctttccgggtatgactggggacggttattttctgctgttcaccaaacagttctttcgcgagt

SEQ ID NO: 593 - DNA, 20699 bp, synthetic construct
  misc_feature 1..20699: note = Synthetic
  source 1..20699: mol_type = other DNA
gaggggataaaccgtatatgcaagcatttgtgacgcaggctccctcagtctgtcgggaaccgtatatcccgacagccagctccctcccggaaggagcctcggtggcgatcgtctccatatttttgaaaggtgaagtctgtggctatcgtttgtgattttgcctttccgctcacctttctatctaccctgtccagatccttcggtcgccgttgcgacagctccctcgaggatgacggacaggggatggaggctcttgtttgttattatgtttactttgctaaattcttgtttatattcctctcctctgcaaggtttttggagggtgcgggaacctttttgtctaaaaaggttcccgcgctcccgttcctccgctgaattcttgtttagcgttcttatgcaccctaataatattcgatttgccgctcggtcttaacgcataacgtattttacagccgcacatttttccaaccttttgaagcaggcaaaaattcagcgtggaataaatctgtttttcacaagcgtacggttttgcagaaagacgttgtttttatgattgacaaaaaccgtattctattgcataataataccgaaaggggtgttggcttatgtttttcgagatcgacaaaaaacttgacggagatccggtacgcttatgcaagaatatcacggtagaaggggaagggtacgcgcgcgacgttgcgcttgaatgcgccgagcggttcggcgcggaagacgggaccgtaaagagcatccgtttcgttcccggagagggcgaaagctactcgatcgacgtgagggactgtgagatcgtcgtttcgggacacgtgatctacggaggggtgactctgcttcaactctgcgagtttggagaactttgcacgggtaagctcgaggactcgcccgactgtgaattccgcggctaccgcgtttatctcccgggacggaaattcttttccgacttcaagaatatggtcgacacgctcgcctactacaaatacaactatctttcggtcgagatcggcggcgcgatggagtacaagcgccatcccgagataaacgaggcgtggagagcgttcgcggaggaaactcacaagtattccgaccgcacgcttgaaatacagaagggctttccgtgggcgaaggattcgatccacaccgagaacggcgacggcgatatcctgactcaggatgaggtgcgcgagcttatagattacgcgcgctatcgcggactgaaggtatatcccgaggcgccgacgatgtcgcacacggactacatctgccttgcgcatcccgagatccgcgaacgcgaggaggatccgtaccccgacacctactgcccgaaccatcccgatacgtacaagatcgttttcgatattctcgacgagatcatcgacgtctttcagccggaggtcgtcaacatcggacacgacgagctttattccgtcggactctgcccgaggtgcagggacaagcatccggacgagctttacgctcaggatattaccaaaatacacgactatctcgccgaacgcgggataaaaactatgatgtggggcgaaaagctccttcccgtcgtactgacgagggggcgcacctacggaggcgcggggagcagacgtccgaacaaggaatatccgccgctgttcctgtgtcagtacatgatcccgaacgacgtcataatgctccactggtaccattctttcggcgagcagtacgacttcgtttaccatacgcacggatttcccgtagtgtacggcaacctctcgctcgaccgctttgaggcgtggcgcagaagaaagagccgcggcaaggtcctcggcggctcgttctcgaactgggggagcaacgagaccgaatatatgcagcgcaactgccagttcatgcgcattattttcggcgcgtacgcgttctggagcaagacctacgacacgcccgacaacgagcgggtgctttatctgacctacgaagaggcgtacagacgtcatttcggcaacggacacgccgtcgtgttcgagcataataccgacgtttttatgccctacgagccgttttactgcggaaaattcatcgacgaaaaagcctgccgtctcggcgactacaaagtcacctattccgacgggagcgtcgagctgttcccggtcaaatacggcacgaacatctcgaacgaggatatgcccgtcaccctgaaggagtttgccgagaaatacggccgttcgtccaccgacgaagtggcgctcggagagatatgctattcggtgatccctttgaggaaaaacggcaagacgtatttccgcactcaatttgaggacaagcgtcccgatacggagatcgcctccgtcgagtttatccccgcgcgggattgcaaggtcgactttacctggtacagaaaatagagaaaaggaaaaaccgtccgcgctcgttacagaacgcggacgggtcttcttattattctcaaaacagtgcggacagcagagcggacacgaattctcgcgcgaatgcttcgttttcggaaagctttgacgattctctgaaagaggcatccttcagcggcgtgacgtcgacgtacaagaccgtatcgggaacgcggtcccgcctgacggaatagcgtatcctccagccgagcaggcggcagagcgaatctgtcagcgcgagcaggaaagaacggtcggggaaggcttgtatgaactctccgagtccctctccgaatatgtcgctctccgcgttttgcgtaaagcggaattcgttccggatgaaatcggaaaaagacgtgatctttgcatagcacgccccgtccgcggaagacgagagggcaaacagaaggagcgatagaaaaacgaacgaactccttccgcaatcgagcgaggctccgcggtcaagctcgcccaagtcgacttcggctgagaaacggtatccgagcttgggaagcacagcgcgtgcgttcctgatcacgatgtcgtacactttttcggcgtacagtcccttgggagaaaacaatgtcccctctttgacgtaggagtcggacagaaacgacgcgagaagcttttccgctttttcttcgcgtaagacctttgcgacgcgggattttttcccgtttatcagatcgaacagctccggagaaaaatcgagagaaagctccctgaaagcgccgaagcgcgcggagttatcgtttgcaaaggcggcgagcggcgagatcagaagggcggtcagtcctttgtatgtaaaacggagcgccgtgccgtacgggtcgggaaatccgagcttgacaaaaccgctctttcgagcggaatacggatcggcggaggaaaaaaggagcctcgaaccgactctcgggtacggtattcgttttttagccgcggtgtttttgtaaacgatctttccgttgtcgtcgcacagtatcaccggctggcttagggtgtcaaaacaaaattcaatcatatcatacctcgttgaagaaattataacaaataaatcgtccgtaatcaagtccgaaatgataaatataacaaaaaaagaaaaatttttcaaaacctattgtattctaacgttttttgaagtaaaataaaggttggaaaaaaatattttcggaggaaaaaaacatggcaataaaagttgcaatcaacggattcggacgcatcggacgtcttgcgttcagacagatgttcggcgcagagggctacgaagtagtcgctatcaacgaccttaccagccccaagatgctcgcgcatcttctcaaatacgactctgctcagggcagatacgctctcgccgacaccgtttcggcgggtgaggattccatcaccgtaaacggcaagaccatcaagatctacgcggagaaaaacgcggctgaccttccttggggacagatcggcgtcgacgtagttctcgaatgcaccggtttctacacttccaaagataaagcgcaggctcacatcgacgcgggcgcaaagaaagtcgtcatctccgctcccgcgggcaacgaccttcccaccatcgtttactctgtcaacgagaagaccctcaccaaagaggacaagatcatctcggcggcatcctgcaccaccaactgcctcgctcccatggctaaggctctgaacgattacgctcccatccagagcggtatcatgtccaccatccacgctttcaccggcgaccagatggtcctcgacggtccgcacagaaaaggcgatctccgccgcgcaagagcagcagcggtcaacatcgttccgaactccaccggcgcggctaaggctatcggccttgtcatccccgagcttaacggcaaactcatcggctcggctcagcgcgttcccgttccgaccggctccaccacgatcctcgtagcggtagtcaagggcaaggacatcaccaaagagggcatcaacgcggctatgaaggctcagtcctccgcttcgttcggttacaccgaggaagaactcgtttcgtccgacatcatcggcatcacctacggctcgctgttcgacgccacccagacgatggtcaacaagatcgcagacgatctgtatcaggtacaggtagtttcctggtatgacaacgagaactcctacaccagccagatggtccgcaccatcaaatacttcgcggagctttgatccgacaaataaaagcaataataaagggcgtgttcagactcaagaacgcgccctttgcattcaaagataaaggagatcgcttatgaaactcgttatcatcgttctgaacaagatcgagtgtctccgcgacgtccttcgccgcttctgcgacgaggatctgcacgcgacgatactgaacagcaccggactcgcgcattctctcgaggacgacgagccgcattttctcgcatcgttccgtatgctcctcgacccggcgaggaaggagagcaagaccatcctcgttatgaccgaaaaagaaaaaataccgctcatccgcaccatcctcgacgaggagaccggcggctggtcaaaacccgatacaggcatcatgtgtgtcgtcaatatagaggaagtcgataaataatggaactgaacacccttttgtatctcgcgctgatgatcttcttcggcatggcgttcggcagactggcgaagcactgcaagctccccaacgtcaccggctaccttgtcgcgggtctgctcttagggccggtcatgcgactgcttccttggaatatcgcgatcctgccggagaacgtggtcgcgtcgatgtcggtcatttcgtccgccgcgctcggatttatcgcgttttcggtcggcggagagttcaagatctcatatttcaaacgcgtcggtatgtctccgataataattgcggtattcgagtcgtttttcgcggtggttttcgtcgttataggactcctcgtcgcaggctcgtctctgccgttctcgctttcgctcggcgctatcgccgcggcgaccgctccggcggcgacggtaatggtcataaggcagtacagagccaagggacccgtcaccgaaacgctgttgtccgtcgtcgccatcgacgacgcgacggcgctgatattcttctccgcggcggtctcggtcgcaaagagcctttcggggagcgatatttccgtctccgaggcgatactgtcgccgctgtatgagatcggaggcgcgctgatcgtcggatttttgctcggactcgtgttcctcatcccgctgcggtatttcaagaagcccggaaacaggctttcgcttaccgtcgctttcgtgttcgcgggagtcgggatagccgaatatttcggtttttcttcgcttctgctctgtatggcgctcggcgcgtcggtcgccaacttctcgagcgagagcgacgccgtcttctcgctcgccgactcgatcaccccgccgatatttatgctctttttcgtgctttcgggcgctgacctcgacctctcggctttgccgggaataggggtcatcggagttatttacctcgtcctgcgcatcgtcggcaagatcttcggtacggcattcggcgcgaagatctcgaaggcggataaggcggtggctaagtacctcggacccgcgctcattcctcaggcgggcgtggcgataggtctttccctcgtcgcgacacaggtcatccccgaccacggggcgcagatacgcgcggtcatcctctgcgcgacgttaatttacgaactgatcggacccgccataaccaagctgaccctcaccaaagcgggagagataaagaccgaaaaacccgccgcaaaaaactgagatacatactaaaaacaggctgagaaaaaggcaaaaacgcccggatctcagccttttttattgccgttccgcttcagaacgggagggataacgcgtatcccatgataaagcgcgagccggacttcacttcgtcgaagtcgcggcaaacgcgtttgccgtagccgttgtacacgcggaaggagtccccctcgcgcgtgaaaaagaaggtgtggaccccgcggaagatattgcctccgttgatgaaagacgcgataaaggcgtctccgtttttcaacagctcgcggtaggtcttctcacgccgtgtacgttcgtaagcgatcccgtaatgaccgagcgcccgcgctatcttgcgcggattagagccgaatttgcctacgaaaggactgcgtttgccgaaaaggaaatacccgacgatcccgttttcttcaaactcggtcagaaggtcggcgaaagagacgttccgccccgcggaataaagcgcgttgtagacggcgacacactcgcacgcgttgtacgaaacgggatacctcccgtatagcagtcccgcgagccgcggatcgccctgatcttcgatcattccctcgaccggaatgcgccgcctctccccgagccgcttcgccgctctcacgatcctcccggacgcatccgccgctcccgccgctttcgccgctccggtcccaccgaccgccgccgcgatctcccgcgccgtcagatatttgcccatgctttccgcccccctttcggatgatattgtactccgatttctcacgccttgtcaacaaaaacgcattttttagtgtaggatgggacatttatgtcccatcgaaatgacgattttgcaaaaaatgatattgaaaatgactgatttttcttgtataataatatttggaaaaaaaacaaaaacgcgccgtttccgacgcgttacagacctgttaaggggtggatcgcttatgaggttaccaccataccccgcggcataatgccttatcttagaactcattgatggatattgataaacctatacgtcttcaatattgttatctctgatggatgttgataaacttacacgtcaacacttctaagttgctttgattataatacaaaaaacataaattgtcaataggaaggaacaaaaaaatgaattacaggatcggacttgacatcggaattggctcaataggatgggctgtcatctcggaaaaagaggatggacaccccgccaggatagaagatttcggcacgaggatcttccagtcgggagagaacgaaaagacgagcgaatcgctctgcaaggggcgcaggggatttcgcggagttcgaaggatagaacgccgcagagccaaccgcagaaaaatgctgaaaaatcattttcagaacatggtcttatcaacgggacattcaacgacgattatgccgacgtcaaggacgacgatgtttactcgctgaaagttgcgggacttgatagaaaactttctcccgcggaactgtataaatgccttgtgcatacctgtaatcaccgcggatacagagatttttatgaggtcgatccggacgacgaagaggcgggaaagaacgcgactgccgcaaatctgtttgaaaaagcattccgtgaaagcggaaagcgtatcgtttccgaatatctgcttgaaaacaaaaacgcggacggattcgtcaaattcagaaaccgttcgggaggcgatgagccttatctcctcattcgcagagatctgctcaaagaagaagctgaaaaactccttgctgcgcagagaggatattatccctgtctcaatcgtttgaacatcgaccgcacggtctctattatattcgaccagcgtgattttgaagacggaccgggagatccgaacgacagcacgcgcaggtatcacggatttatcgaaacgctcgggaaatgtccttattataaagatctcgaacgcggtttcagagggaccgtcatttctgacgtgtttgccgttactaatactctttcgcagtaccgtttcgtcaacaaggacactggagaatacgacttgcctaaagaggtcgcctgcgaaatagtcgagaacctgcttcacaacgcaagtatgaatatgaccgaggtcaaaagaatactgaaaaagcacggctatcagttgtataagagtgaaaactcggacgataaagcgctcaataaggcgatcaaattcatgtcgatggcgaaaaagagcgtagaagccgcgggaatggattgggaacagatcatttccgaagagcagttcgacgtggaaagaccttcgctcctccacagtataggagagcttatatcgaaatatcagacaccgaaaagacgcgtcaaggaaatgaagaacgcgggtatcgacgaagctctgatcaaagctttttccggaaagaaggtcggaggcacgtccgcggtaagctataaatatatgtgcgattcgatcgaagcattcaaaaacggcgatatctacggcaattttcaggcaaagatcgtcgaagcccaaaaggcggaatcggacgaaagacgttttgttaagcttcctccgtccgcgatagaggactcggagattcgcgacaatcgtgtggttttcaaagcggtcaacgaaacccgaaagatcgtgaacgccataatagatgtttacggttcgcctaaagatattgttatagaggtcgcaagcgaactcggcaagagcgttgagatgcgaaaggacatagagaggactataaaaaagaacgcaaaagataaggaagggatcgtcgaaaaaatatccgaaatgctcctgatagataaggggtacgtcactccggcaatggtagaaagatacaaattgtacgaggagcaggagggtaagtgcgcgtatagcctcaaaccgctcggagaaatgaaagccgtcgtcgcgaaccgcgaccacgcgtatgagattgaccatatcgttccgtactctctcattctcgacaacacgctgaataacaaggtacttgtttttaccgaagaaaatcagaaaaaaggtcagcgcactcctcttatgtatatgaacgatgaggaaggaaaggcttttctcacgttcgtgaaccatttgtactcgagaaaagaatctccaatcagcaaaaagaaggtcgcctactgcaatctcaagtccatatacggagaagaagcagaggagatactcggagaatggaagtcgagaaacatcaacgatacgcgttacatcacaaaatatatcgccggattgtttgaccgcaagcttgtttttgcgggggataaaggtcagcacgttttcacggtgaagggagcggtcacgcaaaagttccgccgcgaatggttcagaaataccgaatggggcgaagaggaaaagaacagaagcacttacctcaaccacgcgcttgacgccgtcattgccgccaacctcaccaaagcctatatagaaataggttctgacgcgctcaggctcaaggcgatcaaaaagaaatacaggggcaacgtgacaaaagaatacgaggactacctcaacgcgtgtatttccaaaatgaagaaatattattatttcgacgaaaagtacaccgaaaggctgcttctttcggaaaagcgtgttccggcgtacgttccgcgcttgcgcgaagaggtagaagcgagattctttgacggtgacgaggcggtctttgccgaaaaggtggcggaagtgtataaggatgactcagcgttcacggtttctccgcatatcccgcgcacctcacagaagcaggataagaaatacaaaggcactattgccgacgcaaatccgctgaagatcgttgagatcgacggcgcgccgcataaaataagccgcaggaacgtctctgaaataaacgaaaagcagcttgataaactgtacaccgacgatgcggcgctgaaggaaaggctttccgccattcttgccggaaaggacgaaaagtacacgctcggaacttatctcaaagaaaacggacttgactttttcagggacggcaacggaaaagtcgtacgcaaactgtctttcgacgaaggtccggtatcgaacttctaccgtgttgacaaaggtgaggggaactacacgaacctcggtcagctcaagtattattgcgtagaggtctacgaggacgcggagggcaggactcatacctgcggcgtacgctttgtggatattgtgaaaaaggacaaaaaactttaccgcaaggcggaaagcctgcctgccgactactcaaaacacgttacgtatctgtttgcgaacgattatataaggataatcggcggcaaaggtgaactcaagttcgaggggtattataaggctgtttataatataaatcaatctgccttttactgtaaaaaagcaaatgaagcagatgtcatagcaaaaaatatttcccgaaaagacaggctcgaaaaatactccgtcgatctgctcggaaaactcggaggaaagatatgttccgcaccgttaccgtgtacaaaggcgaaagaataacggtcagacagaactggatggtcgtaacgggagaagacggtgagaggtctatacccatcgaggacctttattcggtggtcatagacaatcagcagaccgttctcaccgttcccgccatatctcaactgacctcggcgggcgtccatatcctcgtctgcaacgaaaaacacctgcccgaaacgctcatcctgccgcaaactgtacactaccgtccgctcggcgtcatccgcaagcaaatagctctgccggatgacgtcagagacttgatctgggacaggatagtaaggcggaagatactcaaccaggcggcggtcctgtcgctttgcggtggagaacgggaaaaggtcaacagacttgtcgagctttcaaacgaagtcgcagacggcgacgcgggcaacagggaggggatagcggcgcgcttatttttccgcgggctgtacggagtcacgtttgtacggatgtacgacgacgcggtgaacgcggcgctgaactacggttataccgtgatacgttccgcggtcgcaaagacgcttgcggcgtacgggtataactgtgtcctcggtttacatcatatcaacgaatcaaactttttcaatcttgccgacgatatgatggagccgcttcgccccgccgtcgatatgtgggtgtcagacaacagcgaagaccttgtggacggtttaactaaagcgcaaaagaacgagcttgccgcgcttgtcaataccgtcgtgctgttcgacggaaaaaagatgcggatgaggaacgcgatagacaaatacgtttccactctcacaaccgctatcaccgaactgtctccgaaaaagctgaagataccggagataataagacaggatatttacaacgataccgatgattgaccgttcaatgaggataatagtgatgttcgaccttccggtcgcttcaaaaaaggatcggaaggaatacgcaaggttccgcaaatatctgataaacgacggatacgatatgctccagttttcggtctattcgcgtatcacgcagaaccacgacgacgcgcggaagcatataggcagactgtcgggcaatcttccgccaaaaggctcggtaagagtaatgcaggtgaccgaaaaacagtataattcgatgctgataatggtcggagaaaggactgcgaccgaggattttctgacgccgaccgacttcatcgaattatagcatattgacttttttggaagatctgatataatggatttaaggttttagttctctgatggatattgataaacttatacattggacagcagcaggagcaacagcagcacgttttatttctctgatggatattgataaacttatacaaataaatacgggtttacaccattcacggagttttagttctctgatggatattgataaacttatacggggaagaaaaagatgcccagcgtgaagaagttttagttctctgatggatattgataaacttataccttacaagtggatcacccgcagagtatcttgttttagttctctgatggatattgataaacttatacgcgtgtaaatgcggcgttaaactataacaggttttagttctctgatggatattgataaacttataccggttcgatctgttgaccgacgagcagctggttttagttctctgatggatattgataaacttatacgatataatccccacaagttgtcgctgtatggttttagttctctgatggatattgataaacttatacgaagcgcgaaaacaaccgttacaccgagaggttttagttctctgatggatattgataaacttatacttaatatctacgatgaaaagaccggagaaagttttagttctctgatggatattgataaacttataccaagaccgccgacgaccgttccgatgaccggttttagttctctgatggatattgataaacttataccgcccgttccgggagtgacggcagttccggttttagttctctgatggatattgataaacttatacctccgacgtcaagagaggaattgacgccgtgttttagttctctgatggatattgataaacttatacgcgtcgagattgacgccgagcgcctgacatgttttagttctctgatggatattgataaacttatacgtaccgtcggtggatctcatagcaacaatcgttttagttctctgatggatattgataaacttatactccgtacgtatacacgcgcggagcttctgggttttagttctctgatggatattgataaacttatactgattatgaaataacgttcggaaaacacaagttttagttctctgatggatattgataaacttatactcttttcacacaggacccagcagtacgcatgttttagttctctgatggatattgataaacttatacgctccgcgtgatgcctataaagaacgtcctgttttagttctctgatggatattgataaacttattcgcgagcgcgacaagcttgacgatgtgctgggttttagttctctgatggatattgataaacttatactcgtcatgattgcaaaaacgatattcggtggttttagttctctgatggatattgataaacctgtacaaacaacgcattttttgtgcgttgtttttccttttccactttctttcattttcgcttgcatttgctacggtattatgttaaaatctaaataataaaacaattataacaaaaaaccacggaggggcattatgtctatcaaggtcaacgaacaggaaaaagtattccatttacagacgccggacagcagttatattttcagagtttacgggaagagcaggcttcttcacctgtattacggcaaaaaaataaacgaccacgctcatcttgaagattcgctccggtggttcggagcgggcggcgcgtctattgacgcggagtttgcgcatctcggctcaaagtccgtttcgttcgacattctgccgcaggaatacggctttttcggctcgcccgaccttcgcaagccggcgttccacgcgcagtacgcggacggctcgcgcatcacctgtccggtctacgagggctaccgcatcaccccctcgaagccgaggcttgaaggtctgccctcggtctacaccgagaacgactccgagtgcgacacgctcgagatctttatgaaggacgaggtcacgggactccgtctgacctacctgtattcggtgttcaacgaccgcgacgtcatcacgcgtacggtcatcgcgcataacgagggaaaacagaacatagatataaaggcgataatgtcgctcatgatagacttcaaggacgacgacttcgacctcatccacctcgagggcaactgggcgagagaaaggcacgtcgagcgcgtcccgctctcccgtatgggagcgaacgtctactcgcgccgcggactttccgcgcacgatcactctcccttcctcgctctggcgcgcaagaacgcggacgaggagcacggcgacgtctacggcttcagcttcgtttacagcggcaactttgaggcgggcgtcgagtccgaccgctacaatcaggcgcgcgtctatatgggcatcaactccttcgacttcaactggagactcgagccggggcagtcgttcaccgctcccgaggcggtcgcggtcttctcgtcgaagggactcggcgggatgtcacgcaccttccacaagctgtataaatcgcgtctttgcagaggcaaattcagagataaagtcgagcgtcccgtcctcatcaacaactgggagggcacccgcttcgcgttcaccgaggaaaagatcctcgacatggcgaagatcgcgaaacgcgtgggagtcgagcttttcgtgcttgacgacggctggtttggcaaacgcgacgaggcggacagctcgctcggcgactggtatccgcacaaagaaaaactcccggacggcgtcgcgggactcgcgaagaagataaacgacctcggactcgatttcggtctgtggttcgagccggagatggtctcgcccgacagcgatctctaccgcgcgcaccccgactgggcgctccacgtcgagggacgcgggatgagccagggaagaaatcagtacgtcctcgacctcacccgcaaggaagtgcaggactatatcgttaagtttatgaccgaaaacctcgagtccgcgcccatcgtctacgtcaagtgggactacaaccgccacctcacagaggtcgggtcggcttccgttccgccggagagacaggcggaggtctcgcacagatatatgctcggactttattcggtgcttgaaagactgcgcgcccgtttcccggacatcctgttcgagggctgctcgggcggcggcggacgctttgacgcgggtatgctctactatttcgatcagtattggacgagcgacatgaccgacgtcgtcgagcgtcagttcatccaggagggcacgagtatggtgatgcccgcgatcacgatgggaagccacgtttcgatctgtccgaacgtccacatcaaacgcgtgtctccgctccgcgcgagagggtattgcgctatgtgcggtcagttcggctacgagctcgacatcacgaaatgctccgaggaggagcttgacgagatcgccgagcagatcgtgttttataaatccatccgcgagatcatccactcgggcgagatgtaccgcgtacgctccccgaagggacgcgacggcgcggcgtgggagtatatctcggagaacggcaagtccgtcgcgttcgcggtgttcaatatcctcgcctatccgtcgaactatccgagacgcctgcgtatgactgccctcgatcccgacgcgcgctaccgtctgcgcggcacagacgaggtctacgacggagcaatgctgatgtactccggtcttgcgatccagccgatggacgacttcgacggtcaaatgttcatcttcgacaaggagtaagacacgataccaaacccgcggttttaacaaggagtgatatactatgagcttcaaaatattcaccgatacttcggctaacctgccgacgtcgctcgtcgagaaggacgcgatcggcgtcatcccgttttcgtactacgtcaagggcgaggagatgcactgcaccgacaccgcctctttcgacggcaaggcgttttacgatatgatgcgcgacggagaaaaggtcacgacctctcagataacccctcagcactatatcgacgcttttacgcctgcgctcgaagagggcagcgacgtgctgttcgtcagtatgtcgtcggggatctcgggttcgtataattcgtccgaggtcgcctgcgaaacgctgcgcaagaagtttcccgaacgcaaagtgataacggtcgacacgctcggagcctcgctcggagaggggatccccgctctgtgggcggacgcctgccgcaagaaggggatggatatagaggagaccgccgaatatctccgccgcaggtgcaaaaaggtctgccagatcttcgtcgtcgacgaccttatctacctcaaacgtaccggcagactgtcgggcgcggcgatggtggtcggcaaggtcctcggtatcaagcctcttttgatgggcaacgagaagggacagatcgtaaacttcgagaaatgccgcggcaagcgcaacgcgctgatcgctttggctgaaaaatacgacgagctcgtttacgaacccgaaaaacagatcgtcggcatcgctcacgccgactgtgaggaggacgcaaagtttttggcgacactcatacgcaggaacaaacccccgaaaaagctcgtttccgtaatgtacgagcctgtcaccggctcccacgtgggacccggtacggtcgcgctgttcttcgagggagacgaggacgtcagactgaaattcggcaaatgaaaagccgcagggtgatgctgatatgcgtgacgttggcggtcgttaccgtgaccgccctcgtcacttactcgtatctgcacaaaaaatacggcttcagtgaaggggccgacacgacgccacggcgcgagttcgttctctcggaacgggagaccgaaatgtttttccgttttactcccgaggagtttatgaagtgttcgcttgtgatctacgatcatgtcgaggacttccggaaaaacgcgtcgctcaggtcggacggaaaactcgttctgcgcctcagcgacgagcagatcagatgtctttacgagatgcattacagcggacttgaaaactacgcgaatatcagccacgtcgacgtttcaaaggataacagagaactgctgatctcaggctccgtaagcgaaatagagtacgcgatgttaaataagctcgatccgtacactctgagagatatggcgctgcatcagcttctcgacggcgtcgagccgtccgagatcggcgtcatggtacggatagtagatacagacgcggaaaaaacggtcttcgaggcatattggcccgacgaagagatggtgtggaacgcgtcggacctgtttacggaacaaaaaaaggactgaaaataacagtcctttttaagttttttgaaaagggtgtggggaaaactttttttcaaaaaagttttctccgcatttttcgtttatttcgggaagatctggtcgcggcacttgcctttgaggcgttcatcgagctccgccttaaaggtctgcactttgtcgggatcgcggaaaatgtcgtacgcgcactgggcgaggatgcttcccgcgtatctcgccgccttgaagccgacgctcgagccggcggaggcaacgacgccccagctgtgcatcgtcatacatctcggaactccgagaccgtagatgcgcgcggtcgggatcttgtacgtgacgcatccgacgtcggtcgagccggaggcgaaatagaacttgtggaacggctcggcgagcttatacggaagcgcgtcctcgggatcaacgtccttgccggtgacgtttttgctgagagtggctccgaactgtttttcagcgtcggtgtagacgagcggaggcacttttttcgcggactcataaagaaatgtgttgaacgagtcgagcggctgacagcccgagtgcagaaagtccaccttgaagtcgcaggtcgtttcggtcatcatagcggcgccgtaggcgaccttttttatcctttcgagcagctcgtgacagctttcgaggtcgcgggaacggaaatagtagtcaagagcggcgtacgcgggaactacgttcgggcgttcgcccgccgccagataggaatagtggatgcgcacgtcgtcggtacaatgctcgcgcaggtagttgactccgacgttcatcagttcgcacgcgtcgagcgcggatcttccgtgttcggggtcgacggcggcgtgagaggctactccgtggaactcgatcaccgcgtgtcccatcgtcatctgcaatttttcctggaccgcgaggtcgttcgtgcgggggtgccagccgagcagacagtcgagaatgtcgaaatatccgtcgcgtagcatatacatcttgcccgcaccgccttcctcggcgggacagccgatatagactatcgtacccttgagcccttctttgaccatcgcttctttggcggcgcagaccgcggaggtcgtgcccgccgccataaggttgtgtccgcagccgtgaccgtagccttcgcgcgggctcctctcggggatcggatcctgtccgagtcccgggagggcgtcgtattcgccgtatatgccgacgaccgggtgtccgcttccgaacttggcgacgatcgccgtgtcgggagcgtcgtcgtggcgcgcgttgaaagtcgtgacttcaaagcctctcgcgcggagataatccgcgttcgctttgcaggagttgaattcgtggtgaggctcttcgcggtactcccagatctcccgcgcgagcgaatcgacggagtccgcgttctctttgaaccattgttctatcgttttgttgagcatcgtttacgccttctttcccgtagccgcttctttgtcggctttccattccgctttggctttttcgaggatctccggctcgttgatcagcctgcagcagaacagcgccgccgcttttgaaccgttggtcatcgagtcgaacgcgatctcggtcttgcccgcgtcgacccaatcctgagtatgagcggaagaaggatagaacgcggtctggaagaatacggtcgggacctcccacgatacgttgccgacgtctgtcgagccgccgcccttgaagatctcgcgggtaaatctcggcgggtttatcgcctcgaggcaatcgagcatggtctcgcgcagagtggggacggggagaagtacgagatacggctgatagaccttggcgtcgtaggtggtgccggtcataagcgccgcgcccttgagaatgtccataaaacgagactgcatatccatcagatattcgttgtcgagcgcgcgcaggctgtagtcgacgagcgctctcggatgaacgatgttcgtagctccggtgccttcgaccatcgaatagtggatacggcagccgtcttcgatatgttcgcgcatgatctcgagcgcgtggaaggtcagcaccgccgcgtcgagcgcggatctgccgttccacggagcgccggaggcgtgcgcgggtttgccgtgccactcgactctcgtcttgatattggctttgtttttatatgagcatctgctctgggcgcttgcgtgccagttgatgcagacgtcgctgtcgttgaagaccttgtggtcgcacatctgaccttttccgcagtcgatctcttcatccggcgtgccgtatatgataagtttatagggcttgtcgcccataacgtcgcgtaccgcgagcgccgcgccgagacaggcgggagtctgcatgtggtgtccgcagccgtgtccgaggttgcgcagacagtcgtattcgcctaaaaatccgatagcaggaccgcccttgccgttttcgtagaccgccttgaacgaagtgggaaggtcggcaagtccgcgctcgacggtgaagccgtattcctcaagcgttttggtcagaaggtcggaggcgtagtattcctgacgtccgatctcgggatgatcgaagatatcgcatgcgatttcaaacatcttcctcgcccggctgttgaccgagtctgtgatcttttgtacgagttcttccattgtttttccctttctttttgcccgtaagcgttattttttcccgtgtgaagtcttctttttgacagaaaatccgaaggagccgatctttcgcccgagagaatagtattctccgtgcgaatacgcggcgagccgcgctttttcgaggtggagtttgcctgactcatcgacgagtgactcgtctacgtctacggcgagaatgtcggctatgaacatatcgtgacttccgagggggatgacgtcggtcactttacattcgagcgagatcggactttccgcgatgatcgggcagtcgatctgcgccgctttttccttggtcagcttgtattttttgaatttgtcgacctttcgccccgtatatacaccgcaggagtcgcacgcccgaacgaggtcgacggtcgtcagattgatggcgaaaacgccgctttttttcagtatttcatacgaaaagcgcgtaggacgcacagagatatacgttttgggaggatcggagttgattatccccgtccacgcgacagtcagtacgttgtcggtctctccgtctgacaccgtgacgagcgccggaggcgccggggcgaggagggtaccgcctttccatgtgagcttgctcattcgtcagactccttttctctgcgttcgaatgcgagagcaacgagacggtcgatcacttcggaatatttcatccccgacgacatcgcgatctgcggatagaggctgatcgaggtgaagccgggaagagtgttgatctcgttgaagacgatggtcttttcgtcgtcgcacacgaagaaatcgactctcgaaagtccgcggcaatcgaggtgactgtatatctgctccgccaaagttttgaggttgagccaggtcgagcggcgcaccttggcgggaacgacgcagaccgatttgccgtcgttgta

SEQ ID NO: 594 - DNA, 16362 bp, synthetic construct
  misc_feature 1..16362: note = Synthetic
  source 1..16362: mol_type = other DNA
gtctgcaaagccgtgcttgccgcgcagaaaaagattccggccgccggccatcgggcggaggcgatccccgccgtggcggccgcctgtaccgccaacggtctgacggagggttcccgctgcgccgtctgcggcgagatcctgaaagcccagcaggtgatccccgccgccggccactcccccgtcgccgatcccgccgtggccccaggctgtgaaacggagggcaaaaccgagggcagccactgcgccgtctgcggcaaaacgctggtcgcacagcagccggttcccgccgcccataccgtcgagatcatccccgccgttccggcgacgcataccgccacgggcctgaccgaggggcagcgctgcgccgtctgcggcaagatccttgtggaacaaaagaccgttcccatgcacggccacacctacgtgaacgtgcccgccgtggccgccacctgcaccgagcccggcctcaccgccggaacggtctgctccgtctgcggcgcggtgggcaaagcgcagaaaacgttacccgccaaaggccataaacccgtgacggacgcggcgaaagcggctacctgtaccgaaagcggcctcacggcgggcagccattgttccgtctgcaaggccgttctgacgccgcaggagacggtgcccgccatgggacacacccccgtcactcagcccgccgtggccgccacctgcaccgccacaggcctgacggaggggcaatactgttccgtctgcggcgccgtactgaaacaacagaaaaccaccggcaagaccggccacaaagcggcggcggacaaggccgtccccgcctcctgcaccgaaagcggccttacggcgggcagccattgcgccgtctgcggcacgatcctcaccgcccagcagacggtcgctccgttgggacacctgatcccggagggcgccgccgtcacgctgacggagggcgtccgctgcacccgctgcggcgaaaccgccacgccctctttcaacgagctggtcaatgcgctgaagcagggcggccacaccttcagcgaggtctcccacaccggcacggtgatcaggccccccgtctattccggcatgatggtgctcttccgtaaagaatttcagcaggccatcgcggacagtctcggcgcgacctcctcttattccgcattgaaagagggggcgccgctggataaaaatacctatccgctgaacggctccgacaaggtcagcctgctgacggaggaggacgtcgcctccttcaccgcgcagcagatcagcggactggactttctgaatgaccttccggacagctacacgacggaagacggcgtttctttcgacctgacgtcttacaaacagcgggacgcgggcagcgtgctgaaaatgaccgttattcttcaatcggagacctattccggctcggtggatgagggcggctccgcccatatcggcaagatcagctccggctacggggaaaaggtgacgaccgccatggaaaacctgcacgaattcaacgaaggggtcctgcaggcggagggcgacgtctattccgacgccaccgtgacctattactttgacgcccgcacgctttctcctctggccgcggtctatcacgtggtgacggattccgaccagaagatcaacgtctatcagaaggaagaggacgtgggccatactgccccctccggttttgtcaaggtggagatcgtcaacaccgccgacacttattacttctttgactgacgaaggaaccggagaagaaccggggcccctcccccgcaaagcgcctgccgccattttttcagaaacaacagttgaattttcatctgttttatgttacattagaaacaaccatgagattattactgtaccggaggtttattgctgatgaaaaaaatcatagcgttgctgctcgccatcgcgatgctcgccaccctcaccctgccctgcgtgttcgcggaggcccccgccgacgaaacatgtaaatactggggcgacatggatgaagacggaaaggtcacctcggccgacgcccgtctcgttctgcgccattccgtcggtctgaaagacaatccggaaggctatacggaagacgtgctgtataagtgcgacatcgatcaggacggcaagatctcttcctctgacgcgcgttctgttctcagactgtcggtcggccttgacgaattcccggcccacgagctgctcaagggcgtcgggaaggacgccacctgcaccgaagacggcctgacggacggcctgttctgcatcatctgcggcacgacgtttgaaccgcaggaggtcgtgcccgccacagggcacaaagaggtgaccgacgaagccgtggccgccacctgcacggaagacggcctgacggaaggcaaacactgcgaggtctgcggcgaggtcttcaccgcgcaggaaaccgtccccgccctcggtcacgaccccatggccgttcccgcggagagcaaagaggtctgcgaacccgcccaggtctgcgcccgctgcggcgagaccctttccgaggccgtgatgcacgaatacaacgccaaggccatcaccgtggaaaacggcgtcgtctgcacccgctgcggcgaggtcaaaacgccctccttcaacgatcttgtcaacccgctgaagcaggctccccacaccttcacctacctctctcagacggacaccgccatcgacgagcccaaattcaccggcgtgatgctgctgctcaagccgatgtttgacgaggaattcaaaaacgacgacaacaacgaaacggaatatacggttctcagcgaaaagacggaagtcaacagccgcacctttgagctcatcaacgccgacgaggtcagccggctgacggacaatgacgccaccgtcaagaccgaaaccgtcagcggcgtggacttcctcaagaacctgccggataccgtttccgtcggcagccgctcctccgacctcaccgccatcaaggcgaaggatttcggcgacgtactgaaagtgaccgtcaccctcaagccggaaacctattccaagctggcggatcagggcggtgtggacgccatcggcaggatctcctcccagtacggctcgctgatcagttccgccatgatgcagttctccggtctgaatgaggacttcctcaagaccgacgccgactgcgtctccaacatgaccgtcacctactatttcgagccggagaccttcagccccatcgccgccacgtataaaatcaccatggatatctcacagaccatgagcatcgacatcagcggcatgaacaaagacgacctgcccgccgtgctgaagctggccagcagcaccaccggcgccatcagcttcaagatcacaaccgatctcaacaccttctacttcttcgacgagtatttcgactgatcccaacagacggcctgcaaaacaaaaaaacgcggcaaacaaccgcaacgccaagctccccggacgccggtccggggagcgtttttttcgataaaaggcggattcgccggggcaatatcggtagcgcggcacctcagtgccgctatttaccaaagcaacattcagcaacatgaaacaattcgttgatccgttttttcagacaataccttcttttccggttgataaaaaaagattgtttatgtcatgagcggcactgaggtgccgcgctaccgggtttactccggtgaagacctctgccgtcaagcagaagcaccgacagaaccgtgggcgaggatttccaaaattcctcattccgaattccgcattcaatcgcctcgcccaaccgccgattggcaattccgcgccaccgtcatccgtaaagaacgaaaaaccggccccggacgcgctgcccggggccttccgatcggttgggatcgatcttctgaatacttatcttccggcggtatgctgtgaaatgcccttaatgccgctgaccgcccaatcggtggcctccacggtgataatgctgtcgcagtaggggcaccgggccgtgcggttgatgttgaccacgccgccgcagttggggcagttctgcacccttacgccgtcgttgacgccggtctgcacgcccgtcttacgggtcagggtccactcgtattccatgaatttttccgccgtgttgctgccgcggacgatccgtcccgacgcgtcgtcggtgacgtaatccacgatgcgggtgcgcagccttgccaccatgatatcctcgccgccccgctgctgccagccctgcagcgtcacgcccagcaccgcgatccgttcgatccggttggtctgccggttgcggcggtagttgtccagctggcggtccatctgggcgtagaaggcgtccgtcaggtaggggcgcagctcctccaggttcttatcctgccaggcgttctggaatttcacgtaccggttggagatcttttcacacagctccgcttccgagaagttggggtccagccggtagtattcgttgagatgcttcagctggctttggggcgtaggctgcgcgccgggcgccatggaccggatgggggtgcttcttgtggccgatccgccgggacggccgccgcggaagcccggtccgccgccgcgcttcctgcgcacgacgatcaccacgatgatggcgacgatacagatgaagaagatgccgcccaccagcgtcacgccgtcgtcgtcttcctcctccgggaacagcgcggaggaggtcagatagcccgcctccaccgattgaccggcgtgatccgccagcttcacggtaccgtaatagaccgcgtcgtcgggataggaggtaaagtgataataatagtcctttttggagcttgagccgccgtagctgtcgctgccgccgaaccaaccgtaggaatcgtcgtcatcataatcgtaggaatcataggagtcataggagtcgtagctgtcgtagccgccgccgtaatccgaatcgccgccgtaatcgccgaaatccgccggcgcaaagggggccagcgcgaacagcagcaacagcgcgcacagcacaagggccgtttttttcattgctttcattttcccgcgcctctctttctgttccttacggtgaccgccacaaacacgataacagccgccgcggcggcgagcgcgacgatcaggttcagcccggcggcgtcctgcttacggctgccggggatcttctcccgcacttgttcaaaggtgtcgcagccgtccgtcataaacgcgttgttggtatcgccgtccttccccagcacgccgcccgacagcctgccgaaaaagaagagcgcatcgggatacgccgacagggggatatactcatagcggatgcgcagatcgccgagcttcggattttccgggtcgccgctgacgtagcagccgtcccgcagcgtcaggccgtaggcgttttcaaagctttggtccggcgcagcctccacaaagccctccgtatcctccagatagggatagccgtttgtaaaggtataaacaaaatcgtccgccagcttgacggggccgacggagacgtccgccagcagcatcaaggaataacccccctccgggaagaccgggttttcataggattcatcgttcttgccgacgatgttcgcctgttggtcttcgtaaaaacccgtgacgacctcgtcgccggacagggaatactggtacatctccgttttgcggaccagcaccagcgcgtccggcagggtgaagccggtcatggggtccttcggcgcgttttgcagggagagctttcctttcaggcagacaagctgcccgtcatgcgcggccgcctgcgccggggtcagggcgtccgcctccaaccgggcggcgctgtcgaaaatttcgcaggcgtccttgtaaagtttgttctgatacacgccccacaccgcgaacatgacggtgacgatggccagcacgatgctggcggtggggatcatgccgaaaaattttttcacacgatcgctcctttcgctgacgcagactttctgttacaaaaagatgatattctccctgatctccatccaaaagatgagaaaaccggagccaatcaggcaaagcagatcaaaaaccgccagacaccataccgccgtatttttttgaaacggaagtcggcggatattactgctccaccaattaatacttgaagatttctgcttgtctaaacgccgcaataaatcctcgacaggcgacagcctgtcttgcggtttcttccttgtcttgcgacgtttatccggcgcataaataattcacgattaaattggtggagcagtagccgcaatgaaaaggccggacgcggcgacggccagaatattcccgcataaaaacgcaatcaccgttaccgccggattcgtcatccatacgggcaggaagaacgcgtgaccgaacagggaggcgccatccagccagtaaaacccgtaccagatcaacgccgccgcaaagcagcccgctgcggtcaggagaaagcccgacgttaccttttggaatcggttgttcatgatggttttctcctcaatctgtctgatcctccaacagttttttcaaagcctctttgctggggagaaccgtttcataccggctggcaaaaatctgtgaattatcttttggcagcgtcatttccaccaccgcgttgtttttatctttgcaaagaatgataccgatggtggggttttcctccggcagctttacttccctgtcatagtaatgcacgtacatctgcatctgaccgatatcctgatgcttcagctcgccgatctttaaatcgaacagcacaaaacaacgcagcaaccggttatagaataccagatctacaaagaagtgtgcctcgtcaaaggtaaaacgtacctgacggccaatatacgcaaatccggttccgagctccagaagaaactgctgcaagtggttgatgatcctgttttccagttcattctccgagtattccggcagttccggcaatcccaggaattccaggatatacggatcctttaccgtatctctcggagaagcaatcgtttgaccttccacagcaagccgatacacttcgtccttgtttttactgagcgcgatacgctcatagagcgaactgtcgtactgtcttttcagttcatttaagctccaattgtttttgacggactcgatctcataaaaatggcgttcttccacgtttccgatccgcatgagcttcaaataatgcgaccagcttaaataaaatctgcgtcctgtgccgaccaccggaaggtttttgaattggctaaacactgtttcgccaatttgatccgtactgtaaacagcataaaactgccggatattcttcaggttgccgacagaataccctttcccgaattgttctgtcaaataagccgaaagctctttgagaagccggcttccataagccgcgcgattttctccatgctgctcctcttccacaatcatcctgccgatttcataataggcataaaccattgagagattgacggctgtttttgcgttttcccgcgcatgaagcagcacagcagagatatgattcaaaaaaccgtcatttaaagccagcgcgtcatgatccttatccatcattttctcccgggatgtcctcaaagatagtggtattccgtgttggttttatccgtatcgctgttttcggcgatcagcacgctggcgtccggcgagacgacgatgttgtgccaggtgcccacggtgcagttatagagcttgcagggctccatcttcacgggcgtgcgctccagcccgatgtaaagggtggcttcgcccttcagcagcacgaagacctcgtccgtctccatgtggcgctccatgtaggtattcaccgtatattcgtcgtcctgcgtcagaaacgccacgcaccaggtcttgaaaatcagcgtgcggtcatatcctctgccgttaaactcgctgatttcaagtcctcttgattccttgtccattttgatcctctcctttttcaatgacagatattattcctgctcgtgccggcgggccagggcggttttctgttcctcccagcctttgccgaacagcggatagaacttcatggccacggcggaaagcgccagcagcagggcgggaacggccatccacgccaccagcacgccctgcttggcgagggcgctctgcataccggcggccagcgccgtatcgtagccgaaccacttggcgatcatcaggaaggcggcgttggccaggctgatggcaggcttggtgatcagggagttgacgccggcgtagatgccctcccggcgggcgccggttttgatctcgtcatagtcgatcacgtcgccgttcatgatgggcaccaggtacataccgcccgcaaagcccacgccggtgacgaaaaacacgatcagcgccaccggggcaaaccggcccagcgcgcacataacggcggcggcgcaggcaaaggagacgcacatgatcagcacacacttgcgcacgccccagggccgcagcatcctgatccagagcaggatgcccgccaccgcgccgagccccagcgccccgtaggccaggggcatgggggtatcgaactcgtcgaaatagtagatgacgccctgcatgaggatcgtctgaataaagatcacggtaaaggacagcacctcaaacaccacgaaggaccggtttttgaagcactccgccacggaccggaacaggcccatggattcctccgcctcgttctgcaccttttctttatagaagaaggtggagaagaagatcacgaggaaggtgaccacgccgatggccgtcatgatcatctggaagcggaaggggtcctcccccacttccggcttgatgagcgggaacaccaccagcggcacagagagggagatgaggctgaagccgatcttccagatgaagatggagctgcgggccttgttggtgaccgccatggtatagggcatcacgtacagcgacgtggcgatggcggtgtagaaggtatcaaacaggaacagcgtcaccagcatctggatgaacagcaccgtctggctgccgccgaagggccacttgaaccaggtgagcacgaagaccagcgcgtagaagaacgagccgtagcggatataggggatgcgccgccccagcttgctcttcgtgcggtcggaaagatagccgaacagcgggtcgttgaaggcgttccagatggcgaagatgatccacaccacgctggccagctcttcgctgagccccatgaatttggtaaagaaataggtcatgccgccgccggtgagcaggccgttcagcgtggcgcacatgcaatccgcaaagctgagccacaccttgccggaaaccggcactttttcttccgtctgcggttgatgcttgttgtcagacatacgattcactccttcatcttcattttacgataccgtgcggcatttgtcaattgaaaacagaaccttcctccctccgccacaaaaaccgtttcaggtccacgttgccgttcgggagaaacgccaccccctcggcctccagcaggctgcgctgttccggccagcccggcgcggtgcgcccggcgtggttcaccacccggtgacaggggaaatccccgtaccactccgcccgggagaggaccctccccaccagccgcgcatttttcggccgcccgacggcccaggcgatctgcccgtaggtgaccacccgcccggaagggacagaggcaacaaaagacagcacgtcatgaatcaattccgtatatgtcaacgtttccatttcgcaaattgcactccggctctcggttttcggttccatcaatcgtacttcaactttttcgttttcttttttctgttgaaaaaacggacattatttgttatagtaaaataaaaaaacgcacaaagtgtgcgtcaaacggtggattgctgttgaggttaccaccataccccacggcatattgccttatcttagaactcattgatggatattgataaacttatacgtagtttcaatatgttatctctgatggatactgataaacttacacatcaacacttctaagttgtttttattttaacatacatcattttgattgtcaatacaggaggtcaaaaaaatggagtacagaatcggtttggacatcggcatcggatccgtcggttgggcggtggtctcggcggaacaggacggacatccggcacggatcgaagatttcggcacacgaatctttcagtccggggaagacgaaaaaacaagagaatcattatgtcagggcaggcggtcggcccgcggggtgaggcgtttggagcgccgccgttcctaccggaagaaaatactgaaaaatcacttcgccaatatcggaattctgaatgagacgttcaacgacgaatacgcagcctgtaaagatgcggacgtttacgaactgaaggtgaaaggtctggatgaacagctttctccggcagagttatacaagtgcctcgttcacacctgcaaccacagagggtacagagatttttatgaaccggaagaggacgatgaagaagcagggctgaacgaaagcgccgccaatgaattggaggaagctttcataaagagcggcaaaaggaccgtttcggaatacctgctggcagacaagcttgtcaacggctttgtcaaatacagaaacagaaacgaaggagacaacccctaccggctgatccgcagaaagctgctgctggacgaggtgcggcagattctgacaaagcagagcgagtattattcctgcctgacgcagaaaaacatagatcggacggaaacgatcattttcaaccagcgggattttgaagacggccccggcaatcccgatgatcccaacagacgctactgcggatttctggaaaagctgggcaaatgcccttattataaagaggaagaccgcggtttccgagggacggtgatcgcggacgtcttcgccgtcaccaatacgctgtcccaataccgtttcgtggacaaatccaccggcgaatacacgctcgacaaggccgtagcgaaggagatcgtggacaggctgctgaccgacgcgaagatgaacctcacggagatcaaaaagatcctcaaagcccacggttttgagctgcgtaaaagcgagaactccgacgacaaagcgctgaacaaggcgatcaaatatctggcgcttgccaaaaagtgcgttgaagcggcgggctataactgggctgaactgattacggaggagcagtttgacgtggagaacccctcccttctgcaccgcataggcgagctgatttcaacctatcagacgccctcccgcagaaagaaagaaatgaaagcggcgggggtcgacacggccctgatcgacgcattttcctcaaaaaagctcagcggcaccgcgtccgtcagttaccggtatatgtgtgacgcgatccacgcgtttatggacggcgacatttacggcaattatcaggcacggttcatcaaagaacagcagaccgtcgcaccgacggaaaaatgcttcaagctcaagcccggtcatatcgacgacgccgatatccgcaacaaccgggtcgttttcaaggcagtcaacgagacgcgcaaaatcgtcaacgccatcattgatacctacggctcccccaccgccattgtgatcgaggtcgccagcgagctgggcaagagcaaggacatgcgcgacgagattaccagagcgaaaaacgccaatgaaaaggcgacggcaaaagtcaaagaagccattgcggagctgctgcatgaagacgttgacaaagtgactcccgtgatggtggaacggtataaactgtatgtggaacaggacggccaatgcgcctattccggcaaaccgctgggcgagctgagcgacgtggtacggaataccggccacgcctacgagatcgaccacatcgttccctactccctgatccttgacaacacgctgcacaacaaggcgctggtgttgacagaagaaaaccagaagaagggccagcagacgccgctgatgtatatgaccgaggaacagggcaaggctttccgggcgagggtcaaagcgatgctttcccgtaaagaaaacccgctcagccggaaaaaagcggagtactgtctgctggaaaccgtctatggcgcaaaggcggaggacattctcagcgggtggaaatcccgcaatatcaacgacacccgctatatcaccaaatatatcgcggggatcatcgaccgctatcttctgttcgccggcgatgcggaaaagcagcacgtgttcacggtaaagggcgcggtgacgcagaaattccgccgggagtggttcaaagacagcccctggggcgacgcggagaaaaatcgtgagaactacctcaaccatgcgctggacgcgctggtggcggccaaccttaccaaggcgtatatcgagatcggctccgacgcactgcggctgatcgcgctgtaccgtcgataccgcagcacgagcgcaccggagtacgtggagtatttggaaaagtgcgtccggaagatggagaagtactacggctttccggaggcaaagacgcggatgctgctgaaaaataccgagcgggcgcccgcctatctgccaaggctggccgatgaagtaaaggtccggttcaacgatgaggacgaaaatgcattcgacgaaggggtcaaaaagctctacgggaacgaagcgccttttatcgtgccgccgcatatcccggtcacgtcccacaaacaggacaaaaaattcaaagggtgtatcgccgacgacaatccgatccgagtggtggagattgacggcgcaccccacaagatcagacggatcaatgtccgggcggtctctgtcaaaacgctgccgaagctgcgctgcggagatccgtcattggtcgcgcagctgacggaaattctggagggcaaaacagagaaatacacgattgattcatatctgaaagagacgaatcagccccactttatctccaaaggcggcgtggtgatccgtaaggtttccattgacgacggccctgtcaccaatttctatcgcaaaacaatcaatgaaaacaattatacaaatctcagcaaactaaaatactattgtgtagaactgtatagagacaaaaatggaaacctaaaaaacacaggtattcggtttgtggatatcatcaacaaagacaaaaaactctatcgaaaagcgaatagcttgcctcaggattatgctgcacatgaaatgtatctgtttgcaggagattatatcagaatcatcaacagcaaaggtgaattaaaatttgatggattctacactgcagtattcaacattaatcaaaatcagttttactgcaaacataataataattcatcgacctgcgttaaaccgatttctccaaaagacaaggtaataaagtattcaatagatattctcgggagaatagggggtacaatcaaatgttcagaaccgttaccgtgtatagcggagaaaaagtctcggtaaaacaaaactggatggtcgtcagcggggcagacggtgaacatcgtctgcccgtggaggatatctattccgtagtgatcgacaaccgccagacgctgctgaccgcgccgtttatcaccacactgacaaaggccggcgcacatattctgatctgcgatgaaaagcacctgcccgcctccgtcattctgccgcaaagcatccactatcatccgctgacggtgatgcgcaaacaaatcgccctgccggaggatatcaaggataagctgtgggaccggatcgcacggcagaagatcctcaatcaggcaaaggtgctggagctgtgcggcggcaaaagggagcggtgcgcccgcctgcgggagctggcagaggaggtgaaagacggagacgcgggcaaccgggaagggatcgccgcccgcatcttcttccatgaattatatggctatgaattcgtccgtttttatgacgacgccatcaacgctgcgctgaattacggctacaccgtgatccgttccgccgtggcaaaaacgttgaccgcctatggctataactgtgtgttggggctacaccatatcaacgaggcaaacccctttaatctggcggatgacgtcatggaacccctgcggcccattgtggatatgtgggtttccgatcaccatgaggatctggtggacgcgctgacgaagcagcagcggaacgagctggcggcgctggtcaaccaactggtgctgtgggacggcaaaaagatgcgactgcgcaacgcgctggataagtacgtcagttcactgaccaccgcgatcaacaacctctcccccgccaaattgaagctgccggaaatgatccgcacggatctttacaacgaagaagatgattaaccgcaatatgagagtgctcgttttgttcgacctgccggtgacgaccaaaaaagaccggaagaactacgcaaagttccgccattttctgatccacgacggttatgatatgctgcagttttccgtctattcccgcatcacgcagaatcacgacgatgcgaaaaagcacgtggaacgtctgaacaaaaatctgccgcccaagggctctgtccgggtgttgcagatcaccgaaaagcagtatgcctccatgatgctgctggtgggggaacgcaccgcaaccgaggattttctgacgccaaaagactttacggagctgtagctattgacaatccatcgttttttgctataggttttagttctctgatggatattgataaacttatacaaaccttaataacaagggcaattataccacgttttagttctctgatggatattgataaacttatacattctgaccattaccgcagacgttgaaccgttttagttctctgatggatattgataaacttatacaccagtttgaggatgttgtcataactgcggttttagttctctgatggatattgatatacttatacccgtataatatcgggaatgatttttatgggtttaccagtttgaggatgttgtcataactgcggttttagttctctgatggatattgatatacttatacatctcccggatcatctccaacgacctgaagttttagttctctgatggatattgataaacttatacttgcgtctcgcagaatgtctgtacatatcgttttagttctctgatggatattgataaacttataccggccccattccgcgtctttcccgtgttggttttagttctctgatggatattgataaacttatacgactggcgatctcgttgctgtaaagctgctgttttagttctctgatggatattgataaacttatacttcagcggtcgggacccgggttgagtaccggttttagttctctgatggatattgataaactgttacataaaaacacagccttccgaaaatggaaggctgtcattctgttttgagggagttttattaccgaaaatgaaaaagaacgaaataatgcagacaacaactgatccccgggaagcgcgggtccgggagatggaacggcggatggacgaagggcaggcggcccttgacgcgctggaggcggcgctggacagtcttgacgccgcactggacggctatgaagccgccctgccggaactgacagcgctggcggaatactatgacggcggcgactggcggcgcgactatgaagccgacgaggcgggaaagctgcccgccgggctgaaacgcggggtgctgtcgcaggacgcgctgttcgacctgctgacgaaacagaaggaactggaagaacgcctgcggaagctgtccgcggccggaaggatataagaaagaaggcgagaacatggaacggatactgaactggctcaaagctctttatctcaggctgctgaactggctgcccgtcctcggcggccaataaaccgaaggccgtctgggcggccgcgccattcgcggttccaccgcatgccggaaggccctctctcccctgccggacaggaatatccggtcagaggaccggcgcatacggcagcccctttgccgccccaccgcaggagcggaccattccactcgcgccagccacgttatcgtgaggcgcctattatccgaaaggcgttttccgtgcatacgacgtgagcgtcacaatgtgcgctttgagcgtcacaatgtgcgccggaagtgtcacaatgtgcgccttgagcgtcacaatgtgacgtagagaagagaagagaagagaagagaagagaagagaagagaagaaaagagaagataagataagataagataagataagataagaagagagcagcatagagggagagggagagaagaaaaaaagaatactccttccaaaaaaaagaagaatggcgcggggggaagaaaaccgcatgacgcgttttcttccttcccgccgcccctgcgaaccaaaaaagaactgaaaaaaggcctcttcacggaaaattgtgggataggcaaaaatagatattgaaaaagagcataggaaactccaaaattgtagttgcgaatcaaacaattaacggagt

SEQ ID NO: 595 - DNA, 14987 bp, synthetic construct
  misc_feature 1..14987: note = Synthetic
  source 1..14987: mol_type = other DNA
gatcctgcctgcggatcgggctccttgcttttgaaggcggcgaagattctgggcaaagaaaatgtgcgccagggtttcttcggacaggaaatcaatattacgacttataacctttgccgcatcaatatgttcctgcatgatattgattatgataaatttgacatcgctcatggcgatacgttgacagaccccctgcactgggatgatgaaccatttgaggtgattgtctccaatccaccttattccatcaagtgggatggtgacaacaatcctctgctgatcaacgacccgcgcttttcgccggcaggcgtgttggcaccgaagtcgaaggctgacctggcatttatcatgcacagccttgcctggctcgcaaccgacggcacggcggcgatagtttgttttcccggcgtaatgtaccgcggcggtgcggagcaaaagattaggaaatacctgattgacaacaactttattgactgcgtgatacagcttcctgacaatcttttttatggaacaagcatcgctacctgcatcatggtcatgaaaaagtcgaaaagggaaaacagcacacttttcattgacgcgtccaaagagtttgtgaaggttacgaataataacaagctgactgctgccaacattgaaaaaataattgccgcctacactgagcgaaatagcgaggactattttgcgaagcttgtgcccaatgccgatgttgctgctcaggactataacctttcggtcagcacgtatgtggagcaggaagataaacgggagaaagttgatattactgttcttaatgcggagattgcggcaattgtggctaaagagcagtttttgcgggaggaaatcgacaaaatcatcgcggaaattgaggtgggggcatgaacaaagaatttcaattcttaatctataacgtacctaccgaagatgtaacagttaacgcaattatcaaagacgaaaccatctggctaacgcaaaaggccatggcggagttgttcgctgttgaagtacctgctatctccaagcatcttgccaatatttttgaagagggagaactatgtgttgattcaactgtttccaaaatggaaatagttcaacaagagggttcccgcaatgtaaaaagaaaagttgatttttacaatctcgatgccattatttccgtgggttatcgagtgaattcaggtcgcgctacgcagtttcgcatctgggctaccaaggtattgaaagaatacatgaccaaaggttttgtgctggatgatgaacgtctgaaacaaggcaaaactgcttttggcaaagattatttccgtgaattactggagcgggtccgctcgattcgcgcaagtgaaagacgtatctggcagcagattaccgatatttttgctgaatgcagcatagattatgataaagatgcgcaggtaacgcatgatttttatgccatggtacagaacaaatttcactatgcgataacagggcaaacggcggcagaaattattgctgccaaagctgaccgtacacaaaaaaacatggggctgacaacctggaaaaatgcacctgcagggcgcatcctgaagtcggacgtaacggttgctaaaaactatctggaagaaaagcagataaggcagttggaaagagctgttacaggctattttgattatattgaagacttgattgagcgcgaaaacaccttcacaatgcaagagttcgcccaaagtatcaatgaatttctggccttccgcaagtatgaaatactgaaggacaaaggcaggattactaagaaactcgccgaacaaaaagccaaagaggaatacgacgaatttaacaaaacacaagaaataacttcggattttgatcaggcggtaaagcatatgctggcaaagggcggtgagcaccattgagtaagctggacgatttgattgcggaactttgcccgaatggggttgagtttattgaattgaaagaaatgtttgacttgaaaaacggatatacaccttcaaaagcaaacaattctttttggaaaaatggaactataccttggtttcgtatggaagatattagagaaaacggacgaatactgaacgattcaatgcaacatattacccttgaagcagtaaaaggagaactatttcctgctaattcgataattgtagcaacttccgccacaataggggagcatgccctgataaaggttgattctcttgcgaatcaaagattcacctatttaacaagaaagcaagaattcataaatcgtatagatcctatgtttgctttctactattgttttaaacttgatgaatggtgtcttaaaaacactaatatttcaagtttcgcatcagtagatatgggaaaatttgcaaagttcaaatttccgctcttgcccctgcctgtacagtgtgaaattgtccgtattttggacaatttcacggagcttacagcggagcttacagcggagcttacagctagaaaaaaacaatatgaatattatcgggacttactcttgacctttgataatgtagaagcgataatttcacagacagacagacagacagacagacagacagacagacagacagacagttcaatggatgacattaggtgaaattggtaaagttttgatgtgtaaacgtattatgaaagcagaaacgactccagttggtgatgtaccatttttcaaaattggcacatttggaaaagagcctgatgcatatatctctcaggaaaaatatgatgaatacagaaaaacgtattcttttccaaagaggggcgatattcttatatctgcagcaggtacaatcggaaggacagtaatttatgatggagaacctgcttattatcaagactcgaacattgtgtggattgataatgatgaaagtaaagttttgaataaatatctttattattattatgctttaaaaccttgggttgtatctaatggaggaactattgctaggttatataatgataatattagcaaaaccaaaattcctgttccttcccttgccgagcaggagcgtatcgtcgctattcttgaccgctttgattccttgtgcaatgacatttccagcggtttgcctgcggaaatcgaagcaaggcgcaaacaatatgaatactatcgtgacaagttgttgacctttaaggagatgactgtatgaaagtttcctacaatatcgtggctgaaacgagtgaaagcaccgttgttgctgaatatgtaccggaatatactgcccgctcggacgcttaccaaagcgaagcggccttggaacaagagttcatcaagctgctgacctcacaggggtacgaatatctgccgatacataatgaagctgaactggtagtaaacctgcgctggcagctcgaaatactcaacagatatgccttttccgactccgagtgggaaaggttctttcgcgaaaatatagccggcgccaatgacagcatagtggaaaagactcgcaagatttaggatgaccatgtccagaatctgcggcgtgacgacggcaccacgaaaaatatctacctgatagacaagaagaatattcataacaaccgcctgcaggtgattaaccagtatgaagaatctgaaggtactcatgatacacgctatgacgttactattctcgtgaacgggctgccgcttgttcatgtggagctgaagcgcagaggtgttgccatccgggaagcgttcaaccagataaaacgctatcagcgggatagtttctgggcagcaagcggtctttatgagtatgttcagattttcgtcacctccaacgggaccaatacgaagtattattctaataccacccgcagcagccacgtgaaggaaatgggggcaggagagcggcagcggagcaaaaagacgagcaatagctttgaatttacttctttttgggcagacagcaaaaataaaaccattgccgacctgattgattttaccaagacctttttgtccaagcatacgcttttgaatgtgctgacgaaatactgtgtatttacggcagaagatcttctgcttgtgatgcgaccgtaccagatcgcggcgactgagcgcattctttcacgcatagagattgcgaccaactacaaaaaaacgggcacagttgaggctggaggctatatctggcatacgaccggcagcggcaaaaccctgacttctttcaaaacggcacagattgccacagctatgccctctatcgacaaagtactttttgtcgtagaccgcaaggatctcgattaccagacgatgaaggaatacgaccgcttcgaaaaaggagcggccaacagcaatgcttccaccagaatactgcaaaggcagcttgaggatcgggatgaaaaaggcaatcctcatatctataagattattattacgaccattcagaaactggacgtattcattacgaagaacaaagggcataatgttttcaaacagcacatggtcattatttttgatgagtgtcaccgttctcagttcggcgatatgcatacgaaaatagtgaagaccttcaaaaattaccatttgtttggctttacgggaacgcctatctttgccgctaatgcgtcgagcggcggtaatccgctgctgaaaaccacgccgcaggcttttggtgataaactgcatacctatacgattgtggatgctatcaatgacgggaacgtgctgcctttccgcatcgattatgtgaatacggtcaaggaaaaagaaggcgttcaggacagaccggtaagtgcgattgataaagaaaaagtcatgagcgctcctgaacgtattcgcgaagttgttcaatacatcctcgagcattttgaccaaaagaccaaacgcaatgatttttattctctccaaggacagagagtggcaggtttcaactccattttcgctgtcagttcgataccgatggccatgaaatattacaccgaatttaagcggcagctcgcagagcaaaagcgcaaattgaccgttgctactatctttagcttcagcgctaacgaagacgacccggaggacgcattgccggaagaaggttttgatacagcaagtctcgacaaaccctcccgtgacttcctggacgcgaccattgctgattataatgcgacctttaacgtgaactatgatacctcaacggataagttccagaattattataaggacttgtcgctaagggtcaaaaagcgcgaagtcgatttgctgatagtagttaatatgttcctgacaggttttgacgcgacaacgctgaacactctctgggtggacaagaacctcaggcagcatggcttgattcaggcattctcgcggaccaaccggattctgaactcggtgaaaacctatggcaacattgtttgcttccgggatttacaaaaggaaacggatgaagcgatagccttatttggcgataaagatgccagcagcattgtgctcatgaaaaattatgatgcttattatcatggttatgatgaaggcgtcgagcatcataagggctacgttgaattgattgacgaactcttgcagcaatttccgctgggacaggcgattatcggtgaacagaaccagaagaaattcatctcgctttttggtgcaattctgcggcttaagaatattttgactgcttttgataactttcaaggcaatgaaatactttccagcagggatctgcaagattatcagagcgtttatattgacctgtatcaggagttcaccaaggagaagaagaacgaaaaagagaatattaacgacgacattatatttgagatggagctcatcagacaggttgaaattaatatcgactacattttgatgctggtggcaaagtatcatgagtccaattgcaaggacaaaaacattcttgtcagcatcgataaggcaatcaattccagcatccagctcaggagcaaaaaggagcttatcgagaacttcatcaaaaccataaacgcttctacggaagtggatgaggactggcgcaggtttgtcagtgaacaaaaggaaacagatatttccaccctgattgcgaaagaaaagctgaaaccggaagagacaaggaagtttctcgataattcgttccgtgatggtatgctcagaacgacaggtacggacatcgacaagattatgccgccggtatcgcgttttggttctggtgggagattggtcaaaaagcaaggtgtcattgaaaagctgcaaaagttttttgagaagtatttcgggttagcgtcataacgccgaatagatatcgaatgaggtaaaaagccgatgcggaaacagaggttgtcaccaataaatcatattgcgtcaagttacggcattgccatcctgatgctggccgtgtttgccgtgcttgcgtgggaaaccttattccaggatactatgaatttttttgatgataatattgttcggcttattcgttattttgcaaatcctgttttagataagataatgattattatgtctgacatgggtttcggtaaaagttttgttgttatagcagcggttacatttttattgcttgcttacctcaagcgttggctggaagtatatgtcctggctatttgcttaggaggtagttcgctgttaggtatcctgctaaaaaatctgtttcatcggacaaggccggagttattaccaatggtacagacaacaagttttagtttcccgagtcttcatgcattgatggctgtttgtttttacggaatggtagccttttttattgcgcgagctgttacctccagacgcggaagactggcagtcactatatttgccgttgttctgattacggcaattggcataagccgtatctacctgggggctcattatccaacagacgtgatagcagggtacactatcggttctgcgtggttggtattttgcacatcgctgttgaatttaaaatcataataattagcaggcagattcaaggcttgcagatatgcgtttagtagcagatgagacggtggtaacgcagaatattaagctgataaaggagatttgcatcatgagcagttgtttgttgatagtaaatccatcatcaggaaaagaaagagcaaagcaatatgtccccagaatgaaacagcaactcgagcggctttttgatgaggtggaagtaaaagagacacaaaaagcctatgatgccacagcctttgccaaacaagccgacgaggaaggaaagaccgcggttttttgcatgggcggcgacggcactttaaacgagaccattaatggtctggctcaggcacacaggccgataaactttggctttgttccttttgggacggctaatgatctggccagggcactaaagattccgctcgatcccggcaaagccatcgatttattgccaagggccagaacggtggctatcgatcttggtaaaataaacgatagatatttcatcaacattatggctgccggggctttgcccaaagcttgtgaagaggtatcgacagaagagaaaaccatgttcggcgtcctagcctacttcatcaaggggatccaggcacatgttaatcaacgtgtttatacctttaagattgaaaccgatgtgggcgattttacgcaggaatcctcattgctggcagctgtgcttaccaactctatcggcagttttgaaacagcgatgccgggagccaaagttaatgatggcaaaatacatttagttgttttcaaagatttaaatatgttagatacagtaaaaattgcgtcgcagattattatcggcaatattgattactccaagttcgcctctgtgcatgacattcaaaaagccagaatctcccttatcggtgacgaaaaattatcaaccacggtagatggggaaaaagggccggattttccgttggaaattgaagttttgccttccttcctgaaggtgtatgtccctaaagctgaagatgacgaatgaatgtaaggcgaatgattcatagcaatccattttttatttaagaacgagggaacgcaaatatgaattttgatattcggagcttattgatagcatttcacgtaattatatggattaacttttgcgtaatgactttagcatggtataatgctaagcttataagaagtgctatcggatattggagctttagccaagcgctatttggtcttgggacgctgctgctggttttgcgtaatttcataccggattttttgtctgttatcatagcaaatctgtgccttattggggcccttgttgcttctcaagaaggactagctcgctacatgaacagagttacttatttgcgaaaggcttctttaggcattcttgggttacatttactatttatcatatatttaacatattttatgccttcagtttcttttcgcattgttatgtatagcatttctacaggcttgatggctgcgataaacataaagacgatttgccaaaagggttatgcgctggatgcaccacaaaaatttttaatcattactttgggttttgaaatcgtgattgtagcgtttcgaatggtttttgctattatagacggacactatgctgatcttatgtattcgggttttgttcaggctgtcagtattatcggtatgctgatagtgtatgtgggcttttcaatatctcagctttggcttgttgttcacaaacttggattggagattcagcgacaagccatgattgatccattgacgaatattggtaatagacgggctctggatgcgttgatggaaagtcaactacctataaggacacgcaacagtataggtattatgatgattgatgtcgaccgatttaaggggattaatgaccgattcgggcatcaagccggtgattattacctaattgaatttgttaaggcaatcaacgaaacagaatataacttatttcgatttggtggagatgaatttgtggcggttgtttatgatgttaatagtatagccttattacaaaaagccgaatatttgaaacaaaaagttgaaaagttaaatatcaactggctatatcagggccaaattaatacgacagtaagtattggaatagcgatggccgacaactataaaattagctgggatgaactagttaaaagtgccgatgatgctctttatagagtaaagaaacaaatgcatacgtaatgcaaatgtgggactgaatgtttactcgatacagaaggtgtataacaaatatggacccttatgcagcaactcagaagagaatttacattaatggtttcaattcatataaaagtttgatatgcaatgatggcgagtttatcatacgtttctgcagcttgcaatatagcgtaaagttctgcaagattaacgaaattggtgaaaaactggggaccaaaacagtatgagagggcagttttctataaaacaaaatatcgcatacaaaaaaaatactgccggaaccaggttccggcagtatttgcttttcaaaaagtcgcctgcaatgccaattgtgagggtaaaattatgtttggttatgtacagtaaggtatgctccctaacgatgcatcctgacttttgtgtaagctttcggctgatattgcagacagttttccaacaatatttatattgttctggctatttcgttttttcatctcgtacacagtatcattcaaatattaataaacatatgccccgccaaacgtataaattaaagattattgcgaacttgcagtctatgttggtaataaaaaggacaactgatttttacatgcaggagataacaaagaaatggcgaagtgtaaaaaagttaatgaaactgacaggcttatttaacaattatctggacaaattagtatgaacaaaaaagacacagccaatggctgtgtctcagaattgcaaaatgggcggattaaagggataccgccataccccacggcaacctataaaggctagccttatcttagaactcgatggatattgatgaacaaacaaagtttatctcactctctgatggatattgataaacaaataaccataattctaagttcaaggtaattgtaactcgcaaaaacatgaatgtcaataaatctttaaggtatatatagggggagggttttattaatgaataggacttataggattgggctggacataggcatcgggtcagtaggatgggccgttatttccaagcaaggcgactcggcaaggatcgaagatttcggcgcacgaattttcgattctggagaacgtgagcaaaaatatagaacaagccaggaacgacgagcttttcgtggggcaagaagagtgctacgcaggcgatattatcgcaaggaaaggctcaagagatacctatcattattacgctttttgtctttccaacaaatgaatgagacagatactagcgggaaggaatcagttatagagcttaaggtacaaggtctggaaagaaaactctccccagtagagttgtatagatgtctcgttcatacttgcaaccatcgcggctatcgtgatttctatgaaacaccagagggagaagaaggcacagagatagatgccgatatggatgaagatagcgaggaagagaaggagaccgcagtcaataagaaagcgctgcaagaattcgacgcagcttttaaggctagcggtttaagaactgtgtcagagtatttatggcgtgattgtagggatgaagccacgaaccacattgctttccgaaaccgagattataaagaggaaagactgctcattaatcgcaagcatttgcgtagggaaatagaacttattcttgaaaaacaaagaacattctaccccgagttaactaccgacgcatgtttgagaatcgttgatattatattcgcacagagagactttgaagatgggccaggcaatccggaagacgcaagccgccggtatacaggttttttggataaactgggcatctgtcctttttatggcgaacaaagaggtttcagagcaacggttatgggtgatatttatgcagtagtcaatgctctttcccagtatagatatctgactgcagacggtgaattgctcttgcccaaggaagcggcaaaagaacttttgtgcacagcccttaacgaggcaaggctcacaaaaagtgatgttaatgcaataatgaaaaaatatagccttaagcagctcaaaggggaaggcattgatgataatgccttggctaaatccataaagttcatgcgggcagccaaacaagctgcggagcaggtgggcatgaactggagagatttgattggcgagacgcagtttgatgtttcaacgccttccactttacatcgtatagcagaagttcttgcaaaatatcagaccccgcgaagacgtttgactgaacttaaaaacacgaagcttcttcacgcgaatgataaggctctaaacgcatttgccagaatcaagctgaatggcacttcagctgtttcatatcgttatatgtgtgatgcaattgaagcatttttgaatggagaaacatatggcaactttcaggcagctcagaataagaagctttttgaagacaaggaagaagcaagaacgatatttctggcaagtgagttgctcaaaaacgaagagattgaggataatcctgttgtaatgcgtgctatcaatgaaaccagaaaggttatcaatgcaattataaggacgtatggttcacctgaatgtataaacgttgaagttgcgagcgatttgagcaggagctttgtcgaaaggaagaagattcaggcgctgcaaagagatgcggaaaaagcaaatgataaagtgcgcaaggctgttgccgagcttttgggaataacagaaggcgaagtcaagggcaaggcgattgaaaaatacaagttatacgaattgcaggaaggcaaatgcctatacagtggcaagcctctgggagacataactgaggtattgagagacaataacggcaaattcgaaattgaccatattattccttattcgttgattctggataacacgcttaataataaagcattggtctttggcagcgagaaccagttcaaaaagcagagatgcccgttaatgtacttgaagggggatcgggcagctaattttaaagcaatcgtaaatgtaatgaggacacgcaaagaaaatcccatttcagccaaaaagtatgagtatttgatgcttgaagacctttacaccagcaagtctcgtgagatgctggaagcatggaaatccagaaacattaatgatacgcggtatatcacgaagtttattgtttctttgttaaaaaatcatcttgtttttaccggaaaacccagggtgtacggtatcaagggcgctataacctcaaggttcaggaggagatggttaaacccaaagacttggggaagcgagcaaaaagacaggaattcttatctgaatcatgcggttgatgccatagttattgcaaatcttgccccagcatatatagaaattgcggctgacgcagagaaacttaaccagatatggaagttccacaggggggaatcggaagagtatcgtgagtacctcaaaaaagcaattgaacggataaatcaatactataatatgaacccttcatacattgagatattgttaaagcgcaataacagaaccccgtcgatggtagcgaatctgtctgatgagatagacataagaatgaacgatttagatgaggagctctttaatacaaaagctgaagaattttatggctcgacgattaatgattttgttgtgaagccgcatatgccacttgtgtcgcataagcctgaaagaagattcaggggtgcgattgctgatagtaaccccatcaagcttatcaaaattgacggacagtatcacaaggtcagcaggaaagcaatccaaagcataacggaaaaagatattgattgcatacggaccaatgacggtagcctgcttcgcaccttaaaggtagcgctagacaataaaggtgagaaatatactgttgaaaaatatttgaaggaaataaaacagaaggtatttcttactgattgcggtcaacctgtttataaagtaactgtggtagacgaaagacccacatcctcatactatcgcaaggaaaatagtacaagcaatttctcgattctcggtggtctcaagtactactgcatagaagtatatgaaaataatgagggaaggacggcaacaagaggcatacgctatgttgatgttataagggaaaacaagaagctatatttaaagaaggagtcaaaacctgaggactatgctcgtcacataatgtacctttttaaaggtgattatatagaaacttacaatttcaagggtaaacaaacttttatggggttttaccagtcggcttacaacataaatgaaaatagattttgtggcaaagaaatgaatagttctttgataagcggtaatgtaaggattagcagtaaaatcaaaattaagaaatatgatattgatgtgttgggcaaaaagtgtggtgaaatcaaatgtttcgtaccattatcattcaaataggagagtgcttgaggactgaaaacaattggctttatgttgaaagtccaaaaggcacgagccgtatacctgttgaagacatatactccattgtcatcgataaccagcgttcatcaatcagtgttgcggctatgacagcgcttacagatgcaggtgttcatgtgctgctttgtaatgacaagcatttgccggttactgttatttatcctcacaatactcattatcgtccttacaatatcttgaaaaaacagttcgcaatgccacaaatagaaaaagatttttactggcaaagggttattagaggtaaactgcttaatcaagctaatgtgatggctttttcaggagggcctgttgatgtaaccaagcgtttgcgcgagttggcgaaagaggtggaacctggggatcctggtaatcgggaaggtataggcgcaaaaatgttttttcgtggtctttatggaacaaccttcttgagattttcagatgatgcagtcaacgctgctttaaattacggttacgcaattctccgctcagctgtcacaaagacgctttatgcctatggctttcaaacagttttgggaattcatcacataagtgaaaccaatccgttcaatctggctgaagatatgatcgaacctttgcgtccgctcgtagattattgggtcgtcgttaatagtgaatctttggttgaaaacctcacggctcaaaacagaatggaactgattaatatagttaatcagccaatgctttgggaggggaagaagatgcacgtaagaactgcaattgacaaatacattggaagttttacatccgccgtcgacaaacaagatccgtcattgctaaagtttccgttaataattgaattaccaccatatccaatttcgtacgaagatgattaataggaccatgcgcatcttagtgatgtttgatttgccagtaacgacggataaggacagaaaagaatatacaaggtttcgtaaatacttgattggcgatgggtttattatgttgcagttctcagtttattctcgtataacaagaaatcatgatgatgccagaaagcacgcgcaacgcgtcaagagcaatttgccacccaagggttctgtaagactactcacaataacagaaaaacaatatagtgcaatgaaaattcttgttggtgaacgtacggcggaagagctgcttctctctactgctgagataattgagttgtaacaggtcgtgtgctatactaaatttaaggttttagctctctgatggatattgatgaacaaatacctataaggatataacattggttgagtgctagttttagctctctgatggatattgatgaacaaatactgttcaatggggagatgcaaatagtacaacgttttagctctctgatggatattgatgaacaaatacattcccgctgcacagcacgaccaaagccgcgttttagctctctgatggatattgatgaacaaatacaacgatcagcgtcattacaatgccccacgcgttttagctctctgatggatattgatgaacaaatactttactatttaacaatatcatgtaagaagtgttttagctctctgatggatattgatgaacaaatact

SEQ ID NO: 596 - DNA, 9438 bp, synthetic construct
  source 1..9438: mol_type = other DNA
  misc_feature 1..9438: note = Synthetic
agatccactcgagtcctctatattgtggtgcgcgaggcgggacttgaacccgcacgtgcgtattgcacactagaacctgaatctattctggcgggtgatttaatagtatatttaatcccgtataaatccttttgatactgcttactatggtagaaaaagtggaattatgaattgatacagataaaaactcttagaaccactaaaacacctttataaaaccgttttgattagatatttgattagatgtaggctggttcagccccactagaatcaaacccttcaggcggtcagattagatgcacatcaggattggccagttctaattgaattttggagtgctatgcatcgaattaacagaactaattgtaaaaccaagggcagaccagatggcctgcccttggtttttcactctgtccttcatctccttaggcaacggtgcagaaactgcgcagtacacttcagttgcgtcacataattgtgacactctgcaaagtttagttgactgatggaaaaaactgatatacgatatacaaaaatctggaataataggcgaatttgtagttaaatcccgaataattgtaccggaaaacaaaacacgcagttcaaaaactgcgtgttaagcggcggattgcttgtcggataccgccataccccacggcataacagccttatcttagaactgctgatggatattgatagacttataacacggtcatcaatatggttatctgatggatattgatagacttacacattagcaattccaagttttactataaaatacaggatttaagctgacttgtcaagtatatcagggggataattttatgacaaacaaagttagaatcggccttgatattgggatcggctcgattggatgggctgttattacaggcgagcagaagaattcgagaattgaaaactttggtgtcagagtattcgactctggagagctcgaaaacggcaaaagcagaaaaagccaggtgcggagaggttttagaggggtcagaaggcttatacgtagacggtattttagaaaagaattgctgaaggcgcatttacaaaatattggcctcctaaatgaaaaagtaatgcgcgaatatgagcgcataaaagaccagaatgttcatgtacttaaggccaaaggcgtatcagaagaactctctcctgctgaattgtacaaatgccttatccatacctgcaatcataggggctaccgtgacttctatgaagatgacgaaacacttgatatggaagatgaaacatctgtcaaccgagcggcggccagcgagtttgaaaagatgttcaaaagcagcggatgtgaaacggtatcccttttcatctgtaagcacttcgttaatgaagccggtcaaatagagttccggaaccgagattctcgaaaggacaagtacttattaattcgccgcagtttacttagggatgagctccgcattattcttgataagcaagctgagtatcattcagcccttacaccgcacaacattgagactattgacaaaatcattttctcacagcgcaattttgaagatggccccggcaatccggatgacccattccgcagatataccggttttctggaatcccttggctcttgcccgttttgtacaggcgatagaagaggcttcaggggcacagtcattgcggatgtctatgcggttgttaacaccctctcgcaatatcggttcgttgacaaagagactggagaatactgcctgaagccagatattgctaggcagctgattgattttcttcttaagaacgcatctctgacactgtcagatgtaaaaagaatacttaaggctaataacttcgagcttctgaagagtgaaaacagcgatgacaaggctcttacaaaagctgttaggttcctgaagcttgcgaaaagcagcatcgagaacgggggagagaactgggaggactggatttcagaagagcagtttgatattgagaaaccttctaaactgcataagataggtgaattgctctcgaaataccagacaccgtcgtacagaagctcgaagttcaaagagcttgggtttatgacgccccagcttatcaaagcgttttctggcaagaaaatcagcggaaccgcaggagcaggttaccgctatatgtgtgatgctattcacgcatttttagacggggatatttacggcaatttccaagcaaacaagctaaagcagatatcagaagaaaagaacatatctaaacgcagtgtgaagcttttgcccgaacatatagacgatgaggacataaagcaaaacccggtcgtctttcgcgccataaacgaaactcgaaaagtgctgaatgccattattgagttgtatggctctcctgaagttattgttgtagaggttgccagcgagttaaattctagctttcttgagcgtaataagactgcaaagcgccaaaaagaaaacgaaaggaaaaacgacgaagcaaaacgggtaatttccgagctgcttggcatttctgtggaagaagtaacgggtaatatgctggataaatacaagctttatcatgagcagcagggcaagtgtttatattccggcagaccccttggggatttgacagaagttctgaaagataaggataagaggtatgaagtcgaccatatcatcccatattccttaattcttgataatacccttaataataaagctcttgtgtggagcaatgagaatcagacgaaggggcagagaacccccctgatgtaccttggtgcggaaaaagcggctgcatttaaggccagagtcaatgaaatgaggacaagaaaagaaaactgcatcagcgacaggaaatacaggtacctgatgctggaaagcatttacggaacagaagctgaggacttgctgtctcagtggaagtcccggaacattaatgatacccgcgccataacgaaatatatcgtttcgttgcttagtaaaaaccttgtgttcagcggaacgagcggtcagcctgtttttggcgtcaagggcgcattgacctcgaaattcagaaggatatggttaggtaacactgtttggggcgactcagataaagaccggactacatatctttcgcacgcagtcgacgctgtggttttggccaatctgacgccgccttatattgaaatagcatccgataatatcaagctgcagcagatatacagaaaatacaagtcgcaatcggccgctgagtatcaggactacctcgagaaatgcctggataaaatgcaaaaatacggtttctcgcgggagtataccttacatctgttaaccaaaactcagcgggtgccttcctatctgcctaacattgccagtgaggtagaaatccggtttgacgacgaggacgaagaacggttcaaaacgaatgttgtgaagttctatggagatgctttggagagctttattgtaaagcctcagatgcctattgcgtcaattaagcaggaaaggaagttccgtggagagattgccgatgccaacccaattagagttgttgaaatcaattcggaaccgcataagattgcaagaaaggatattaagtctatcaccaagaaggacatagacaagctttatacgactgataccacgctggtagccactctcaacagaatctttgaagggaaggatgacaagtacacagttgaaaaatacttaaaagaaaacaacctcacgacatttaaaacagattccggccagcctgtacataaagtatctttagatgccgggaaaatatcaaatttctttaagaaggtcatatcagactcaaactatacgatgctcggtggattaaactactattgtgtcgaggtttataaggacaaaaaaggcaacaccaaagtatggggaatcagatatgttgatattcggcgcaaagacaaaaaactgcatgtaatcaaagagcgtatgccagaggattattgcagccatgtcatgtatctctttaagaatgactatatacggatataccgaggaggagaagttcgattcgaagggtactataaacatgtcgacaatattaataaaaagaggctcgttttttcgtatggcaactatacaaataccagagatatagaaattgcgcaaaaagacgagtttcgaaaggtttacatcgatattttgggccggttaggtggtgaagtgaagtgttccgcaccgttgttgtcaatatcggagaaagaatgagcgtgaaagataactggctcgttgtatctgcggatagcgaagaaaagagaatcccgattgatgacatctattccgttgttgtggataaccagcgaacagcaatgacaattccttgcctaaatgcgcttacttgttcgggcgctcacgttgttttatgtaatgagaagcacaaccctgtcgcggttgtgcttccctttaatacccattatcgtcctctcaatgttataaggaaacagcttgctcttacacaagatttcaaggacaagatttgggatgagattattaggaataagattcttaatcaggctaaagttcttgagctatgcggttgtattggcgaccgcatagcgcggctaagagagttagcgcaagaggttgttgacggtgacagcggaaacagagaaggaatcgcggccaaaatgtattttcggagtctgttcggctcgggctttattagaatgaatgatgacgcagtaaatgcggctttaaactatggttacgcgattatccgttccgcaatcagtaaggcgttatgcgggtatgggtttaactgtgttctcggcattcatcataccgtttaatttggcggatgatttaatggagcctttacgaccgattattgacttatgggtagccgataatatggaagagctttttgacgaactcacaaagcagcaaaggaatgagttagcagcaatagtcaataatgttgtgatattaggaaataaaaaaatgaggcttagaaatgcaatagaaaagtatattcagagcttttctacaaccttggagagaaattccctgaagtatttagtgttcccggaaattattcgcaatgagtattatgtagaggatgagtgatggtaaacaggaatatgagggttatggtgttttttgatttgcccgtaacaacaaaacgacagaagaggaattattcggcctttcatagatatctagttagagacgggtatcagatgattcagtattcggtttatagtcgcattactcgaaaccacgatgatgctaataaatatgtaaagcgtttacaggcgaacttgccgcctgaaggttcggttagagtgatggtcgttactgaaaatcaatacaattcaatgaaggttcttgtcggaaacattaccgcaaccgagagttttctatctcctcgggaacttattgaagtatgattgtatttcacaaagcgatatggtattgtaaatttaaggttttagttctctgatggatattgatagacttatacacttataatttgcactaaacttcgctatatgttttagttctctgatggatattgatagacttataccgccgatttgtcgtcccctaaaattcccatgttttagttctctgatggatattgatagacttatactgtctgatattgttttagatgaatactcttgttttagttctctgatggatattgatagacttatacaggctgtgcagttcgtcagatcgtatccgggttttagttctctgatggatattgatagacttatacgtgtacgattgccgggactacaagggctagttttagttctctgatggatattgatagacttatactcttgataatttcttccttggtcggcatgtgttttagttctctgatggatattgatagacttataccgcaaggacgacagagccgcgaggacaaccgttttagttctctgatggatattgatagacttatacgaacgcctacaaacgccgcaaggccctagcgttttagttctctgatggatattgatagacttatacgggcggcaagggctttggcgcgccgttcgggttttagttctctgatggatattgatagacttatactggaccccggaggacggcggtaagtattagttttagttctctgatggatattgatagacttataccaatgcctcgtcgaacatatacagcgttaggttttagttctctgatggatattgatagacttatactgggagaaaggaggattgaaatggctagaagttttagttctctgatggatattgatagacttatacctgtacatggcgctatctcgcggtgcacgggttttagttctctgatggatattgatagacttatacgtccttgcggcttcatggtacacttgtcaagttttagttctctgatggatattgatagacttatacgcccgtcatagtgtttggcatgtactactagttttagttctctgatggatattgatagacttataccgatctgctgcaggttggtggtgccgtcctgttttagttctctgatggatattgatagacttatacgctggacaatatgacggatgatgaagtcaggttttagttctctgatggatattgatagacttatacctaactccatgcttgccacagccgcattcgttttagttctctgatggatattgatagacttattcactacgcgcagagaaacaccagctacacaagttttaattctctgatatttaactcttaagtcactatgtaaattgcactgtttcaggcaaaaaaacggggatatgctttcagcatatcccgttttttaccccgctttccaactcaaccactatggcagatgcgctttagcgcgtaaaggggctaatatcaagcaagtacagacgttccttggccatgaatcagcttcaacaacactcgacatctacacccatgttgatatggaagatgccagattagatggagcctatcttggcggcatgtaaataaaaagaggactcgataacacacaaatccttgtgtattatcgagtcctctatattgtggtgcgcgaggcgggacttgaacccgcacgtgcgtattgcacactagaacctgaatctagcgagtctgccaattccaccactcgcgcgtgtcggcttagtcatattacaacacgaaacggggcttgtcaagtccttcgccgctatcttgcggcgtaaatttcagaaaatgccccagcttttgcacgacgagccgcttgccttccgtccgccacgcgggctcgcgcgcctgctcccgcgtttgaagggcggacgcacgcgtttatcccgccccatcctgcattaaatgagcttttgcccgagggggagagctggaacaattcatgcccgacggagcgctttcctgagcagcctcttagctcggcagagcattgacccggggccggcatcgccttatgtacgctctccttcccgcgcgcggagaatccgctccacctcgtgcagctgctctaaagtgttcacgccgacaatctcctcgccgagtgcgcggcggcagacgccgaccttttcgccctgctttaagagcagctcggggacgtccgtgagataatactcgccctgcgcgttgttgtttttaagcttctttagcgccgggagcaggagaggcgcctggaagacgtacacaccggcgttgagctccgtgacagctttctcctcgggggtgcagtccttttcctcgacgattttgaggaaagcgccgccgctgtcccggatgatgcgcccgaagggaaggggcttttccgtgacgctgcttaagaccgtgcaggcgttgccctccctgaaatgggcgtccaccagcgcctgatacgtctcgcgcgtgatgagcggcatgtcgccgcagcagacgagcaccgcgccgtcaaagccctcaagcagcggcgcggcagccatgacggcatgccccgtcccgagctgctcgctttgcacggcgtgggggtagcgcgaaaagcgctcgagaatatactctttcttgtatccgacgacgaggataacgtcctcgtctttcagaaaagacaagccgtcgagcacataagacaggagcgggcgcccgcaggccaggcgcataaccttcggcaggtcctcgccctccgtgcgcaggcgcgtgccctttcccgccgcgaggacgacggctttgatgagtccgttcattgatgtaccgcctttgaactaaagatatgcttatccgaccgagaccgtcggcgcgctcgtttccgtgatgcgccggacggtgtactcgcgcgttctgagatacgagaggatggagctcagaagggagacggttttctccgagcaggcgaaaaacacgctctcgcgcgttccggtgcgcgttgaaagctggctggtaaagccgggcagcgtaaagtctttttcgtaccgccgcgtcggcgaccagtagatgagcttgttttcctgcgccatggccgccgccgcctcgcgcgatgcctgctccgacgagacgatgagcggctcgattttcaccgcttcaaagatgagccgcgcggcctcctcgtactcctcaaacgtgccctccttaagccagacgccgatggtgtgcccgccggccgcgatacggcgcagaaggtccccgttttggcgcgcgtcctccgcggtggcgaagaagcaggctctgtaccgcgcggaagagagctgctggagcaccgcctccgtgcgcccggggtcaagggcgaaaaagccgaggaagagcgtcacgcccgggtacgtctccggcggcgtctccgtcggggcgggggaggacggcgtggcgggcgtcggctgcgctatgcccatgtattcatcataatatgactgcatggtgggcttatagaagctggcgaaggtgcggtcgttgagcacgttgctgcccgacttgacgcggatgatgtccgccggctccgccgtgataacggagtattcgagcccgaagaagctgcacaccagccagagcgggacgtagacgatcccgtccgccttcttggccgacggcgagagctggttgccctcgtggtcggtcaccgcgcccgtcttgacgtcgaacataagccgctttgtgctggaatagatgaggacggtgtcctcgctgctgttgctggcaaaatagatgccgaggtcgtccgaggagaaaaaggtgtacggcatgtagatgacgccggagaagtaccgcggcatcgtctctttctgaagcgggaagagcttgttgttcaggccggaaaacagcacgtcctccgtggcgcgcgcggcggggagaacaatcgcaagcgcgagcgccaaagcgagtaccgacgccagtatcctcgccttcatcggcttcatcatgccgcctcctttctcctcaaggtgtaaaggcgcgtcagccgacgcgcacggcgaaggcgctccagccgtcttcgcgcatggtctcgagcaccgtaaacccggcgccctcaatcgcgcggcgcacctcgtcctcccgag

SEQ ID NO: 597 - DNA, 5014 bp, synthetic construct
  misc_feature 1..5014: note = Synthetic
  source 1..5014: mol_type = other DNA
cataaacgcgctgactttttaagttggcggattgcttgtgaggataccgccataccccgcggcataatgccttatcttagaactaattgatggatatagataaacttacacgtaaaccaataatgttatctctgatggatattgataaacttacacaccaactcttctaagtcgctctaattgtatcacattcctgataattagtcaagagaacggttgatatttgtcaaaatattcagtataatattttcaaaaggattgataagcggaggatagtatgcaaaaagagacgtataggataggccttgatgtaggtatcgggtcaataggatgggcggtggtttcgtcatcgacagatggtcatccggcgaggattgaggattttggcgtgcgcattttcaaatccggggaggatccgaagaaaaaaacgtctctttgtcaggacagaagagggaacaggggcgttcgtcgtcttgagagacgtcgttcttacagaaaaagaatggtgaaaaaccatttgcaaaatatcgggcttatcggaaacggattcaatgatgagcttgctgactgtcgcgacgctgacgtgtataaactgaaagctcgcgggcttgatgagcagctttctcccgctgaactatacagatgtcttatccatacttgcaatcatcgcggttatcgggaattttacgagccttccgaggacgatgacgaagcgggcatgaatgagagtgccgctaattcttttgaaaaagcgttccgcgagagcggcaaacgtaccgtctcggagtaccttatttcaactgcatcagtaggcgattatgtgaagttcaagaacagatccgggggtgacatggaataccgcctgatccgccgtgatctgcttcatgacgaggctgagaagattcttacaaagcagagcgggttttaccggtgcctcaccaggcaaaatatcgagcggactctcgggattatgtttgcacagcgtgattttgaggacgggcccggcaatcctaatgataaagacaggcgctatcagggatttattgaaaaactcggaaaatgcccgttctgtaaagatgaagacagaggtttccgcggcactgttctctccgacgtgtttgcagtgacgaacactctgtcacagtaccgttttgtgagcaaggaaacgggagaatactgccttgacaaaaatgtggcggaggagatcgtcgattatctgctccaaaacgccaagcttgggatttccgacgttaagcgcattttgaaatcacacggattcgaacttctcaaaggcgaggggtctgacgataaagcacttggaaaggcgctgaagtaccttcccatggcaaaaaaatgcgttgaggaggcgggttttgactggaatgagatcatttctgaggaccaatttgatttcgaaaaaccgtcccttcttcataggatcggtgaacttatttccatgtaccagacccctcgtcgccgtcgcgaggagatgagaaaagcgggtgtcgatgataaacttatcaaagctttttcgtgcagaaaggtcagcggcacttcctcggtgagttataagtatatgaccgaggcgatttccgcttttctggacggggatatttacggtaatttccaggcgaattataacaaaaacgcggaagagaatgcccctgtgaaaagggagatcaagcttctaccttctcatatagacgatcccgaggtcagagacaacagagtagtcttcaaggcgatcaatgagacccggaaaatagtgaacgccataatcgacgtctacggttccccggaggaaatcgtgatcgaagtggcgagtgaactcgggaaaagcgttgagatgcgtaacaaggaaacgcgccgtcagcggaataacgaacaagccaacgacaagatcaaagaagagatcgcgtcgcttttgaagatcgacgtcggagacgtcaagccagtcatgacggaaagattcaaacttttccgcgagcaggagggaaagtgcgcctattcgggaaagccgctcggtgaattgaaggaagtaattgacaaccgggacaaaaaatacgagattgaccacatcgttccgtattccctcatccttgacaatacacttaacaacaaagctctcgttttcgccggggagaatcagaaaaagggtcagcgtaccccgctcatgtacctcggaacagaggacgcaaagaattatatagcattcgtgaatcatatgtattcacgcaaggagaacccaatcagtaaaaagaagcttgattatttcaaactgaagagcatatacggcgagaaagcggaggaaattctcggcggctggaaatcccgcaacatcaacgatactcggtatatcacaaaatatatagcggggttgtttgagcggaatctgatcttcaccggagagaagaaacatcacgtccagaccgtgaagggctccgtgactcagaagttccgtcgtgaatggttccgcgggacccggtggggcacggacgagaaaagccgcgacacttatctcaaccatgccctcgacgctcttgtcgccgccaacctgacaaggccgtatatagagatcggctcggacgcgctgcgccttatctccatatataagtctcacagaaacaccgtgactccggaatatgacgagtatctcggtaattgtgttacaaaaatgaaaaaatactacggatttgacgaggagtatacccgccggcttctttcccgcacggggagagttcccgcgtatgttccgcgtctttcggacgaggttagcgttcgattctgggagggcgacgcggacaaattcgaagagaatatcaaccgggtttacggtaacgaggcgccgttcgtatgcccgccgcacatccccgtgacgtcccataaaccggaaaagaagttcaaaggggagatcgccgactcgaatcccgtgaggatcgtggagatagacggcgttccccataagatcaggcgagtggatataaagaacgtcggagaaaagacactcggaaaactctataccggagatccggtactgaaggagcgtcttgaggagatcctgctcgggaaaggagagaaatacactgtcgagacgtatctcggtgaaaccggagagaatcatttcacagacgggaagggacacgttatccgtaaactctccgtcgacgacggaccggtctcgaatttctaccgtaaagacaacggagacggcaactataccgtgctcggtatgctcaaatattactgcgtcgaggtgtacaaagacaaggacggcaacaccgccgtgtgcggagtgcgctttgtggacgtggtgaagaaaggaaagaaactgtacagaaaagaagagagcttgccagaaaattattccgaacacgttatgtatctgttccccggagattatatcagggtaatagacgggaaagggaagttgaaatttgagggatactacgtgtcggtgaaaacaatggggaggtcgcagttttatttcaaggagagtaacatttcggattcagttgtggagagcatagctcgcaaagactctgttagaaaagtttatgttgacattctcgggaagatcggaggtgaggtgaaatgttccgaaccgttaccgtgtataccggagaaaagatctcgttagacggcggctggatggccgtctccggcgaaaaaatgagacttcgcaacgcccttgacagatacgtgtcctcactcacctccgcagtgacgaatctttccccgggcaagctgataattccggagatcatacgtacggacgtgtactgcgacgaagatgattaacagatccatgagagttcttgttttcttcgatcttccggtatcgtccaaaaaaagacaaaaaggaatacggaaaattccggaagtttctgataagcgacgggtatgacatggtgcagttttccgtctattcgcgtatagcacagaatcacgacgatgcgaagagtcacgtcgaacggcttaaaaggaatctccctccgaaagggtcggtgcgggtgatgcaggtcacggaaaaacagtataattcaatgcttattctggtaggagagagaactgcgacggaggattttttgactccggcggactttctcgagctttgaccgttgactttttgcgcgtttctgctataattgatttaaggttttagttctctgatggatattgataaacttataccctcgcgggcggttacagtagcaacctcggttttagttctctgatggatattgataaacttatacatccgcacccgccgttgttgcaggtgaagagttttagttctctgatggatattgataaacttatactgatattctcgatctgttcctcgtatctctgttttagttctctgatggatattgataaacttatacggagataatcgtacaatgctttcatcccctgttttagttctctgatggatattgataaacttatacattttacccgtaaggcaattcgggacattagttttagttctctgatggatattgataaacttatacagccgcgcggacgcgcggtttttgttttgcccccggacggcgaaaaatcgccgttccgggggcgttttttcgtccacaattcactattgcaaaaacggtccctccgtggtaaaatgatatttggcaaaaatcgggcgtcagtcgcccgtttccgccgtcacaagtcatcatttcagaaggagatataaaaatgtactactcaaaagtcgaaaaagtcatcgctcgcgagatcatcgactcccgcggaaaccccaccgttgaggcggacgtcatcctggacgacggcaccgtcggcaccggcgcggctcccagcggcgcttccaccggcgagttcgaggccctcgagctccgcgacggcgacaagtcccgcttcggcggcaagggcgtatcgaaggcggtcgagaacgtcaacaccgtcatcaacgacgcgctctgtggcaagaacgcctacgacatctacgccatcgaccgcgccatgatcgaggcggacggca

SEQ ID NO: 598 - DNA, 23477 bp, synthetic construct
  source 1..23477: mol_type = other DNA
  misc_feature 1..23477: note = Synthetic
aaaaccgtttaatcatggtgaacaggcaggcgagttttacaaagcctgtgtaaaggtgatagtgatactcccagcgtgtcaccacgcgccgataattatgtaaccaagagattgttctctcgacaattcaacgtcgcttgtaacgtcggagcttgcgaccatcctggcttttctgctttcggtttttgatgcctcgatgcggacaaataaaatcgatattctgatcagctaaacagtctcgcaatttctgggaatctcccgctttatcgtaaatcaatcgctgaggatgtcgttttttcaatgtcatttttgcaattaacggttcgaccagaatcgcttcattgcggttgactgattcggtttcgactgccaggggaatcccttgggcatccacgcaaatcataatcttagttcctttgccacggcgtgtcggtccaacctgtttacctctttttttgccgaagcaaatgtgccgtcggcaaaggtttccgtcaggtctaaaatctccgattcttctaaggctctcaataatcgttctaatgcttgatcgaataaacctgactccgaccattccttcaaacgatcatgacaggttgatttcggcggatacttctctggtaaatctttccagcgggctcctgtccgcagcacccacataatgccattgaaacaggctctgggttttgctttgggacgtcccccctggggggccggaggttcccagggaaataaatcctctatcaaactccattgtttatcggttaattcaacagttgggtccgtcctgaattccgtgtcgacgagccggcttagctctgtacgggatcgtgtgggcatgataaagcctcctttctgaggactgaatcatgcaaatctcagaccagactgttcacacttttcttggttttcggataccctccagagacgacgaatgacaacgcgattccattcagaaaagtatggccagaaacggtcaacaggatgatcaaacgcaagcagggatcatcgctgcgtatatgttgctcctggcgcaattccgagagattgttctgagaaccatcggcagcacatcatgattttgtagctctgtatgaccatttctaaagagcagacttaataccttatttttttcggttattttcagccattagaattttcaacttgtggactcgaccagattgatcaccaaccattaaagtatcgccactttgactgatcgaaatactattcacaatatcatcgaaccagtatgtttcaatcgcctttccgctcgtgagatcccacatttttatcgacttatcattcgaaccggaaagcgcatgcttcccgtccggcattatcgccacgcaattgatcgattcagtatgccccttgagcgtttgaagtggtttccggctggttagatcccacagtttaagtgtattatcgtaggaaccagaaatgcactgttttccgtttagagtcaaagccacacagttgaccccaccagaatgtccttcaagagatccgagtaatttcccgctgcccagatcccaaatcttcaggcttgagtccgctgctcctgagatcgcttgcttcccatcaggcatgattgctacgcacattacgtatgcagtatgcccttggagtgactgaagcatctctccatttgccagatcccaaactatcagagtttcgtcaatcgaacctgagacggctttcttcgcattgggtgttaatgctacgcatcttactgagtgtgcatgtcctttcagggtttgtagaagtgttccgttggataagtcccacaatttaagtgttttatcaaatgcaccggaaatggcttgctttccatcgggcataatcgcgacgcaaaaaacttcttggttatggtcttcaagagtttggagaagatttccgtcacttagatcccacacttttaatgttgtgtcccctgaacctgaaataaactgactgctatcaggagtgatggcgagacaattcacaaccttagaatgaccgtttggtgtccagggcatctttccatttgtcagattccacaccttcagcgtatcatcggttgaacctgaaacaacctgtctaccatccggtgtcaccgccagacacttaatatgatgcgcatgtccttcaagtgtctggagttgctttccactagttagatcccatacctgcaacgttgtgtccagcgaacctgaaataactcgcttcccatctggagtcactgtcaaacaactgaccggccccgtatgtccctcaagtgttttaagcagctttccgctcttgagatcccacacttccagcgtattttcctttggactggaaacagccaggcttccatctgatgtcaccgctacgcgaaaactgagaatattgattgtgcggagttcttttccactgttgaggtcccacacttttattgtttcatcaaacgaaccagaaatggcctgtttgccatttggcgttatttttataaaattcaccagacttgaatgtcctttaagtgttcggagcagttctccactttgaatatcccatacttttaatgttctatcgtttgatgcggaaacagcttgatttccatctggagtcactgccacggcattcactgcaccagtatgtccttcaaacgttttgagtagctttccagtagcgagatcccacaccttcagtgtttcatcgtctgagcctgaaataatctgttttccatctgagataatcgcgacacaattagtccagctggaatgccctttgagagttcggaccagctcaccattcttgagatcccatactttcaacgtatcgtcatctgcaccagaaatggcttgtttcccatcaggcgttatcgccacacaattgattgatctttggtgtcctgcaagagtccacattaaagggccatcgggttgattgaaagtgggccattcggaacggagctgaactcgattgtgtggtagactctgaaatggtttaaaaacgggctccgatcggttcaacaacctggcttgaagctgttctctcaatacctcgggatggtcgcgcaaaatatgttttgaaagattcagggcggccctgattgtttgggtgttcggggcggattctttattgtattcctcaatcaatcgatcaatgccaacttgatcgagttggtattcgatccaatcggggtttaaatactctggctgattggcatcaaatttaggagattcattttcggcagggagtgactgggggtctttaaggtcttgattctctctgcttgtcagttttttttgtggtagagtttcgtctggtggatctgctggaggatctaccttgtcgcaagagaacaaaagcccgcagatgaagagtaagcaaatcccgatgatcttatcagttacattcgctatcaatagattattaaaaccagccattggtttaaccttttcaaaagttagaagaccctcttttaaaatagtgtaaaggggtggtgttctgatgtcaactttgcaatgtagggggaaactatgtattcgagcgttacttgcaacggtatcctccagtgaggcccagctatgccaaggacggttatgcctcaactcttcacttggttctacttcaagcacgtttccgcagcccatttggaagagtaccgtcacgccaactctaccgcgtatgtcgccgctcaagcggcgtatgaagagacgaagtggctcgggtttgccgatatggagtgccaccggcagagcttcgaattgttcaaggaacactggtcacggttctgcaccgaccacctccctggctcattcgcccagcaacttgctacaaacatccgcgagggaacgttgaaaccgctgctggacaatgagaagggccgctctgcggaggagatcatgactctcttgattagcaaagggctgcacgtagcgggatagtgtcagaaatagctcgacgaaaaattcagattgagccgaaggcgatcgaaccgcttagagcctcgattctgttcgtggaactcatcgaattcaggatactaattcaaaacgaatgtttttgacattgtcgcgactggcctcaaaaatggtcggccggagatcgagcccaaatttttttaagattccacagatattccaccaaattcccgccgcaaaacctctgtggccatcgtctttatggttgtgacttatttcgaaaccaattctgttcaacccgactatctcctcgttagccaggttcttgctggacatcgcgatgtttacgcccatctcgtccgtcgctacgaacggcacgtccatgcggctgcttgggccattctcggtgaccaccaggccgccgaggacgtaacccaggagacgttcgttaaagcctatgacaaactcaacaccctccgaactccccgaagatttggtccctggctcatgaccattgtccgccgcacagccaccgaccttgcccgcactagaaatcgccttgttgtcgtcccgaatatccgcgatatgcccgatgaacgcgatatgcccaatgaagaagacgccgcccatgttctctctgctctcgcgggcattcctgaccaagaacaacaagtgattctgttccgctattttgacgaacttgccgtcgccgacatcgccactctgctcggctgtagtgtcggcactgtcaccaaacgactatcgcgagcggtcacacgtctacgcgaccgcctcaaggagctctaatgaacacacccaatatagaaacacgactgaagaatgctctggcggcgtccatcgctccgcactccattgtggatgatgtcatgcatcagcttcccgtatccatcctgcagcccacgcctcgctctggttggcgacgtcctgtcattgccgccagtcttgccgctcccaccgtgatcatcgctgcactagttttcttcttcatcggctcggccgcccgcctgaccctggccgacgtcaaagccgcagtcgaacagcaagcgtgggttcatatccggtacgatgtcggtccgttcaaagaaagatggattaacctccgaaccgatgaaacctacgctacacttaccggcggggatgtcgtctacgtcaatatgcaagccaacactcgtcactggtattggaagaacaatgtcgtgatcactcaggactcgccagtgctctaccctccgggcaaaactccgcctccgtggacccctaagaccgcttgggagcaaatcgttgctcccctagagcagggagtggcaaagaccaaacgcgataagtcatcccctccggctttcatcagctcgcaggattctcttgacgggaagccccttatccgcttcgatcgctaccgcaccgacagctttggacgccgttatctccacacccaactctgggccgaccccggcacccatctcccggtgctcgttaaaacccacctccaactttcccaacgcaaagcgactggcaaagagtggagtaccggcgagtacgactttccagccaccggcccggcagacatctacgccctgggcgtgccccgcgatacgcctgtcgatataaaggtcaacactgcacccgcccaacccgtcctcaaagcaatcaaccgggcccacgatggctttctaaaaaactaccgcgcaatcatctggaccgagtccggcggatctgacaaaccgttcgacggactcgatgtcatctggcgggagggacaaaagcttcgacaagaccaccacctccccgccttcgagttgcaagaaaataacgcgccccctcttccgcagcccgaccccgcggccctcctcgcatgggctactcaaactgaggcgtccgtaaaacaactcatggacagtcaacgcgaatatgtgtggcgttccgctgccgtcgcacaagattcagagccacatgtacacgtcattgcccacgacagattccccctccttgaccaaaatgtctggccagagcgtattcaatggccgactcggtattacggcgacaatttccgacttctcgacgcaaacgtgaatacccccgacggttgcatcggtctccgcagcggcggggtgggcaactcccggtcggattactacgtcgatcccaagaacgattacgtgtgtgtgaagcagatccaatggacaaaacgcggcaccgaatggtctaaaaaccgcgagtacacactatccgacctccatcgcgtcgcgggccgcgttgtagcgggcagccagcagttctacggctttcccgatcccgccaagggcttgtcaggtagcaaatcaaccctattcatcgacgtcgttccgctcaacgcaaccgattatccgcccggaatctacgacccagccacgatcacaaccgatgccaaggtcgaaagtgactagtcgcatcacgaggctgtcagacaaggaaagaaccatgtactcaaacgaatcttggctgcgcactgatcggggatttttcgaacaccggcatcaacactgccagtcggctggtcgtgtcgttaaactacccatttaacgtttcccggcacggcttggaatgttttgagaaacagtctttggagtattccgggacaggaagttcgctaaccgcttcaattcatcggtttggtgtcgcctcaacctaatatttgtagggacggtattactgcgtttcaaaaggccaaggggctttatagccggaattactccagttttctaaacgtccgaatatttccatttgctgtttgtattctgctgtatcgggtggtttaaaactggaaagtttaagaataaatcacgagtgagaacaggggcgggactcgctttgtacatttcaagttttgaagaatccccgcctagaaaaaaaagagggccacttactcgcgatccaatttgagtcataaacataggcatgcgataaccatcaggactatagatgtcagaaccgtagaaaatataaccataaatagatttgccatagcccatcgggccacgtacccagacatgttcatgctgagattcgacattagcacggtaccacttactacattcggtttcttcttctgagcaagatgtcagaattcctacgatgcgtaattcactgtgggacatagaacaggcagcacacttaaaccatgtttcatgcccgaaaggaaagaacaatagtatcaggagtgaaaatgcaagcaatacccaccaactggtaggccagcgttttcggcttgatttatcaggcgctgtttcaggtttaacaactacatctgtcatgcgaggcctgtgcgtcgatgtcaatgtcatctagaagtagccactctgatttcacacgtaatcaattaccaatcattaatgtatcctagggagaccgttttatttatctgagattccccatatggctcagcgtggaaccgctccaggtatggatttcctttgattgtaaccgttgcggttgcgcgtgtctaaaacaaagtgacttttctccactttgatgttcttccgttgttgaaatctggatatcattatctttctaatacaacaggcaataccacccagcaatgtctcccaacgggtgacgtgatgaaagcaaccgatgaatgatttgtccaaaaagtcgccacaacgcaacatcgatcccaaggttcgattgataatcggttatgtcttgttcgggctcggtaccattgtggcgatgccaatcgtgcagatttctcgctcgaccgggcggttcgatgacgttattgcgctgcaacagttcgtctggctcaccccgtttgttgtgctgattccatggcttgcaatttcaactgtaaaaactgcaaactccaccgttcaatttgcttgggcggtccttttattgattcttatagtcggattcaccgcattgatgtggtcgcaatggaatcggatctgaatcgtttgagatgcccttgaattcatcgcacttaattcgataatctcactgtcgggaaccggttatgttgaacgtgagcggcggtcgcaaaactaagccaactcatatttacagaactttccggcacttgaacaacttctgatcctaccatcgcggtcgctttaggaatcttatcaactcattcgtattccggtacgtgccttaataccacccatttagcagacactttatctcggccaaaggaatctgcgtctaatctctattgaaaaaccatgctggatttaagatcatggcggcattagaccactggtgattcagagtcagattcttattttaaatgtttattcaatacttgccccgtttggtgaatcaatcaccggtcggggctttatttatgcgcggacctcatttcagagattcgcgtttttcttttgtaggaaggatgaaatattcatcagtctacaccacctaaatttgagtccgggcaggctgtgattaccgccaatgctcaaaggattcttccgggagaagaagtcctgcaggccctctctcgtcatctgcagggggactgtgatccgactgacgcggaagagaacgaactagctttactgaacggtgatcgtctcttttctgtttaccacaccaaagaggtaaccaggttttggattattacggaagcagagcgatcgacgacgacggtcctgttaccagaagattattgacctggattgcccctaaatttgcagtgaaatgaaaactgagttgaattggatactaaccatatttttgacactgacactgacactgacactactactggcgtgcctggtgaccctgcgtgagcgtcggttgcgcagggctctgcagcaggttctgaaacacattctcaagcgctggaggccccatgattcgggaatgaaaaacgctgactctgagcatcctgctaatgcagaccatggtcgggacagcctgcgaaagtgaagatgagcgattggcgcgactcgcaacggaatatgcagaccgccaaacagagcagggaggccgtgtgattaacctacagcaggaactgatgactggttcccggctgctgattgaggcggattccagagcccgtactgagatgattgatctgcactgggagattcaggatgattgcaggagtctggatcagcgttacgatcaactgggggcagaacgacgttccgttgaaagtaatcgctactgggccccctatctcatcgatctgacgcggcggatcctgctgctggtggcatgtctgcttcccttagagggaagggcagtatcgaaaaagacaaaggctacccaataccgggtggccttttttagctatcagagtaagtgctgattctataagtatgtgctgaaatgctctcatcgatgttcttaagtgtgaccggtataggtttcataatcctgaattgacaggaaatccacgccagacgagcgtgtggactatatcaggcaatgagtcgttctaagtctgatcggggaataacataatgatgcgtctgagtaaatttctgatcgatcctaaaaacaaggttagtagtttgtaaaaccaatttgaagaattaggtttacactggcagcttcggcagatcattttctgagcgtgggggcctacattatatcaggactttttatgcgcataaaaaagtcgcagaccgtttgtgcgaactgcgactggtcgccctgtgaagagcggtgcctacgaattttttgcgatgaagcaatcatcttgttgcgaaaaaatacgggcaaggatcaaatacactaaaactaaacatacgcattgacaatggaaatgtcaactagcagaatggatttatgtgcgccttgtccaatcaattcacaacagaacacaaacagtactaacacaaatcaattgatcatattgtgttctggacacttgactttattcttggttttaatatactccccttcaggaaataagcgaaggggagttttaatgtgagctgggcttggtgccttggccaccttgtcaagtgtgcataagcggggttcgaatccccgtcggtccacaattatatcactcttcaaacagaaaagaaacggtaaagtaacaggaattcttctgtataaattagcacagtaaactcttatctttttatgagacgctcatgacgatcagcctgggactcgacattgggaccaactcggtaggctctgcctgggttgatacgaaaaaaaaagccattcaactcggggttaccatcttcccggcaggggttgaagatagcgacaccaaacgaggcgaccctaaaaaccagaaacgtcgcgaaaaacgctcacaacgccgtagcatcgcacgtaaagccaaacgaaaacggcaactgcgtaaaactctggttgatctcaaactgctacctgctaccgcagaagaacaaacggcgatttttcatcctgagaatgttgaaacggcaaaaagctgggacccctggaaacttagagtggtaggtctctccagagaactgaccccttttgaattcggaagaatattgatacatctaaatcaacgtcgaggggctctaggtgttgatgcagatcctgacgatcaggaatcaggattagtcaaagcggccattagccatactgaaggagaaatggaaaaacgtggttgcaggactgttggcgaattaatgtatcaactgcgggaagatcgccagattccaattaaaaaatctaaaaatacctctcattcatcatacccggtctcaatccgaaataagggaggtgagtttgaattccatgcaactcgccaactgatccgaaatgaattcttactactctgggaacatcagaaatcatataagggaaaactgtctaagcttctgacaaagaagttactcacgattttggaccatccggaagcagattcaacctggcgtcaccagggtgcactattcggacagagaaaaacatactgggattccggaacgctaggcaggtgcagtctggaaccatcagatcatttatgccccaaagctgatatgtatgcttctgaatttctggttttggaaacagtcaaccgtatccgcattgaagaacggggcaattatgatggtcgaggactctctctctgtgacccatcaatgaaagaaaagcgggatacagtaattcaagcacttcggactacgaagactcccacgatcgccacgatccgtaaagctttgggcattcacacaaaagaaaacaaagtcttatactcactcaacatagaacgcgaacagaaaccggaattaaacagtgactggtttcatcgagaaatcgtaacaggtgtctttggtgaaagagagtggaatgcattggatgagcggcaaaaagaatccatcaatcgagccatccaaaaattcgacgatgaagagaaactaaaagagggtgcttttcaatggtggggacttaacaaaactcaaatcgaaactctgctcgctgcctggagtcaccgccccaaaccagataaacgtctgcgtctctcccgccgtgcgatcaagaacctgctcccttttatgagagcaggtgacgatctcacaacagcaaaacagaaatttggttatcccctgaaacccaggcagttgaataaagccgaccgccattacatggagaagcactcaaattcactgcctcccgcccccatgtgttcaaatccagtagtaaggcgtgccattcacgaagtgcgcagacatgtgaacgcctatctgaatcacttccagaaactgccggaccggattgttattgaatatgcacgcagtgccacacagtctgcgaaatcccgcaatgatcaactggccttcaaccgcaaacgagaggcagaaaacaaaaaaattgaacaggagttcaaaaaatatattggcgataataatccggcacatcggatcgtagaacgcgtacgactctgggttgaacaaaaaaagaaatgtgcctattccggcaaactgatcgggatagagaaagtaggattcgggacagacctggaagttgatcacattattccccgcagtcgaggcggtcacaatggtttcagtaacaaggtcctctgttatcgagatacgaatcggaataaagggaatcgaactccgaaagagtggatgtcagcagatgactttgaagctcttgaaaagcgattcgaacatctggcaggaaaacaacgccagaaggtcggcgtcttcgaatgtgttcccaacaaagccaaatgggataatctccatcaggtcttagataattttgatctcaaagaattcgctaactcacaatttacagataccgcgtatgcagcaaaacaggtggcaacttatctacgagaggcgctctattccgattcggaaaactcgaaatcacagaaacaaagaattttcactaccaaaggtacgatcacagcccgtttgagaagagactggggaatccttgaggaaaatgagccgttctttgcaaaacaaatagataatgaaataccgcagtatccgaaatctcgaagcgagaaaaaggaccgttctgatcatcggcaccatgcaatcgacgctgtgatgatcgcgctgtcatcacctgagcgtattgaagagatcatcaaacaggaagaagctgccattgaatacaaagaacggacaggttatcgcccccgacaggaagtaataaaaccaccctgggacctacgcaatcaagtattggatctttctagaaaccagatcgtagctcaccgccctgttaaacgaaagttaaccggtgcgttacatgaagaaacgatctatggcattgctgatgaagaaaataagcttttcacaattaagttgccagcggaaaagctcacgtccaaaatgttgcgtctaccagaattgcgggataacaaagagggtaaaaaacacttacaggatccttcactgggaaaaggaggactggtacgcgactggaatttgcgaaaagtgattagagaatgcttaactcgaaataacatcgatcctgataacttttctaaaaaagaaatagaagaactagccaagactggacagcttagaatgcccagtggagtcccgataaaatcagttgtcgttctcagaacaatcaattccccaatcatcattaaaactcccagcaaacctccacgcgtttatgtgggaggtaacaatcaccacctggaaataatcgaagatgaaactactggaaaatggagcggaactgtctgggatacatttactgtctctcaacgcgtgaatcctcctaaacgaaaaggaacaaactctaaacttcccatggtaattggaagagaactcgaatccctgaaacaggaagatcgtttaccaaaacagttacagaaatattatgagaataaaacttttgtcatgtcacttgctgaaggtgaagtgatttttgcccgtcggaatgatagagagccagactctcccgatgccatagattactatgtagtagtcaaactggataaaaaacgaatcttctttgctcaccactgggatgcacggcgtgccgatcaacaagatcgttggggagcatctttttctgacctgaaaaaccttggaccgaattccgatcaacctccatttaaggttaccattgatcccctgggggttgtcagaagaatcaaagattaattttttctgataaaatgctggcttttgtactcaatcgccacttacgatttaaacaccagtatattcatggattgattctctcacgcagtgaatccacggagggcttcttcggcttatttttccgaaggtgcctgtatgttaaaacgaacgattgaaatctcccggcaagcggcccacctgaccacgcggcacaaacagctgcagctcaagcgggaaggagaaattgtaggctccgtcccctgcgaagatctcgcgttagtgctcgtcgatcatccgggcactacctacactcataacgcgttgacagccctcctggatgccaacgcggccctggtgatctgcggcaaagaccatctccccaaaggcgtgctgtttcccctttccgaacacctggaaattgtctggcggatcgatgaacagaccggtgtttccaagccggttcgcaagcgactctggaaacaactgatccaggctaaaatcagagcccaggctgcgaacctgactgccggttcggttccccataagaaactgctgaattacgcgaaggaagtcaaagccgacgatgccaccaatcgtgaagcggtggccgcccgtctttactggtcgagttggcttgtgaactgtgaagcgcccgactcggttgatcattttcgacgcgaccgggacggcgacgcaccgaataactttctgaattatggctacgcgattctacgggcagcgatcgcccgctccctggtttccgcaggcctgctgcccgcgatcggcattcatcatcggaaccggtccaatgcattctgcctggcagatgatctgatcgaaccgttaagaccgctggtcgatgtacgcgcccgcgcgctctacttctcaggtcataccgacctggaccaggacagcaaacagctcatgcttgatctgttgaccgaaaccgtcagcaccggcgatcagagcggaccgttgatggtggcaatcaacaggatgaccgcgtcgctcgtgcattgttttcaaggaagccgtaaagaactggagatacccgtaccatgcatttcagcggataccgaagcatgtggatcgtagtcatgtttgatctgccgactgacacaaaaaaagcgcgcaaacaatattcccgcttccgaaagatgcttctggaagacggatttgatatgatgcagttctcaatctacagtcggcactgtaccagcgaggaaaaagccaatgtccatatccggagaattgagcagaatattccccccgacggcgaagtgcgcatcctcagcgtcactgacaggcagttcgaaaagatgcgcattttctgggggaaaatgcgcaaaccaacgaccaaaccacctcgccagcttgagtttttctgacgctaaccgacagcaactcctttccagtgaacgatttgagcaggaaatagtgtattcgatccttactcgtaatcaatccgcaactagcttcggttattagattacctgccaggaagtgtattcgatccttactcgtaatcaatccgcaaccacggctgtaaagatgcgaccaccgacgaaagtgtattcgatccttactcgtaatcaatccgcaactcggatatcttcgacctgaacgaccacgatagtgtattcgatccttactcgtaatcaatccgcaacgacgactacgtgatttacaacctcgacggagtgtattcgatccttactcgtaatcaatccgcaacccttcgtcagctaaggctcctagctcgctaagtgtattcgatccttactcgtaatcaatccgcaactcgtggttctgggttcccgaagaagcagtgagtgtattcgatccttactcgtaatcaatccgcaacatcgggtccagctgtgattccagacgcaggagtgtattcgatccttactcgtaatcaatccgcaactccacagtcggccagtgtgtccgctcccagagtgtattcgatccttactcgtaatcaatccgcaacgggggagatgggaacctggacttcacagaagtgtattcgatccttactcgtaatcaatccgcaactgggctacagtgccggtctgcatcagctgaagtgtattcgatccttactcgtaatcaatccgcaactgcttggcttcggttgcgtctcctccaccaagtgtattcgatccttactcgtaatcaatccgcaactatcacaggtgagcaggttgagcagacgctagtgtattcgatccttgctttgaatcaatccgcaaagtctattctcaataatttctgtcttgcaactatgtgcgaaaggttagaagagcattttttatggttatccagattcagttcttcggagttcctatgactttaatctggataatggttcagaagcatgtggggtaccttatcactgggtgacaatacattaactgagtctttcagctcagttctggtgtttggtctcatcgatcatagtaggactggttgtgatttgctctttaattgcgaatgtatctggacaaaatgttagactgttggagatttgcattgaaattggtcccacctgcaatggttttattaggaagttggtggttatgctttctcttcttttatcaatcacagggatatgagaatcaatggcttgtttacttccgaatgttggctcgattcagttctgtgacggccctgagttcatttcgaagagtctggactggtgggcttacttcaacaaagtgactctggatttcagtcgactgggaaaaccaaccgacaatgcgtatattgaatcgttcaacgggcgagttcgccaggagtgtttaaaccagcattggtttttaagcctggcagacgctcaggaacaaattgatcagtggcggctggactataacgaaaaccgcccgcacagctcactgggaaatcagaccccggtggagttcgcgaaaaattcatccctggcgcgccagggatgaatttaacttggatctctaatattccaactggtacagagttgggggcaaggtcaagataaccaaatactctcataacgactggtacagaaatgggggggctgccaatagaacaatcgtttgaagaggtcattgcacacagtatgctaaaatttcttaatatttactcgtaagacttataacgctgttcgataaatttatgggaattagtcacttttaaaatccctgataaataaaatagaaaagcgactaaggtcaagattgaaaaaagtactattaactttgctttcattatttaggtacgacttttagcaggtatagcaaaatctcactttagccatgctaaattcttcttatccaactgatgcttcaaatcacaataaggttctagtaaatcgcgtgaattctcttttgcgcctgtgatggtacaaaatttcatgagcaatttgatgggagtattatcttgtaaatgccatatttgaccatctacgaatacgacaaaaaaaccactataatcacgagatccaaagcctcctggaacattgaatttctcaggaatattttcaacattaaaatctccgggctgcatccaatgtgtgttactttcaaaaacatctgcaaacagaatcagattatgaggtagcaatttggcaggtgtaggatttatctggtcaaatgcggtatcaggaccaccaattgcaaatacgactgattgtgtatttccttcaagacaatatgaatgtggaatatgttttctaactgactcatattcatccgccgtccagagcagatccttcgggagtggatctggcaatgtcaaatattgtgcaaacctccagctataaagcggatcccctttctcatttctccaaactaaactgggaattggttcctttccttgtaaaaacgcatctgaatctctagaacgtgaaacattaacaagggtgtccatgcgatctaccactctaaccaagccataaatccgatctaccattctccccttttcaagataaatatcaacaactttataaataatatgaaccactagcgcaagaggaaccaaacaaaataagtaaatcgaaagtcgatttctttttttcattgaacttcctccaattttagcaaatcaaaaaaatacgtttattaaaatccgtatcttcccttaaattgaatccagtcatttatgttatactctggttttatttcaactggaacttcattgctttcacaaacaacacaataaacttttgcgccacctggagttgatggatttaagtcggccttaggcgcaaatgatttttttatgtatatatatgaacttgaatctctctcggcataattcgccccccaaaatgcatcaaaggtaggatcataatatgcgaagtcatggactccatcacccagcccaactacagtttcatctgttataagatcaccgaaagggtcaactttgttgctccatataatttttccaaaatcatctgtcttaagcacttcagtctgattcctatttttccaattataaccaaaaatgcctgatcttgcagaggtccctctattgtttgttccagtgcacttcacgtttttttgtgctgctttagcattttctaatgtcgaataacagttaagacgtttgccagacggggcattactagctaactttttacctagcaataagctagtaactccttgacaacctagacctagttcacgtctggcatcctcgttatacgcaagattctttaaccgaggattcatccgacataattgactaaaacatgcatcaaatgaagcttttccatttccaggaaatctatattcactgtctttctttagtgcatctttcactgaattttcaaatttaatttgtctagctcgttcattatgttcaaaccagttcgcaagttgtccaagaccggttccatattcatgatttccgtatgtgtctaatgaacccagtggattatcacttacataaatatagagattggcgccatctatatagcctagtctgtcacgttgaatccaacatcctaagactgaatgataaacacggtttcgaacatgaaacagttccgaagctgtttcccaacgatagcctgtaaagagagtatcccagtcaaaactggagttactccgggaactaaagctgggagtcaaaaacgtaggagcaccatagctatcgtatgcatatcgttcttgaacatcgccattttcatcacagatcgccgtcacattccagttgccatcttgtaatgcgtagagacgttcatccagggtgccatcaccggttgtatcacgatcacgtaacactaagtcatcaaggtagcgtaagccccagacatattgacgttccggactggattcgctgtcaatccgttcttcaatggtctgccaggaatcggtgtaatagaagtgacgcgtttcactcaatacgccgctggtgtaggatttttgagtgatgcgaaaattgcggccatcatactcgtattcagaaacagtatcgcttccatcagtgattttgaccagacgattccaagcatcgtaagttgcaatgaaactagttgtcggatcaacggaccgtgggatcgttgtcatattgcctgctttactataggcaggagtgatccaacttgaacctgaggattctgtaatatcggtgatctcattgactttgttactagtacgggtctgttgtagattccaggtcccatttcccgtatcatcctgctggaagcctttccagtttcctgtttcatccagcgaccagcattgcgcaaatttcagcgtgccgattcccgtcctctgggcgttcagcgcgccgcgttccgtttccttcaaacgctggagtccgtcgtatgtgtaatattcatcaaagctattggtggtatccaatcgattgtcacgataggtcagatttgaagcccgatcatagccgtactgaatattagccctgtcgaccgaagcaccgtaatcataccagagactatctttagtacgcccaaaacgatctagaccacgatatatgtctccagtatccggatcattgcctcccgtcgtaccgaccagcgtgaatctgacatcagactctgtatcatcggcaatcacaggaccacccaaacccagataggaatactcaacaagatgggtcatactgacgtcatcgtcaataatcgcaaacacacgactggttgcatcatcgatactgcctgccgagctataattgagcgtcaagacacgtccatcaggataagttaagctgttatggcggactgtgttgtcgctgccattggcaaaactgtactggacttttggcgttgttaacacattcactgctcccgaatgtgactgataactggttataccctgcccgaaatcattatatacaatctgagtagcattgacgatagttccttgacctacggttgcattatcgtagctgataatatcactgacgaggctacgtgaatcaaaggtcagcccaatacgacggacagctccatcaacgctcgttcccaaagtcgttacccggtcttgtgttgggcgtcccaatttgtcgtaatcaatttcatgaatggtaccagacagttcagtttgtttaacaacctgtgcctgtcggttatatgtatatttaatgacatcattcgcgtctgtcgaatcaggataggtttctttttgtaataagacgctggtggctacttctgaatcacttagagtggtgccataggtgtatgttgtgacttgatttcctgtcacagaattttcggcagttaaagtggcgattgtaccgtcagatgtataagtcattgttgttgttcggttggcatcatccgaaggagtacagcccgatgaactactcgaactggatgaagagctttcctgataattctcaatcagttttactgagcgccctgcagcatcatactcttttctcgattccatcatatcaggaccaatcagtagggatggacgccccgcagcatcaaatgccgttgttgtcactagaatagaatcacttcgagttggaatcgtagtagaacgcgataaggccgtccccccgttcgtaccataattcgccaacgccaccgttcgccccaatgcatcagggtaactcgctaaataaatgacacgtgcttttggtgtcgtactcggatcctgtaatgcacctgtctgactggcaggcgcatcgtgatatcgcatccgtgacagagattcgatgacattgcttgcatcgtcaaaagttgtctctgtctgttctagaattgtatcacccgttaaatcgctgatttctgaataactggtttcgtcgaggtcatagccgatgtattgtgccgttgatcgccctagactatcgaaagaattcttagtaaacaaatcagagccagaaggtaactgcttgattgcattccctgcaggatcataccaggtattgttggtgaggctatttcctacagtgcctgtgctcggatctacaccgtacccgacagtctgataaacgcgccctaaatcatcaaacttcgtttcagaacgagcaatcagattaccgactgacgtggtgtcatatcgttctgattttgtaacgcggtccagattatcgtaatagaatttttggaagaaatcgatttcgccatccgtgtctacgtttcgattacgccaatcataggtgaatgacgtaatacgggtatctgatgctgcggcatacgcagtctgttgagtcaggttattgtcaccaccagcggttccctcgtcatactcaaacccggaaacttgtaccatgttatttcccacggctccgcctcctgtcggatcctgacttgtcgctcccgtgtcatcagttccaacaaatgtcttaatcacatttccacgcacatcgagtacgttaaatgtaatcgttccaccaggagtttctgttcggttttgacgcttcatcgaatcataaccataattagtctgatcgtagttagtttctgaagaaccacttccagaggtaggaatcgtgtgataaacgcgagatgattccaacagacaacattcagtgtattgattggtcgtccaactcacataagaggcttgcgcaaaggtatccgttggtaataacttgccactagtcgatgtacgcgtggcttgaatactttccaaggaattaccatttttatccaacttgagaatgctgactggattgacgagagtgtaggtgtagctaggtgatgttcccgtcgcatacccttgtccttgccagatttgactttcctctgaatcggacttgtacacataccaagtgccagttcgaatctccgttgccactccttccaagtcgatggtatgagtggggcccagttcttgtgtaatgcggccttggtcatcgagctcataatctgtgactaaattgagcccaccacctgaaggagttacccaacctgcgggaacaccagttgcttcacccgtatctacatcttgaatctgctgggtaatcgcacctgtcggaatgtcgtaaacgttttggttgatataaccccgctcatccatcgtccaggttaaatagccgtactcatcgaagtattctttgatagtattagctacaccggaaccgttttgactggtggatatgacaggaagtgtagtagttatttctttgacctgacaggttccttcataccaggtataggcatatgaggtgatgatttttttcgtttgatcggtttctgaagggtaagatacttctttagaaagaaagtaagcagttcgactagccgaagaagacgacgaagatgatgaagaacttccaccaccgcaggcaatatattcccgttctaagagcttgatggaacttcccagttctccttcctggatattgctggaagcaagccaattcgtagctgcatgataggtataggtacgaataaggcccgtagaatcgcgcaagtattgataattgccactgacttcatgcagcaggtcggcatattgatcatcgtagccactaatggctgaggaactggcttgtaaaattatatttgcggaatcatcgtatttgaagaattcataccattcatcctcgcctgactttaggattttgagcatcggctgactcacatagtttgaataaactatattctggctgccgtcgggcaatgtttcggttgttttggttttccaggcgttgtagtcatcatcgaagccgctttcctcgtaactgaacgtgaaggtgcgcgagcctccctgaactatttctttggtcactcgatgtaactcatcaaactcaaagtaatagtcagcatattgagcgacttgcgcgtcagtggcggtgagtggatcagaaacattgggatcagcagctagtttgttatacgcctctttattcaagatatattttggttcatggacaaaaccttggtctccagaagaactggaactgctggaactgctacttgaaagacctaaggatttataatatcgataataattagtgccagtatcctgccagttgtttccatcccattcttgagtggtggctgtttttagatcttcctgaagcccataaggttcattttctccataatacgcatagagcacccgtgacaccttttcccaggaacctgcgccaacttttcgagaaagtacgacgctggaaaggagcagatctccttgattctcatatgcgtattcatacttctccgttgtggttagactgttttctatgcactcccgttctacggatgtgaaattggaaccattactgctcattccagttacagtaattgtatttccggcaggtgagatctggcgataaaacatgccggtataatcatcaaactcagtgatgttcccctttaggtctgttaagcggtagacctgatttgcagtgtcatgctctaaagttgatttcacatttaaacgggggacccacactccatccactttatcaaaccagattgatgaattactggtcccctgaataacgatttgtgttatttctgttgcaaccaagccagtaggaccttgaaccaagaacggccactcttttacctgccagttataaccctggccgatggtttcagaat

SEQ ID NO: 599 - DNA, 23474 bp, synthetic construct
  misc_feature 1..23474: note = Synthetic
  source 1..23474: mol_type = other DNA
agtaatcccaacgggaaaaccacacacgattcttctccagatcaagaatcagaatctgaccatgttgccaacctgctccacggtcttgagccacataccaggtctgctttgactcgtacacactctgatactcgacttcgctgattttgtgatcggggcctcccccggctgggtcagcgctcatccctttgacaccaaaaccagcttgccaactgatttcatcagggaccggtccacctttccatttcagttgttcccacggcggtggttctgccagccattgttccagcgtcgcatgatctaagtcaaataccagatggaattcaccatctcccacaaagtccaaccagatatcaccggcagaaactacctgcgccgcagcaggccaggccagccccgtgtaatgcgtgaagtcagccccgggttctgtcacagcgcgacgttgcggcccttctggccctccgcagccaacgagccagatcccgccacacaaaacgcataagaccagcacgattcgacggcattgcgggggagtgtattcactcatggatcaacggccagtcataatgaagatagccagccatgtcgggacggtggtcgtaaatctcaaatcgatgccgtaacttcacagtcgctaaaacatcggaaacaattttcgcttcgcgcattaattcttcagcggagtcagcgtctgcacaaacagtcggcttacccagatcacccccatattcttggaatgaaaagtcggctcctccaccaattccgatctgaatcgaatactgtcccacatgcactcgcagaccagcctcctgcagaagttgagccatcacagttttcgtgggccattcggcaagttcacccgcaatccaggctgatctgtccatgctgatttctcgtcccgcgttatttcacccgaaccagtttcatcaaacgtccggaaacgttccagtcctggacatacaggttgccctctttgtcccagtaggaaccgtgggtgccgctgaagatgccttcgcgccactgatcctggggcacattgaaattacgatgcgttttaggatcttcattgttgcccagcaccgcgacgatggtattggtcttgtccagaatcaccaaccgtccgtgcaggtcgggaaccgaaacgtaatcgccctgaatcgaaactgatgtcggcatgcccagtccggtaatcacttcttcaatgaagttgccgtccagatcgtaatgcagcagacgtcctttgggcatatgattgcggtcgcagatcagcagccgcggcgggtcgtaacgcgtatccagcgtcatgccatgcgcggtattgaattccttcaacccgtttcccttcttgccgaagtgagatttgtatttgccattcttgtcgaacttgaaaatgtgattgctggcataaccgtcggacagaatgatgtcgccattgggagccacagtaattgccgtcggagcgaacttcttcagatcgagccccgattctttcgggaacggcattttgagaatcatctcacccgtctctgcattgaacttgataccctccgcgttcgcattgcgggcgccgtaaatgaattcgccatcttcctcttcgcgaatctccatgtcatgaatgttggaatattcgtcccccagaaaacgccgcacgacttttccatcaggtgaaaagacaaccacaccgattttggcgctcgtgtagatattccccgctttatcaatcacaacgccgccgtgggttggtcccaggaccgaacgcccctgctcgtcaaatccccagccgggcactgtatcgaaggtcatgatcccgctgcccatccgcactggttcgactttctccgccgccgacagcgagacagttacgctgaataccacagccaccgcaatataattcaagcactttttcatagtcgaatttcccattgattgaatgtcagagtggaatggcgggccattctcaaaagttgtaagtaatgacagacagcaaccatacaacgccggttgccatcccttccagtatccctctccgctccccggtttgcaactaatcccgcccaaatcggcattttcggggcatttctgtttttttctcaaacagcctgtaacacatttcgcaggccctcgcttggtagtacatgcaggggggatgacaacctgccacacaacggtgaatcaatcgtggaacagattcacttcaccataacagaagcaaattcaggagacagaacaatgaaacgtatcgcactcagcctgatgattatcaccatggtcttcagcaccagcctgttggatgttgaagccggtaatcgtggtcgctccggtggttcaaaacgctcaggcggttccagcttttcccgctcttcacgatccagtagcttttctcgcggcaggacgcaaagccggtcaccgaaaatgcagtcgtcgcagcgatcaacccggaacttttccaacgttcgtaaaagcccgacgaccattaaccgtaaaccaacaatgaacaccattcgggatcatcgcactcccaccatccgtgatcaccggaccggcaacaccaatgtcatccgcgaccatcgccagatgagcgtcaaacccaaaagagtgagttcggctccacgaccacgccagacattcaagcccatcgatacgggtattggaaatggtaaaccaggtacaggcgtgattcgtcctcgtcccggtaacggcgctcccaaaccacgaccttcaatcaaaccctttgacccgggtattggaaacggcaaaccaggtacaggcgtgattaaacctcgtcctaaaccaggaatgggagcaccaaaaccacgacctcggccccaacctcccgttggtaacggtcctcccaaaccacgtccgcctaaacccaatcccggccagggtcacaacggacacggtcatcacggtggcggacatcatggcggaaacaatggcgggcaccacgctggtggtcatcacaatggacaccagcatggaaatcacggccatcactggcacaatcatcgtccccggttttcctggtggtggtacaactactgcacgcctctgcaaaactatcgaccaggcaactaccagtattgcaactacgtgtacccgacctgcgactatgtcgctcccggcggtcagatcatcgaagacgttcgctggtacctgggaatgaaaggattgatgttacccggtaaaggcatcggcatcgaatccgttgaagccaattctcccgctgatctgaccggactcaaacctggtatggtcatcacaaaatgtaacggcgtcgtcatcaccgacgacaccacattcggacaggtgatcgcagaatccggcggtgtcctggaactggaactgctcgaatcgatcgacggtcctcagctcgaagcaaccgtgcagatgacgcgtctgccaaccgcaaacttctagggagcaggcaacgcatgatgcaagcaaccccgtgaaaacgtctgatgaggtgcaaaccttgtcgggcgtttttttgttggggagagagacaacttacaattcatccactcgatcaccgatcattttgatttttctcaagatttttctgtcgaattcagtggattgctgcggtgggcttccgttttaaatcattgagactctcttaggataacccgctgtcttgggaaatccggttgatcaactcttttgtagggcgggccttcgtcattacaaaatcaaccacgcgtctggtggcttatgtcgctcagttcgaaagaactgcgcgccagcaactgcacgcttcaggagaacacatcatgctattcccaaaatcacatcgccgtcaggcatcacataaagcatctcattcttccgccattgaacatctggaagaccggcaactgctgtcagccatgaattccctccccactgagatggcagacacaaacgttccccagacagagtccgggaccacacccgaatatgcgtcgatcgacgggaccggtaataacgtcgacaacccggaatacggcagtactgacacagaactgttgcgtctggctgacgcagactacggcgacggccagtacacaccagccggggaagaccgacccagtgctcgcgaaatcagcaatgtcatcgctgccgcggatacatcacaaactaatgaccgttacctgactgatatcttctgggtctggggccagtttatcgatcatgatatcactctcaccgagtccgcgcacgatgaattcggtaatccactccaatcatatccgatcgaagtcccgaccggtgacatctatttcgatccagacggctcaggcgatgacgtaatcgacttgaaccgttccaactacgaggtagacgaaaacggcgttcgacagcagatcaatcagattacggcgttcatcgatggttcggtgatctatggttcggatgcggaactggccgccagtttgagaacatttcagggaggactgctggcaaccagcgatgggaacctgctcccctatggagatgacggtttctttctggccggcgacattcgcgccaacgaaaacgccgcattgacgtcgatgcagaccatctggatgcgggagcataatcgtgttgccaccgaactggcgctggaagatccaagtctgactgacgaacaactctatcaacaggcgcggcagatcgtttcggctgaaatacaggcgattaccttcaatgaattcctgcctgccttgttcggctccaatatcatcagcagctaccagggctacgattccaccgtcgatccgagtatcgccaatgagttctctaccgccgcctatcgcttcgggcataccatgctgtcgtccgaactcctgcggctcgatgagaacgggaacaccgctgacgaaggtaatcttgcgctcttgaacgccttcttcaacccgagtgaagtcgaaaacaatggcgtcgattccctgttacgcgggttgaccgtcaacctggcgcaggaaatcgataatcaggtcgtcgacgatgtacgcaacttcctgtttggtcctccgggatcaggcggctttgatctggcctcgctcaatatccagcggggtcgcgaccatggtctctcggattacaactcaacacgggttgccctgggtctgaatgccgtggagaacttctccgacatcacttccgatccggacgtcgctgctcgcctggaacaactttacggcaccgttgacaacatcgatctatgggtgggcggcctcgctgaagatcatatgccgggatcgagcatgggtgtgactttttcaatgatcattatcgatcagttccagcgactccgcgatggagatcgcttctggtatgaaaacgtgttttccggtgaagcattgaatgaaatcaataatacgacactcgcagatgtcatcgaacgtaactcggatgtctccgggctgcaggaaaacgtcttttttgccccaaaggtcatgcaggtcgacctggcggaaacgcactccgatgatgtatcagttcgcgtgcgaaagggtaacctcgaagtcatcgacaatcgcaccaggcaggtcatcggcagtcagtcactggacagcgtggaacgtctgatgctgacgagttccgaccccggttcgctgcgcatccgttacaagggcatcagcccggcagatctgcccggtggcctgattgtcgaagcaggcaaaggacgcgacgacgcattggtcatccacggcacaaaacagagcgatacgatcgtcgtgaatgaaaacacggttgaagtcaacggcctgcaactggaattcacaggcatcgaacggattgtcgtgcagcacaccagtgccgatgattccgtccaggttgccgacggagtcgacattgatgtcaacgtgctggacatcgtaagacacgatcgcaggcacgaaggacctcacagcagagagcacgcacagcgaccggacaatcaccgccccacccaggggccagaacggcacggcgctgacgagcgcgatacgaaacgagaccgcaacgacttcggcatgctggaccacgtctttgcctcttccgacctggggaaagtgttagatatgtcacccggaaaacgccgtcggtaacggctgagaattcaaattagaacacaacgaagccaggcaaccccgcgggagcgtccggcaaggtgcataccttgtcgggcgttttcaatttagcacttccggttccaggcctgtcactacacgaactgtgccgtcacgaaacagatgataaagacaatagtactgagcccgaacaacaaggccaaacgcacaacaaagactgatttcgcgcctgatagatgcagcagctttctccctgccgggtcctttacaaagtaatcaccaggctgcagcaggaagctgacaaaaaagacgatcgcgaatactgtgactccactaaggaaaccgaagataccagaagtgatgagcttacttagctgggacacggaagggtttgccgagtctccgccaataaacagcatatagaaaaacacacacaaagctgacagaattgccagactccagcagagagcgtagatgcgctttgtggtcggggcttgaggacgccccactctttgatccaaggcaattaaaacctggttggtgatatctgcaattgtaactttcactttgggatgatcgcctgccagatcataattattcgcgtagacagaatataaatcccacccttccgtaagcatcctgtggagggagatcaggccgatctttctgacattaaattcatttttgatataaaccgggcattcgaattccattccatttaccgtcccggtgacgtaagcttcgatttcccagcgcaatgaataccacatcacacctttgccataacgccgcgccgtgaagtccttcaaattgatattcaaatcggccgctctgaagaactccggggactgctgaaagtgatccagaatctgcgtccgaaaatgttccagatactgatccacactgttctgatcttcaacatatccctcgggaccggttacggtgatctggaaatcatcttgcagcatgctgagacctttatactcgattgatttttgttcacatcacaagcatagaagaccagatattactctcttctgcaaccgaaaaatgtatatttgatcaatacacatgccccgacaaaacacatcgtgtaaaatattcgctcctggccgaacctcattgccggtatcatctgtcctaccctgacaggaggcctgttcccaggcagtttacagatatcaaatacaggatcacaaaccatgcttcgcgaactcacacccgacgatcaacaaaccattctcgacttcgcgtatcagcgggaaatcgaaaacatgtttgtcatcggcagcttcgaattctctccgaacccgtttgaattcaacacgtacctgggttacttcgagaatgacacgctgatcggtctgggtacttacttcggactctggagtgatatccagatcaatgcgcaaagccgctctgtgatcaatgcatttgtcgatgaattcatacagagaaaactgcccgtcaaatatgtcatcgccatcaaacgctatgccttaccgaccatcgagcggctgaaaacacatggcagggaacctgaaaagatcaccgcacagactctgcggctgctgaaacaagaccggttccacgaccaatccaccggagcagaaaccagagcaacccaccaggagattgatcacatcattcgcctcgaacatctcgtggaagagaatgaagccgacaaagaaatcactgaggtggaacgcacgcgcattttccctgactatgaatggctgctgcacaaagagggacaactgatttccaaagccaacctgcacggcatttcaaaaaactttgcccagattggcggcgtcatgacgcatccggcccaccagggaaaaggccatgccagacagatcgtcagtgccatcagcagacactggctcgaccagggaaaacaggtcacgctcgttgtctcgaatgaaaatacaactgcaatcaaagtctacgatgcactcggttttcagcccgtcgaagaattcatccatgcccaatattcgtgattctattttgagtaagatcatttcgctcggacatacagcgcactgaaccggatctcggacttctgttccccttcaaacgtcacccgcagccgataccgttccggcaaccctgtcacctccgtctggccattccacacgagcggcgtctgaaatccgctcgtcgttaccaccgctgcctgcgctcctgaatagtccggcagcgggaccgcgttcgcactcaacagttcgaccttcagccgtgcctcgggtcccagcccctccgcattcatgaaaaactgctggggcccgtctcccttccgggaaatcgcggcggtcagaaattcactcgtcgtgaccggcatctggtagtcacccttgcccgtcgtcgtatcatccacccgcaaatccgcaaaccggtcgcgcggcagtgtgacaatgcccactcccccgcgcggcggcgagccctgccagttgcgtggatcccaggcaccgtaatacacaaaagtctgcgcgccgatgttctcaaagccctgcccctgcagtaagcctccctggtcccactcgccgtcggcccctcgtttcagaaacgtccactcatgcgcaggctgtcgaaaccgcacgccgtcattgctgaccacaaaacccaggtcgacggtcacatccttccattccttacccccatgccagatcccggaaacgcccagcagcacatttccccggttccacacgctcaccccttcgtgattctgttctccctcgcggctgcgtcccggtcccagcagggtatgctgttgcggccggacgaaacccaccgtgctcgcctgcgaccaggttttgaagtcgggtgaaatgaactgccgcaccacgcgaccatgatagggtcgcgacgctgcaatcgcattctgcccgttcacataatacaggccatcccatttatagagcccacccaccggctcaaaatgtaatggaggcagcagcatctcttccacctgcagttccgcctcaaccggttttgcagcatgcagcgttttccatcgcaggccgtcggcactcgcgtacgtcgccagcgttcccagccggactttatttttagggaaccagacatgcgctcccattttataccgccgcgacggatcgggatcgtccggctcgtagagcactttgacgttcaatatccccatgtgcggctcgatctgcaccaggttgttcttgcgattccccgcgtactccaccagccccagatccggtttggtccagttcacgccatcgcggctctcggcataagccacccgccacggagacgagcgaggcacacgcttatccagccgatcctcccccgccgccacataccacatccgatacacatcgcccacgcgaatgaccgaaccataaaactgcacggcccacgaatccggcgtcccggctcccccgcgctgcacaaccggattcgccggatgccgttcaggcgaccgcatcaccagtttcagattctgcgaaaagggaagagagacctcatcaaaggcaaacagtgtcgtcgcctgcgtctcatcgaaataacgaccgtgcgcatcaccgccatgttcattactgctgtcttcttcagcagcgatcacaccagccagaccagcccacacaatccccgccaccagcaacagacttaagcgcatcaccctgccccccggaagaaagaaagattaatgagatgcgttcagtgtagaagattgaaccggggaagcaatgaaattcgtgaatgtactgcgcataaaaaagtcgcagaccgtttgtgcgaactgcgactggtcgccctgtgaagagcggtgcctacgaattttttgcgatgaagcaatcatcttgttgcgaaaaaatacgggcaaggatcaaatacacttggtatcatagtgaccagtggggaacataatgtcaacagcaaaaatcaacacacactaatattccgtatacactgagacgctcatgacgatcagcctgggactcgacattggaaccaactcggtaggctctgcctgggttgatacgaaaaaaaaagacattcaactcggggttaccatcttcccggcaggggttgaagacagcgacaccaaacgaggcgaccctaaaaaccagaaacgtcgcgaaaaacgctcacaacgccgtagcatcgcacgtaaagccaaacgaaaacggcaactgcgtaaaactctggttgatctcaaactgctacctgctaccgcagaagaacaaacggcgatgtttcatcctgagaatgttgaaacggcaaaaagctgggacccctggaaacttagagtggaaggtctctccagagaactgacccctattgaattcggaagaatattgatacatctaaatcaacgtcgaggggctctaggtgttgatgcagatcctgacgatcaggaatcaggattagtcaaagcggccattagccatactgaaggagaaatggaaaaacgtggttgcaggaccgttggcgaattaatggatcaactgcgggaagaacgccagattccaattaaaaattctaaaaacacccctcattcatcatacccggtctcaatccgaaataagggaggtgagtttgaattccatgcaactcgccagctgatccgtaatgaatttttactaatttgggaacatcagaaatcatataagggaaaactgtctaagcttctgacaaataagttactcacgattttggaccacccggaagcagactcaacctggcgtcaccagggagcactattcggacagagaaaaacatactgggattccggaacgctaggccggtgcagtctggaaccatcagaccatttatgccccaaagccgatatgtatgcttctgaatttctggttttggaaacagtcaaccgtatccgcattgaagaacggggaaattatgatggccgagggctctctctctgcgacccatcaatgaaagagaagcgggatacagtaattcaagcacttcggactacgaaaactcccacaatcgccacaatccgtaaagctctgggcattcacacaaaagaaaataaagtcttatactcactcaacatagaacgtgaacagaaaccggaattgaacagtgactggtttcatcgagaaatcgtagcaggtgtctttggtgaaacagagtggaatgcattggatgagcggcaaaaagaatccatcaatcgagccatccaaaagttcgaagaagaagagaaactaaaagagggagctcttcaatggtggggacttaacaaaaatcagatcgaaactctgctcgctgcctggaatcaccgccccaaaccagataaacgtctgcgtctctcccgccgtgcgatcaagaatctgctcccttttatgagagccggtgacgatcttacaacagccaaacaaaaatttggttatcctctgaaacccagacagttgaataaagccgaccgccattacatggagaagcattcaaattcactgcctcccgcccccatgtgttcgaatcctgtagtcaggcgtgccattcacgaagtgcgcagacatgtgaacgcctatctgaatcactttcagaaactgccggatcgaattgtcattgaatacgcacgcagtgccacacagtctgcgaaatcccgcaatgatcaactggccttcaatcgcaaacgagaggcagaaaacaaaaaaattgaacaggagttcaaaaaatatattggcgataataatccggcacatcggatcgtagaacgcgtacgactctgggttgaacaaaaaaagaaatgtgcctattccggcaaactgatcgggatagagaaagtaggattcgggacagacctggaagttgatcacattattccccgcagccgaggcggtcacaatggtttcagtaacaaagtcctctgttatcgagatacgaatcggaataaagggaatcgaactccgaaagagtggatgtcagcagatgactttgaagctcttgaaaagcgattcgaacatctggcaggaaaacaacgccagaaggtcggcgtcttcgaatgtgttcccaacaaagccaaatgggataatctccatcaggtcttagataactttgatctcaaagaattcgccaactcacaattcactgataccgcgtatgcagcaaaacaggtggcaacttatctacgagaggctctctatcccgattcggaaaactcgacatcacagaaacaaagaattttcactaccaaaggtacgatcacagcccgattgagaagagactggggaatcctggaggaaaatgagccgttctttgcaaaacaaaaagataatgaaatacctcagtatccgaaatcccgaagcgagaaaaaggaccgttctgatcataggcaccatgcgatcgacgctgttatgatcgcgctttccagcccacaattaatcgaagaaatcgttaaactggaagaatacgctattgaatataaagaacgaactggacatcgacttcgacaagattctatcaaacctccatgggatctacgcaatcaagttgtggaactggcaaaaaaacagatagttgcgcaccgaccagtgaaacgaaaattgactggcgcgttacatgaagagatgaactacgggattgttgatgagaataaaaagctatttaccctccggctaccggtcgaaaaactcactgcaaaaatgttgagaatgccagaattaatagtatccaacgagggaactaaatatctgaaggaacctaagctggaaaaaggaggtttagttcgagatcggaatctaagaaagttaattcgggaatgcctaaaaaagaaccaaatcaaccctgataaatttgataaaaacgacataaaagctctttcaaaatcgggaaaattaaatatgcccagcggtgttccaattaaaacaatagttgttcttagaactataaaatcacctattattataaaatctccaaacaaagctccacgagtttttgttggagggaacaaccatcatcttgaaattttagaagacacaaagactggtaattggagcggaacagtttgggatacattcactgtttcgcagagaattaatccgccaaagacaaacggaaatgcagcaaaactacctatggttattggtagggaacttgaaaagttaaaacaagaaaaccgattgccgggacacttgcaaaaacattatgaaaataaatccttcgtcatgtcactagctgaaggcgaaatgatctatggacaaatgccagagaaaaaaaacgaagtttctgaatggattggatattttgtagttgtaaaactcagtaaaaaaagtattttctttgctccgcactgggatgcgcggcgcgcagatcagcaacaccgctgggagatatctatacagaagctcaaaaatataggagtaggcgagtcgctcccatttaaggtgtctataaatcctttggggactgtcagtaagatcaatgactaactttttcgataatcctctggattttgcccttggatcttctttacgatacatagaagtatattcatggattgactctctcacgcagtgaatccacggagggcttcttcggcttatttttccgaaggtgcctgtatgttaaagcgaacaattgaaatctctcggcaagcggcccacctgaccacgcggcacaaacagctgcaactcaagcgggaaggagaaattgtaggctccgtcccctgcgaagatctcgctttagtgctcgtcgatcatccgggcaccacctacactcataacgcgttgactgccctcctggatgcgaatgcggccctggtgatctgcggtaaagaccatctccccaaaggcgtgctgtttcccctttccgaacacctggaaattgtctggcggatcgatgaacagacgggtgtttccaagccggttcgcaagcgactctggaaacagctgatccaggctaaaatcagagcccaggctgcgaacctgactgccggttcggttccccataagaaactgctgaattacgcgaaagaagtcaaagccgacgatgccaccaatcgtgaagcggtggccgcccgtctttactggtcaagctggcttgtgaactgtgaagcgcccgactcggtcgatcattttcgacgcgatcgggacggcgatgcgccgaataactttctgaattatggctacgcaattttacgggcagccatcgcccgctccctggtttccgcaggcctgctgcccgcgatcggcattcatcatcgaaaccggtccaatgcattctgcctggccgatgatctgatcgaaccgttaagaccgctggtcgatgcacgcgcccgcacgctttacttctcaggtcataccgatctggaccaggacagcaaacaggtcatgcttgatctgttgaccgaaaccgtcaccaccggcgatcagagcgggccgttgatggtggcaatcaacaggatgaccgcgtcgctcgtgcattgttttcaaggcagccgtaaagaactggagatacccgtaccatgcatttcagcggataccgaagcatgtggatcgtagtcatgttcgatctgccgaccgacacaaaaaaagcgcgcaaacaatattcccgcttccgaaagatgcttctggaagacggatttgatatgatgcagttctcaatctacagtcgacactgtaccagcgaggaaaaagccaatgtccatatccggagaattgagcagaatattccccccgacggcgaagtgcgcatcctcagcgttactgacaggcagttcgaaaagatgcgcattttctggggaaaaatgcgcaaaccaacgaccaaaccaccccgccagcttgagtttttctgacaatatccgacagcaactcctttccagcgaacgatttgagcaggaattagtgtattcgatccttactcgtaatcaatccgcaacactggtcatacacattcgaacgcaatcaggagtgtattcgatccttactcgtaatcaatccgcaacgcattgaatctgtgggttcctttttgtactagtgtattcgatccttactcgtaatcaatccgcaaccgactcctgcgagtttcttcaacagcacttagtgtattcgatccttactcgtaatcaatccgcaacattgaggatctgattgcgaatcttgccggcagtgtattcgatccttactcgtaatcaatccgcaacaccctccaagggtcatacgtgggagggggtagtgtattcgatccttactcgtaatcaatccgcaacaccgccggttaccgtatttttccagcgagaagtgtattcgatccttactcgtaatcaatccgcaacggtctttgcggtcggcttccattgcttctgagtgtattcgatccttactcgtaatcaatccgcaacctgcagggacctcgatacccagaatagagaagtgtattcgatccttactcgtaatcaatccgcaacatacagggtggagggtgtttcagcggctgcagtgtattcgatccttactcgtaatcaatccgcaactgaccgtctgccagtggcttcttggctttcagtgtattcgatccttactcgtaatcaatccgcaactgtgcgagtgtttcataaatgcggaagtctagtgtattcgatccttactcgtaatcaatccgcaacccacccagcacagcacaacgcttgtactctagtgtattcgatccttactcgtaatcaatccgcaacgcacagaagacttcgaccgcttgcgagagtagtgtattcgatccttactcgtaatcaatccgcaacccagaacctacgtactgccagcgaattcatagtgtattcgatccttactcgtaatcaatccgcaacgcatcgacgtgcgaaagtctcagacacaatagtgtattcgatccttactcgtaatcaatccgcaacttatcggtcctgacatcggtaatgatcccgagtgtattcgatccttactcgtaatcaatccgcaaccggctctgagtttggtcacttccccctgcaagtgtattcgatccttactcgtaatcaatccgcaaccatgtttcagttctgcgattttcgacttgaagtgtattcgatccttactcgtaatcaatccgcaaccccggcgatgatttcaaatttcccggtttcagtgtattcgatccttactcgtaatcaatccgcaacacagcaagggcgcgacggaactggcgattcagtgtattcgatccttactcgtaatcaatccgcaaccagcactcagagagcctcttcaggtgtttcagtgtattcgatccttactcgtaatcaatccgcaacgtagcgttcgaagatattacaaccgcttgtagtgtattcgatccttactcgtaatcaatccgcaacatccgatcctctttttgcgttttcgtttgaagtgtattcgatccttactcgtaatcaatccgcaacaacagcaggaccatcttctcgatgacactcagtgtattcgatccttactcgtaatcaatcattttttgactacgaattcttctacagcttccacccatccgcgagtacggttcctttcgggaccacgatgattccgtcgcggattaagacgtcggtgtgatcgaagtcctgttcgctgtggccgttgggttcgatgcgggcgtttttgccgacgcggcagtttttgtctacgatcgcgccttcaatataagcaccgtcgccgatgccgattgccgggcggtcgtcgttttccagcgtctctttgcattcgtcctggtagtagtcggctcccatgatcaccgaattgcgaatcgtcacattcttgccgatccggcaccgcaggccgatcacactgttttcgatcacggctccttcgtcaatttcacagccgtcggcaatcaggctgcgtttgatcgtcaccccttcacagcgcgtcggcggtaagaagcggggacgcgaatagatgggagtcttctcgacgacaaaatcgaaagggggatcgggatgtgccagcgccaggttcgcttcgtagaaggagcggatcgttccgatatcttcccagtaaccatcgaacagatgcgcgtggactttgtgcgtgcggatcgacatcgggaaaatttccttgccgaaatcttcgtagtcggttttcttcaacaggtccaccagcagatcgcggttgaacagataaatgcccatgctggccagacagtcgcggccccggctttcgattccctgctggtcgatccaatcgggaggcgtgcggaccatgtccagctcttcttcggtctgcggtttttccaggaagcctttgacgcggccggagtcatccacccgcatgatcccgaacgcagaagcctgttcgctggaaagcggaacggtggcaatcgaaacgtccgccttggatgcaatatgattcttcaacatttccgcatagtccatgcgatacagctggtcgcctgaaaggatcagcacgtagtcgatgtccgactgttcgatgcagcgaatgttcttacggacggcgtctgcggttccctggtaccagtcggtcccttccatcgtctgctgggccgccaggatttcgacgaagccgcccccgaaggaatcgaatttataagtctgacgaatgtgccgatgcagactgaccgagttgaactgcgtcagcagatagatgcggctcagttcactgttgatacagttggagatgggaatgtcaatcaggcgatatttccccgccagcggaaccgccggtttggagcgcagctgggtgagtggatacaggcgggtccccttgcctccgccgaggatgaggctgacgacatttttcatagcgcattccgattctagtgcaaagagcaccttatagcgtgagttcgtacacttttgttagcaaacttaatgaacagatggaagaagaacaacagtcttgcttagatggttcatgttactcagattgcggttcgcaagccagttgataatgcagtgtactgcgcgggtcggacaaattttctgaccaatttcaaatctgtattgatcaggcagattaggagaatctcaggctgtgatctgcttaaatagaccgttaagatagtatcaattctgcttcatccattttcattacctgccagccgtctcgccgaggagtgtcatcttgtcgtacgttttctgtcataaactgtctctgcttccccgtcctgttgtgctggttgcagtcatctgtttcgcttcattcctgcctcgactggcgtttagtgaaactccctattcgcccgccatcgcggaggcctcgaaagagggcgaacaggcgatccagggtttccgtgttcccgagggaatgcaggtcagcctgtttgccgctgaacccctgctggcgaatccggtggccttttgcattgacgagcaggggcggttttatgtcgcggaaacctaccgccagggaaaaggggtcgaagacaaccgcagtcacatgaactggctgcacgacgatctggcagcagaaacaatcgaagaccggctggcctacttccggaaacacctcaaagacaaaatcaacgattatacactggagcatgaccggattcgtctggtcgaagaccgcgacggggacggcaaagccgaccatgcgagtgtctttgccgacggtttcaatcgtatcgaagagggaaccggcgccggcgtgctggctcgcggcggtgatgtctattacacctgcatcccccacgtctggaaactgagcgataccgcccacgaaggcaaagcaaccctgcgcgaaaaactgagcagcggttacggcattcgcgtcgcgtttcgcggtcacgacctgcatggcctggtgctcggccccgacggacgcctctacttcagcatcggcgaccgtggatataatgtcaccacgaaagagggcaaacacctgttccgccccgatacgggagccgtcttccgctgtaacctggacggcagcgaactagaagaattcgcctacggtctgcgcaatccgcaggagctggcgttcgacaattacggcaatctcttcaccggcgataacaattcggacagcagcgacaaggcccgctgggtctacgttgtcgaagggggcgataccggctggcggatgtattaccagtacctcagcgaccgtggccccttcaaccgggaaaagatctggcatcctgcccacgagggacaaccggcctacatggtccccccgatcatcaacctggcggacggaccttccggactgacccattaccccggcgtcggtctctcggatcgttacaaagaccactttttcctcgccgacttccggggtacaccttcgcagagcggcattcgttctttcgctgtcaaacccaaaggcgcgtcgtttgaactgaccgactcgcatgaattcatctggcagatcctggccaccgatctcgacttcggctatgacggcagcctgtatgtcagtgactgggtcaacggctggagcggtctgggcaaaggtcgcatctacaaattttccgacaccgaacatgtcaaagccgcgaaagagtcacattcggcggaactgatgaaacagggttttgccgaacgctccccggcagaactgacaaagctgctggcccacgttgatcagcggatccgcatggaagcccagttcgcactcgtcaaccagaatgcattagaggctttacaaagtgttaccttcaagtctaacgatcaactcgcccgcctgcacgcgatctggggcatcggtcaactgggccgcaaaaccagttcggcggtcgccggcattcagagtctgctgcacgacagtgacagcgaagtgcaaagccagaccgccaaagtcatcggcgaagccgggttcaccgctgcagcacctgcgttaatcgaattgctcaaaaacccgaatgcccgcgtgcagtacttcgctgccgtcgcgctggggaaactgcaggaaccaaaggcgcttgccgggctgttcgagctgctcaaacaaaaaaacaacgccgaccccatgctgcgtcacgtggcgatcctggccttgacccgcatcggaaacaccgacgcgctgatcgctgctgcgaatcatgactccgctgcagtacgactgggagccgtcgtggcactgcgacggctgcaacgtaaagaagtgggtctgtttctgcaagacgcagatccgctggtcgtgctggaggcggctcgggccatcaacgatgaaccgctttcggatgcggtggctgatctggccgccgtttcgatcactgccgacatgtccgatgccctgctgcgacgcgtgctgaatgccaatttccgtatgggaactgcagaaagtgctgctattgtcgccaggatagccgccaacagcaaagtgcccgaagcattgcgactggaagcgattgaagaactccaacagtggaacgatcctgcgccattagatcgcgtgctgggacgctggcagccgattgagaatcgtgcgccgattgaactgacgggcatcgtcggtcccatcgtccccgacctgttccagagttctgaaaagatcaaggaagcaggaaccggacttgctgccaagtacggcatcaaagaagctgccccgatgctggcggaaatggtcgttgataccaaacgaccggtggatgtacgggtcgcttcgctgaatgcccttgataaactcggctacgccacaattgcagatgtcgccaggactgcgatcaaagattccaagacggcactccgcgtgaccggtctgaatgtcctggcgaaacacgatccccaggcagcattacccgcgcttgagcaggcgcttcagcatggaaccatcatcgaaaaacagggagccctcgcaacgctggcggagatgaagctgccagccgcgaccgatctactggcgcgctggatgcagaaactggttcagcagcaggttcccgcggagatccagctcgacctgctcaaagcggcgaaagtgaaacagtcttccgaactcgaccagctgattgccgcctttgatgcgaaacgtccacaggatgacccgattggcggttacctggaaacgctgtccggcgggaacgcgtcgcgggggcgcgaaatcttttttggtcgcagcgatacgtcgtgccgtcgctgtcacatgattaagaataacggaggcgaagtggggcccgacctgtctggtatcggtatcgacaaagaccgccgctatctgctggaagcgatcgtcgcccccaataaagcgatcgccaaaggatttgaaaccgccgtgctggcgatgctggatggaaaagtaattgtcggcattattcgtaaagagaccaactccgagctggagctgatggacgctaaaggaacggtcatccgggtcgccaaagaggacattgacgaacgggcctcgggaaaatcagcgatgcctgaagaaatcgtcaaacagctcagtaaagacgatctgcgggacctggtcgaatttctcagtcagcaaaaacagaaacagaaagccacgtctaccaaacatgaaggataagtgaccgttgttgaaacggcgcattaattatagaatcgcctccttgttttgggtggacgtgtcgactaaaatgagagcataacgaaacagagaaacaacctctgtcatgttgattcaaaatcgtgagttgaccctacaaatattaaactggggaccaacgagattcggccgcgtgtatatccggtatatccggctcacacaacccgggttatcaggttcccactttgcaatcacgggttctaataacacccgcgtatgaatcacttggcggaggttttttttatgggcttgttcgaccggcaggaatccgggaatctggaaaaagccaagccgctggccgctcgcatgcgaccccgctccctggaagaatttgtcgggcagtcgcactttctgggcgaaggtaaactgctgcgtcgcattctggccgccgaccgcatcggatcgctgattttttatggatctcccggcacaggcaagacatcgctggctgaactcattgcccgccagtccaaccgccgttttgaagccttgaatgcggcctccgccggcatcaaagaagtgcgtgcggcgctcgaccgggcccgtgacgagctggcgaccggcggcaaacagacgattttgttcatcgacgaactgcatcacttcagcaaagtccagcaggatgtcctgctgcccgatgtcgaatcgggcgtagtcgctctgattggcgcgacgacatcaaatccgtttttctcactggtttccgcactcatcagccgcagccagatttttgaattccaaccgcttacccccgaagaaattcagacactgatgcaacgggctttgcaggacgaaaaacggggactggcccgctatcacgtgactgtggaaccggaggcgctcgactttctgattgaagtctgcgacggtgatgcacgccgttctctgaatgcgttggagatcggcgtgctctcactgcatggcgcagaacgggtttttgacctggaagtcgcacaggagtcgattcagaaaaaggcgatccagtacgaccaggatggcgactcgcattacgattccgcctccgcattgatcaaaagcatgcgcggcagtgatccggatgccgcgttgtactggctggcacggatgattgaagccggtgaagacccgcgattcctggctcgccgcatcgtgattgccgcctcggaagatgtgggcaacgcggacccgaccgcactgactttggccatgtccgtgtttaatgccgtcgaaaaaatcggtatgcccgaagggcggattctgctctcacaggctgtcacttatatcgcaacagctccaaaatcgaacgcggcttacgttgccatcgatgaagccctgcatgacgtgcgcaacaaatcactgttgccggttcccatccatctgaaagactcgcattacaaaggggcctcgcagctgggacacggagaaggctaccagtatgcccacgctgcggaagaaggctgggtggatcaggattacctgggagtcgaaaaagaatactatcgccccgtggagcggggttatgaagcgacgatccgtaaacgactggatgtcttcaagcaacggcgcaaaaaaacaggaacggatgatgacatccgttcctgaccccctcagtgcatctcgtcagctagactgtgccagtttttactgttgcgtctccaaggccttttggaccgtgtatcatagattgagagacgctaaggtaactgtgatacgatctagatcagcagagtggctgctgtttcaaaccgacgattgtgatcgccttggcaacttcgcgttcctgcagcaacccttccaggttgggcatgaaatccaccgacatataccactgcatcagaacatcgaacatgggctcgagagattcttcatcgatcccgaattcttctttcatcggcagtgcttcttcgggtgacatgtcctgaaactgactgatcagcaggaagtcaccctcgttggacagattcaaatgcaggttgcggat

SEQ ID NO: 600 - DNA, 24251 bp, synthetic construct
  misc_feature 1..24251: note = Synthetic
  source 1..24251: mol_type = other DNA
actacgaatataccgacagcacccaaggctgctatggcgacaccattcacaacagcgtccgctatcgcatctatcgtgccgccattggcgccacagagggaaatgtcgggcaatatgactggagaaacaaacgcgactatgtgccgggctatgacatcggtgtcaggtatgcaagtttccaaagcacatcgcagaaagacccgaatcccgtcatcatctggtattactcatccacattggtgaatcatagtgccgacgaccattcttacatccctgacgatgcgcacaccatcattcggcgcacctcggagttcatgaagaatggtgtgcccgtcacctatgaggaagatttcgatgtgacaactctcgtgcggaagggaggtgcagatgttaagtccatcacaggcaccatctatccaaatagttttcaatgggtggatgacaacggctttgcaccttgcacaaaatactcctatcagatcttgtatttgcctaacgacccatcggaaatcatgcccaaccgcactgtcgatgtcagcatcaggacgaaggtggctggcagaaatacagacgtgacaaagatagaacccgtacaggacgacaccaagattggtgacttcaaggcttcctacgatacggaacagaaccgtatccatctgtcgtggaacgtcgacatgaagcgcattgacaagttgaccattctgaaactgaaccagaacaagtgggaagaactgcccgtcaatctctcccttccatattatgacgactatgctgtagaggcaggcatggatgtggagtatcgtctgagcattcagtacgaatgtacggatggtgaaaagaaactctctgtggatgttacgggtaaacgccgtgccacaggaaagattgcaggtttcctcaccttcaaggatggtacaggacttgccgatgtggaagtgaaacttttccgggagcagaacggacagagagaggaagtgacttccgtcaagacatcaagcacgggtgcctacatcttccccgatgtgccgtacagcgacatgccctacatcgttgtgcctaaaacaacactctaccccagcctcgatccgaaagagtaccctgtctatctgaacaagaatcagacagagttcttcaacaagaacttcatcagcgatgatgccttcgacattgatggttatgtctattatgagaacaccacagtgcctgtgtacggcgcatcattcaagattgacggcgagacggtcgtggacaagagcggcaacgtcatcatttccgacaacgacggtcacttccagttcaaggcacgaaaaggcactaaacggctgacggtggagaaagaaggacacaccttcatgtttgacggactctatgccgacaacaaaggtgctgcccgccccatcaacagcaaccagaccaatgtgctcttctgggaccagaccaaggttctcaccatcggacgcgtggtgggcggtcttgaccaaggggaaaagaccttgggcttcggactctcgaaaaacaacctcggcgacgacctccgcatcgtgctcgagcaagagggcaaccaacgctcatggctcgtcaaggatcagttgaacgatgccctgacagtggtgcacgacacactcgcattcgagacggcagacggcaagaagaccagcaccgtcctcaccgagcgtcaccgtgtcatcatcactcccaacgtggagactggtgaatatcaggcaaaactgttacctatccgttacaaagtggtggaaatctctgccaaaggtcacccgacactcttccagaaaggaaaagtcagcgaagtgcttgacttgactgacagtctgacaaccaagaccatcacttatgacaataaacaactcaaatacaacgccatctacaaccgtatcttccgtgtagagccagatgtgaacatcactgagttgaacgataaaggcgaaccgctgcctcactatggtcttgccgaatacacagaaccggcagccaatggtggaggtgccatcaccgtaccgctctacgactcaaacaccaagacctacacgtttgactatcctgtgttcctgacgggcatgcactacttccgcatcactgccaccgaaaactactactacaatggtgaggtgacagatgaatgcgagagcgttcccgtacgtggaggcaaggtgcatttctacgatgacttctccgccatgcaacgcgattccatctgcacattggatgaacgcacaggttcggttgacatcagcgtgaacgtcgagaaaaccgtctatgacgtacagggcaccaatgccttacgtcacatggatgtcgatctcgaacacgagggacaattcatcgacagccgcaatctgctggcattcgtgatgggtgagcagcaagtcaccgacgacgtcatcagtgcaggcgaagtcattatgctcaacggcatcctgcgcgaccctccaggcagcaagagttatgcatggattgacacaggttccaccttcaccaacgagttccactgcaccttcgacatcgatttgtcgctgcagcttacttaccagaaaggaactggtgcaaatatcatgcagggaacctattcaggaatgggtggcggcacatacatcggtacacagtcctccactaagaccacgatcaccgtcagccccaatgcaatcccgctcataggtgctcactttgcctatacaggtcataccaccttcacgatgaacaaacgcatggagaccagcgcagacccatccatggtgggtgccaaagctgacatcttctacggtaacgagttggtggctgccaccagttatgtgcgccatgtgcgtgccatcaacgaagccacctatctttacctgaaagaactgggaatgctcagcgaaacagacgggccttgcacgttgattgcccagggtgaaaattccatcggacagccctgctacctcatcagcgactatgcagttcgggtgggtcccaaggtgaagacagaattcgcctacacccaggattacattctgaacacattgctgcccaaacttcgtcttgcccgcaactcctacctctataagggtacgcgcgcagaggcaaaagccagggcaaatgctacgctgaacaatgtgttcctctcgttgcgcggtgaagacgacccacgctacggacaggacaacctcgacgattcgttgcagtacatctccatcgatcgctatgacgaactgaacgacagactgaactacgaggtgatcacccccgactatatagatgtgctggggttgcgcaagcagatggcaaaggaagccgcactcaccgattccgtgcgcatcatgaacagcctcatctctcagtgggaatacatcattgcctacaatgagtacgacaagattcaggcattccagaccgtcgacagaactaatcggagttcgatggactacaatcctggaacggcatacaatgtcgatgaaaacgcttccttctatctggagaaccacactatctccggtggcataggcatcacccacaaccagtcgtttgattcgaaagtggatcgcgactatcatattcctttagtaggcgtggatttatcagaagtaacagaaggcaaaagctggatgaatgggttcaaccaattggtaaacacaggtctttcagccgccaccagtgctttcaactcaaacaagaacttccaaaaaagtcatgagggcaataatagtgtaaagaatgtagtaattaaatacaaagtaaaaaacactgcaacaggccagccaatagcaaggacgaaggacattgtcgagagtgatttgagtaatgtgtcgaagatggagcaaaccatgaaagacatcaaaagttcaggcgccttcgacatagagattgcaacaggaggcacccactctgaactgaagattgtgccatctgtcagcgcgaactacagttcagacaacaattctgatctctcggagtcagtcactcagggctatcatctggagactaatcctgaaagtaacctgagcattgatgtctatcacgatgtggagcaagtggtgaccagcacgggagtttttggcaattctggcgacaagcagaaattctccaaaggcaacttcgtcttccgctctctgggtggcagcaccaaatgtccatacgaaccagccgacgtgtcaaaatactaccgtcctggcaccattctttcggcagccaccgctcaggtggagaagccctgcatcacagtggagaaccacatcatcagcaatgtgccctatggcgaaagagccaagttcaaccttgtgctgagcaacgaaggcaccctgcgtgaagaaggctcgttcgacctcgtgctgctcgacaagagcaaccagacaggcgcatccctcatcatggatggtgctccgctgggcaacggacgttccgtggttgtaccttacggcacaggaatggtgaaagtgctcgagattggacaaggaatggtggacgactatgaaaacatccggattgccctccgttcacagtgcgaccccacagtggctgacaccgtaagcctgtccgtccacttcgtgccgagcgccagtcctatcgcggtcatcaccccgcaagacaagtgggtgctgaacaccaactctgcacaagacgagcgtggcagatactacatgccgatgaccgtgggaggctatgacgtcaacttccgcaacttcgaccacgtggaactgcaatacaagcagagctccgagccggaatcccgctggaccaacttgtgcagttactacaataatgacagcctttaccagaaaggaacaggcaccaaagccatgatcatgggtggaacgcttacccatgccttctatggcgacagcgaccctgtagaactgaaatacgacctgcgcgccgtgacttacagccgtctgggcaacgacttcgtgaccacctcgtcacccgtcttctcgggcatcaaggacacacgacgtccgcaggtgttcggcagtccacagccagccaacggcatcctcggtgtgggcaatgacctgaaactcgttttcagcgagaacatcaacgccaacaaacttctgtcatccaacaacttcaaggtgacaggcatgcccaacaacagtgtgattggaaccaccacatacttgcagctgcaaggcgactattcgtcctatctcgaaacggaagaagaatactgcgcccccgacgagagtttcaccatcgatatgatgctgagggctgaatcgtccctcaaccatgcctgctcactgttcgaacactattacaacaacgacaggctcggtttcaagattgacatcgatttcatcaacaatgagccattcctcgtggtgcagtcattgatgaacgtaatcaaacaacaggtaatctcggcaaaactcgatggcatcggtcctaaataccaacgcatcgccgttgtgtatgacaaaccgtccgagcaaatccttatctatcagaacaacaacctgctggtcaagaaaaaagtgctggtacccatcaaacgtactggtaagatgcgcttcggcagaggctttgcaggcagtctgaaggaaacacgcatttggtcgaaggcgctgacagccagcgaaattgaagagacagccaacaagaccatgtacggcaatgaagtgggtcttgtagcctactatccaatggatgaaggatatggagagagtctggaagacaagtcactggacaacaacctgacgatgaacgaagtcaaatggatcactcctgaaggatgctccttccgtttgaccggcaagcacttcacacacgaactgaagcgcgaaatgttcgaacgcacatccgcagagaagagttacaccctctccatgtggttcaaggcaaaagacaaatctaacttccccatcatggcgtcaggctatggtgtgaaggaagaagaaaatgccaacgagaagctcttcatcggtgtgagagacaagaagctgaccattgcttccgacaccaccagcatcgtcatgaacaagagctatgccgacaaccagtggcaccaactcaccttcgtggtggaccgccctgccaacatggcatctgcttacattgatggtgaactgactggtcaggcacaagcatcaggctttggcaaactctacggtgctgcaccattccgtttgggacaggtcaacgccaccgaatccgagaaccagcttgtggaatacgcccccatggaaggcttcatcgacgaaatcaccctttgggacatggcattgccccgcaatgtggtgaagcagcgcatgaacgtgagccatgacggagccgagaccggactcctggcatacatcccattcagcgagaacgtgccccaaatcacgggtagtggaaccctgttggaattctccaccaactatttcgccaacaagtgggacactgaactgcagaaaaccgtgagcatgactgacaacgcattcggcaatggcagccagttgaccaacaacatgatgtcaaccaccgaatacgcaaccgtcaaggaaaggggagccgtgcgcgaccttcgcttcgacttcgtcaccaaggacaacgagatgattatcgaactgaaggaactgcccaaggacatcgaccgcaccacggtaaacatcacagccatgggcatcgaagacctcaacggcaatgagatggcacaacccgtcacgtggtcagctttcatcgaccgcaactccgtgcgatgggctgaatcgcagaaaaccattgatatcgatgcacaaaaggaggaagactacaccttcacggttgacatcaataaccacggcggcgctcaacgtgactacaccatcgagggcgtgcccgactggatgaccattgaggagggcaccatggacacactcgacccagaggagaccatcaccctccacatcaccatttccaaggacatcaacatcggcacctaccacaatgtgctctacctgaagaacgacgaggaactggtgaacccgcttgcactgaccatcaagaaaaacgcagtcacacccgactggaccttcaacaagaacggtcagagcaacatgcaggtgattgcccaggtgaagatgaacgaggcgatcgtgactaacaaggagagcatcctcgctgccttcgacgaatatgacaagtgcctcggcaccacccacgtgaccatcgacaagaacgacaaggcactcttctatctgaccatctatggcgaaaagagaaaaactcctgtgaaattccgtctttgggatgcaacatctggcatcacctacggagtcaatgccgaccgcgacattacctactggtccgacagcattgtggcgacctatgatgcccccgtcgtgatgacagccaacaccaatatcacgagaccgctggaactcacacccacctggacatgggtgtcactcaacgtggcaagttctgatgccaacgacattggccagttcctcaagcgcggcaagtggcaggacggcgaccagttcaaagaccctgagagccagaccttctacaactactacaaaggtgtttggaacagcagtggagccacaggtccgctgcgcaccgaccggatgtactacatcaagagtcagaaggcacaaaacatttatattgaaggtgatgccctcattgacgaggcagaccgcaccatcaccctccatccgaaatggaactatatcggctacactccgatggtcaacctgccagtcaacgaagcacttgaagacctcaagctcaaagccagcgatggtgacatcatcaagagccaagatgagttcgccaccttcgcagcatcagtgggtggatggagaggcaaccttcagtacatgaaaccaggtaagggctacatgctctatcacaaggtgacagccgaacatcctgaggaagagatcaagttcgtctatccgttcaagagcacagctgccgtgatagccatggctggtgccaaagcgcgagaaatcgcatttgacgatgagaatgagccactatggaccaacacccgacgcaccacaatgaacctcattctgcgcaccgaaggcatcactgctgaagaaggcgaccgcctctatgcctatgcggagggtgaactttgcggcatcgccgaagcaacagacgtggaaggcgaacaaaccttcttcctttctgtaggaggtgaagaaaagaagacactcaccttcaccctcgagcgcgacggcagattgctcggagcagccacacgttccggcatcatgtatcaagccgactcacttgaaggcaccaccgacgtacccaaagtcatcgacttcagcagcacatcagcctacgaagacggcatctggtacaccctcacaggcatccgtgtcggagagcgccgacctgccacgcctggagcctatatcttcaacggacaaaaagtgatgatcaaataaaaaacgtgacaacaatgaaaaagatatattcaatgctcatgattgctgcatccctcaccatgctgtgggggtgcagctcatcggacgatgacgacaacaacagcaccaaccaaggcggcagcacccagatccatggcgtgaaagtggacaatgctccacactggttcttcgatgccgtcaccctccctcagggtgacatacagggtaagcccgactgggaagaagtcaacttcttcgaattcgaggacaacatgaccgccatcgtcttcgtgtctgaacacttcggcatcaaactggcagcagacgaccgcatggcagccattgttgatggagaggtgcgcgaaatctgcgaaccaaatgtctacaaccttcccgatgaagaaccactgtattgtttcatgctctacatcccttttgagcccgacgatgatgcagtggaactgcaatactacaacgcgaaggcaaatcagacctacatcaccaagaatgctttcaacgtgaaagactacaccataggtgatgacgaactcttcatgttcaccttgcgacccatgaccccctatttctttaccgtgccttccgacctgccttttaccccgacatccgacgacgaggtggccatgttcataggcgacgaatgctgtggagtggcaaactctcaggttgatgtaaaggggagtctcgtctggtcagttgatgcctacgacatgaaccgaactggtgaaaaagcccatgtgcgctactacagtgcccagacaaagaccatctacatgacagaacccatctacgaagtccgacattttgacattaatgacgtggcatcagttgacaccctgaagttcaagtgacagacacacacgaaaaagcaagaaataacccttatatgcagatgcgggttgacacattcattcagtgtcaacccgcatctgcatataatacctcccaaaacatacttcgttgattcacaattatcccgaatcagtcatttgcgttttgatgacggcaacttctatttttgagcagatgttttgacgctttgaagacgcaatggggttccattgtaactgaaaagcggtgaaacagatgacaagaagaaaatttgtcagcatataaacagtctaatgaacgattcgggataatcgtcttccagcgtgaaatattatgcgctgtaagaacgaaatatttcacgctgagtgcgtgaaatgacaggcgcaccgtgccgacttttgcaaaggaactgcgaatgacacaacaacgtgaaaatgattgaataaagactctgcttatacctcattccacattttttaatatttcatctccccactctttcatttttgaaattaattatgtaattttgcatatacaataccgaaaaaagtgaagcctgtaccgtgatttgaaacagcataggcgtatctttgcagtcgaaaactttttgcggtataaagaaatatatctatatttgcatacagaaacgaggacaatcttttctaaccagatacaaaaaaagtcccacgaaacgcaggactaagaagattctacggcttatagccttgttgtgaaaagtcttcacaaattagtatctgattgcaaaggtacaaataattttgatactaacaaacaaaatttgaaataaaatgggaagaattttaggaattgatgtcggaacaaactctttagggcttgttgtacgtgatgaagacatttctacaaatccaacagaacaaattgtgttcagttctgttaatctctttgattcaggagttggaaatggccaaagcggagaattttctttcgctgcagagcgcacaaaatcccgaagaccacgtaaattgtataaagttcggagatatagaaaatgggaaacactaaaacttcttattgaaaatagtgataagaaatactgcccgctttcccaatccgaacttgagcagtggactacatatgataaaaaacgaggactcaaacgcacataccccattgatgtaattcaattccagcaatggattcgtttagactttgatggagatgggagaccagactattcttctccgtatgaattaaggaatgaactggccacgaagcaactcaattttgaagaggaaattaatcgcttcaagttgggaagagccatctaccatattgcagaacgtcgaggttttcagagtagcaaaggagagacgattaaagaacaggaagaaactgaaaacgaagacaaagaacttcagcaatccgaattggacagggctttgccttttgacaaatccctctatccgacagtgggctgtgctttatatgcaataaacaaatcagggcaacgagttaggagagagtgctctgtagttaggaaacaatataaagaagagattgaatacatcttcaactttcaaaatggtcttgacacccaatcggatctttataaacggctcatatccgagaagagaaaggaaggaactattttctacaaaaaccctctaaaatctcaaaaggggcttgttggcaagtgtacgttagaacctaacaaaccaagatgtccacagagtcgtcctgaatatgaaaaatttcgagcatggagtttcatcaatagcatccgctatggaattgattgcaataaggaactttccatcgaaacaaaaaaagcccttttcgatgaagtatttgtccgtgctactgattttcgcttcgaaactatcagaaaatggattgagcgaaagactggagaacattttgcatataaaacagaccgaaaacaacgtactatcaattataaagacaacactcctgtcatcgcttgcagtgtcactttccgatttctccaattattaggagaaaattggcaaaactggtctttccatcccaatgcccaacacacaaacagtaaaaacaaaaaccattggcatcccacaacatatcattgggaagatgtttggcacgtctgctttggtgcagatgaagaagagcctttacgactatttgcaaataaaagcaatcttgattacaatcttttgttgagattatggaaagccatgcctatagcatacgctaatcttagtctgaaagcgataaacaacatcaatagattcttggaaaaagggcttatctacaatgaagcatgtttgcttgccaaattgcccgacattttcaaagaaaaatggacagacgaggttgaaaatatactttttgactccatcacttccattatcacggctaatagtgaagaaagaaaaatcgtaaacatcgtcaactccctcattgctaattataagtcaaaaacagatgaggagaaacaaggatataaggattattcatacaatctctcaggagaagactattgtgatatagaaaaatgtgcagcaggattttatggtataaagacatggaacgaaaaggatgaagaagaacggaaaatgattataaatcaaatcgctcatttataccaacaattcttccatgacgagaaacggcaatacattaaaccgaacaaaatagaagattccatcaaacagttcttgacagataactttgaggacttaaatccaagaagtctttcaaaactttaccatcattcgcaaatagaatattacaaaccagcatcaatccgcagagtggacaaaggcgacaagatgctgtacatgaaacttttggaaaacccatccattgcttctttaaggaatcctatggcccttcgtgtgttgcacactctaaaaaggaaagtcaacgatttgctaatggaaggtatcatcaatgaagatgatactcgagtagtggtagaagtaacccgtaaactcaatgatgccaatatgcgctgggccattaagcattatcaagatattcataatgctgaaaacgaagaattccgaactatgataaatgaaattgcagatatacccaaagttaggatgcttgtagaacagcatgattgcaatggccaagtattatcggaaaaagatagttctaaacaagaatactattatgaacgatacatgtccaatctcatcaaaaaataccgtctatgggtagagcaaggtggtttctgcatctacactcggaagcccatcaccatcagtagcctcattaacggtgaaggtgtggacatagagcataccataccacgtagcatctcattcgatgattccttaagcaacaaaactttgtgcgattcgaattttaaccaaaaggaaaaagtaaatcgcattccttcacaattacctaattatgaagaaatcctattgaacatcaggccgtgggttgaaaaagttgaagatatccgagggcgcattactttttggaaaaacaaatcaaagaaagcacagacaaaagaacaaaaagataatgccattcgccaaagacatttatgggagttagaattcgagtattgggaaaagaaagtaaatgcattcctcataaaggaagttacaacaggattccgcaacaatcaacttgtggacacttctattattgccaaatacaccatgcatttcttaaaatcagtcttttcaagagtagaagtccaaaagggaaaaataacttctgacttcagaaagattttaggaattcaagatgacgacacattaaaagtacgcgacagcaactcacatcacgccatcgatgcaatggttttgactttcatccctgttgcagcacgtcgcgacgaattgcttgaggttttcttcaaacgccaagatgccaaagatttggggcatgatgtatcccaatttgacaatgagataaaactattattgcgaaaaaatggtatcacagccaatttcgctgaaattgttgaaaacatcaaatccacagtccttgcgttctatgagagaaaaagccaagcactaaccatcgccaaacgcagaaaaagagtgaggggaaaaattgtggctcaaagagacgaaaaaggcaatatcatcatggaaaaagatgaatatggcaatttcagaactgacagatttggtcacagaattccacttgcaaagcagtggataaagggtgacagcatcagaggcgaattacatgacaaaacgtattatggagcaatcacacaacatggtagcgaaaatataaaatacgtgcttcggattccacttaaatataaaaccaatagtttggacaaaggctttaagagttgggacgaactgggaaaagcaatagtcaataagtcattagtggaaatgatgaaatcacaatttccagaagacacttcatttaaagaagcatgcgaacaaggcatttatatgatggataatgagggaaacaaaaagaatcgtatccgccatgtaagatgttatgcatcatctgttacaaatcccataaaagtcagagagcaggtttacaagtcgagaaaggattataaaaactactattatacaagaaatggtgaaaacattgcctatgccttgtattcgttggggaataaaagaatttttgattgcctctcactaatggatgcttccaagattagcaaagcggaaggcatacataatctgacttccattttccccgataccaaagaagttatagacaaaaaaggacaacgaaccatttacaacaaagttttcacactgttccctggacaaatggtcgttttgaagcgggaggatgagatgcttgcgtcattaacccaagaagaaatctctcacagattgtatcgattaaaaagaatatatagtcctgatgacggacgtttacaacttcaacaccatttagaatcaagagatgacaaagccctagagcatgcatatccgaataatggcaaaagtgggaaaaatggattctcggtcatcaattatgatgcaccatatccccgccttttgttgtcactctctaatcaaaacttttgggtggaaggcacagacttcattataaagaatggcaaagtaatcgcattatgatcaaaaagactctctatttcggcaatcccatctacctcagcctccgcaatgcccaactggtgttgcggatgcctgatgcggacaaattggaagagtcgttcaaacaggatgcagaaaggaccatcccgattgaggacattggcgtggtggtgctcgacaacaggcgcatcaccatcacgacgggagcaatggaggcactgctggccaacaactgcgccatcatcacgtgcgacagcacggacttgcccgtggggctgatgctgccactctgcggaaacaccacacagagcgaacggttccgcactcagatagatgcgtcgctgccactgaagaagcaactctggcagcaaaccgtccgacagaaaattctcaatcaggcaactgtactcagcaaaaacaccggggcgattgtcaagaacatgcaggtgtgggcaaacgaagtgagaagcggtgaccccgacaacctcgaagcccgtgccgctgcctactactggcgcaacctcttccccaccctgcccaattttgtgcgcggacgtgaaggcgaccctcccaacaaccttctcaactatggctatgccatcctgcgagcctgtgtggctcgcggactggtgggtagcggactcctgcctacactgggcatccatcaccacaaccgctacaatgcctattgtctggccgatgacatcatggaaccttaccgccctttcgtggatgatttggtcatcaacatcatgcagcagtatcccgattacagcgaattgacccgaagcatcaaagcggcacttctcactatcccgtcactcgatgtgacactggatggcaagcggagtccgctcatgattgccgtcggccagaccaccgccagtcttgccaagtgcttcaacggcgaactgcgcaaaatcgcctatcccgaactgtaagaagaaaaagacatgagcagcctgtcacgcctcaccgaatatcgagttatgtggatattagtattcttcgacttgcccaccgaaaccaagaaggacaagaaacgctatacggattttcgcaagaaactccagagcgacgggttcaccatgttccagttctccatctacatccgccactgtgccagcagcgaaaatgcagacgtacatttaaaaagagttaaatctttccttcctgagttcgggaaggtcggattgctaaccataactgacaaacagtttggcaacatgcaacttttctatggacaaaaaccaaccgagccaaaagcccccggtgttcagttagaattgttctaaaaacaagaaaaccagccttcgggctggttttcttgtgtcatatcccattcttttttcttttctatttgcatttataaccatttcagaatcttttacttacaaagattgtggtgtatatgactctgcaaagatactaatttgaaagcaaatcacaaccctatttcactttttctttcctctcctttcggtgtatatgactctgcaaagatactaatttgaaagcaaatcacaacttgtaagctgcaagtgcattctcagcacttggtgtatatgactctgcaaagatactaatttgaaagcaaatcacaacgccgttggaaatcatttcgagaatatattggtgtatatgactctgcaaagatactaatttgaaagcaaatcacaacatcaatccatcagagtatgcaactatcggaggtgtatatgactctgcaaagatactaatttgaaagcaaatcacaaccgcatcgcgatagcattgcaggatgccgacggtgtatatgactctgcaaagatactaatttgaaagcaaatcacaactcagggatgccgttctttatcttcactatggtgtatatgactctgcaaagatactaatttgaaagcaaatcacaacaagcgtgcgcccgttctccgcatacagctggtgtatatgactctgcaaagatactaatttgaaagcaaatcacaaccataggtaggtttcgtaggacatcacttgcggtgtatatgactctgcaaagatactaatttgaaagcaaatcacaacgcgatgcaggcaaaccacatccacatcaaggtgtatatgactctgcaaagatactaatttgaaagcaaatcacaactagcccttactacggcaaaagtcattcatcggtgtatatgactctgcaaagatactaatttgaaagcaaatcacaacgttctaccttcggacagtagactaacactcggtgtatatgactctgcaaagatactaatttgaaagcaaatcacaacttcgggatgggtacggcatagaaagaatgaggtgtatatgactctgcaaagatactaatttgaaagcaaatcacaacttgtccgtgctgtgctgtgaagggttgaggtgtatatgactctgcaaagatactaatttgaaagcaaatcacaaccaagacagaccattacattagtacaatcgtggtgtatatgactctgcaaagatactaatttgaaagcaaatcacaactgtgttttattttctctaatgttcatctatggtgtatatgactctgcaaagatactaatttgaaagcaaatcacaactgcttccacgattacccgacaagcgacctcggtgtatatgactctgcaaagatactaatttgaaagcaaatcacaacgcatgtcggctgttgccaccgttgcaccgcggtgtatatgactctgcaaagatactaatttgaaagcaaatcacaactgcttcgccattcttcgaaaggttgctatgggtgtatatgactctgcaaagatactaatttgaaagcaaatcacaacggtgtgtcgttgtcatgttgtaagtccttggtgtatatgactctgcaaagatactaatttgaaagcaaatcacaactgacttggtatgatgatgttcaacgggtcaggtgtatatgactctgcaaagatactaatttgaaagcaaatcacaactgtcaaatagtgatactgattttgcttctcggtgtatatgactctgcaaagatactaatttgaaagcaaatcacaacgagtgtggaggacttgagtgcattcctgggcaaggagtcgaagggtgtggagttctccgtggagaggaagaaggcgaagaagggagccgcaacggaagtgcatcgctcgtcagatgatgtgcgcctcgggttcgatgctgagattgcttgggtgatgagccattacaagatgagcattgacacgagggttgtgagtgcaagcgtgtacgccaaccttgtgaagaatgcagttgaggaagtgaagagaaggcagaaggtaaagtaaaagtttcattaaatttgtgttgtgatgacaccactgggctgagaagttcggtggtgtttgtttttgtcgtgataatgggaaaggaagggaaattttcgggggatttcccttaataaaaaaatgtcgtgtttttgaccactttgttctaaaaatacgccaaaagtggtcaaaaaaagataaaatgaaaaaaaatgtaatatataacaaaaaggttatataaatatttgtatatgtcaagaaaaagccgtaactttgtagtgtcttaaaaataaaggaagtattaaccactaaaaaaacaacaaaatgaactggaacgaaatgaaaagaaaagtcatcgagatgggttacgagtttgagagaagcggcaagagacacgaaatctaccgacacccagtcaagaaagacattgtaatccttgagagacattggtcacaagaagtaagaccaggattgatgaagaagattttacgtcagataggtgcatagtctatctgactacccaaaataaaataattgtcgaacttaaatacatgaaactatgttggtatcaattgaaaaacaaaatgatggaacctacatcgcttacaacaaggggtgtgatgagtttacggcacttggttcgggtgacaccattgccgaggcaaaagatgatttcttcaacagcatcgaggaaatgaaggaggtatatcagaagcatggtgatgaagtgccagcttctttgatggagaaacctaccttcaagtttgaccttgcttcgttctttgagtattattcattcatcaacgtgaccgctttcgccaaaatggtaggtattaacggctcgctgatgcgccaatacaagaaaggtaatacttacatttccgatacgcagttggaaaagatacagaccttcgtgaataatatgggtatggactttcaaggtttgcgccttgtgtgacagaaaaaaaaggtgcagtccagttcctgcacctcttcctttataagacaactgactggaagcctcggcatggtgtcggggctttttttatttcccgagttctttctttagcacctttctcccttcgtggatgcgtcgctggactgtccccatgggtatgccgagcatttccgcaatctcctgatacgagtagccgagcgcatagaggatgacaggtcggatgcacaccgaacgcctgtcagcccttctgagcgaactgacgagttgcctcgacctgatggcggcatcagcgcttgcgtttgtcgcaggctcccttgcaggaaactgctcgacgaggtgtatatgactctgcaaagatactaatttgaaagcaaatcacaaccttgcattctgacggagaatctattgtttccaaggtggaaataactgcctcggagaaaaagcagtataagaatcgcacttatgtggaattgaaactcaaatgaaaaaatgaacacaaactgcatgattccccccaaaaaacgtattcaaaaagagtctcaaaatgttgtgcagtttattcttttttcatacctttgcccatacattacactttataataatactaactcaaaaacgacatgaacaagacaaaaaatactcgattgccacatccacttgttgccctcatccctgttgtggtgctcatcgctttcttgggcacagccatctatctttttggcagcgattcgctgagcggcggcagccagatagcgctcatctttggcgcgtgtgtgtgtatcgccttatccatgggcatctatcgcgtgccgtggaagactttcgaggagcgtttcgccaagaccatcagcaatatagcaatcatgatcatcatccttctggctgtaggcatgctctcgggctcgtggatgatcagcggagtggtacccacgttaatttattatggcatacaaattatatcgccccagttttttctggtctgtgcttgtgtcatcagcgcattggtttctgtgctatcgggcagttcgtggaccaccatcgccactattggcgtggcattgctgggcatcagcgaggcactgggcatcagcaccgcatggactgcgggtgccattatctctggcgcctacttcggtgacaagatgtctcccctcagcgacacgaccatcctcgcttcatcggtcacgggcactgacctcttcaagcatatccgctatatgatgtacacaaccgtacccaccctcatcatcaccatcaccatctttctcattgcaggattgggcaatgatgcggggagaaacctacaggtgacggaatatatggagggacttaacagcactttcaacatttcgctgtggacactgctcgttccaatcattacgggtgtactcatcgcacgacgagtgccttctgtcatcacgttgtttgcttctgccatcatggggggcatcacggcactcatcctccagccgcatatcctccaccagattgcggacacgaatgaactttcctcttccatgtcattgctcaaggggcttgccatcactttctacggttccacagccatcgacacggggaatgccgcactgaatgacctgatttccactggaggcatggctggcatgctcaacaccatttggcttatcatctgtgccatgtgtttcggctccaacatggtggcaagcggcatgatcgagagtctcacccaagtcatcgtccgcatggctcacaaccgcttcagtctcgtcggcactactgcctgctccggactcttcctgaatatcaccactggcgaccagtttatttccatcgtcctcacagcagacatgttccgcgacgcttaccgccagcagggctacgagtctcgactcctcagccgaaccaccgaggatgtcgccactgtcacttctgtcctcatcccatggagcacttgcggtatgacacaagcggctgttctcggagtccccactatcgtctatctcccctactgcttcttcaacctcatcagccccctcatgactttgctcatggcggcgattgggtggaaaatttacaggaatggggatgtgaaagaatgtgccagtgaatccttagccgttggggagtcctaaatacccaaagaaacggtcgggccagaagttcatgatgagttcgtcggggaattgggtctctgacaacaggggcaccagacggtcgtagtcggctatctggaaggagatgtgggcatcgctcccgagaatggtgggtacctcgtacttcttgcagaggcgcagcagttgaagattgttgtcgcgggctgccgctttgttgcgctgaggggcaagggagtggttgttgatttcgagcagggtgtgggactctttggctgccaacacaaggggctcgaagtcgagttctgccgttccgtcgcccggatgactgatgatgtgtatcttggggttgcggatgacgttgagcatgcctgctgtgttctctgctttggttcctccttgatagcatttctcgtggatgccggcaatggcgatgtcaagccgattgagatattcgtcattgaggtcgagacggccttcggtgtcgaggatgttgacctcgcaccccatcaggatacggactccgtagagatggcggggcacgacgaacatgttgcggaaatagacgagggggcaggtgcctttgatgctgggaccgtgttcggtgatacccagcacttgcagacctttgtccgaggcggcttgcgccatctcctgcagactgctgtaggcgtgtcccgacgctacggtgtgggtgtgggcatctatcagtatttttctcatatctgtcttcaaagtagatgttatacaactacaaatgtagggagaaatggggaaaagaaaaaatatttgcagaaaaaacggggaagatgcttgtggatttggagaaaatgcgtacctttgcactcggtaacggtaatgagaggggcgtagcccagttggtttagagcgctgcagtcacattgcagaggtcatcggttcgaacccgatcgtccctacgcactttcaaagtgcaacagcgagaggggctgtttcattacctaaaaggaggagagatgccagtgttttacgctggcatctttttttgtgtaacaattcagcgcaagaacttcaacttgctttttctgaaactaatttgacgtcagttcggtataagagaacttaatttcggaagttctttttaccgctttgcgggctttagaaaaacaagaaaaaaaatagaaaaatacaagaaaaaaagcactccactttctctatttcttcttattttcttttgttttctcatatttttctaaagccgccgaaggcgtaattcttacaccgaactcacgttataattatcaaaatttgtgaataaaattattctaattatggcaatgtgtttcttaaaatccaccaccgagggcgattcgctgaatagatttcttttttgtgtcttcgagttaaaattagtaaaaggaataaactttgcgataacgaaatggtcttaatgatgtgattacaacaaataacatattacattaaccctcatttaacagacacaatgaaaaagttttttctcaccatgatggtggcagcgatttcgctcacctcatttgcacaacagtttggcggcggacagcgccgtgagttcaaacctgaagacatggctacacgcagagccgaccaagtgaaggaggctgctcagactactgacgagcagtacaagaaggtgtatgaccttttcctgaagcaggctcaggagcagcaggcaagaatgaaggaggctcaagagaagggcgagcgtccacagttcaaccgcgaggacatgcagaagcagcaggaggctactaatgccgcactgaaggagattctgggtgcagagaagtttgaggcttaccagaaggctcagcaggagcgccgccagcgcatgggtcaaggtggtggcttcggcggaggtcgtccacgtggtcagggcggtcagcgtccacagggtcagaacctgtaaggtgtcgcctgaaggggatttcctccctgtcaataatagcatgaagaggaatgcatcaaaaaaataggtgcatccctctttttttgcatttttcttttaaaccttttgatttccgcttcgtcatacccatcgaaaagagtatatctaatcaaatcttttaactaaactttatttattaaactttatcattatgaaaaaaatcattcttactctgatgatggctgtcgtatcgctttcatcattcgcacagttcggtggcggtcagttccaaatgccaaaaccagaagaaatggcaactcgtcgtgcagaccaaatgaaagaacaagttaaagacgccggtcaactttctgacgagcagtacaagaaggtgtatgacctcttcctgaagcagtctaaggacatgcaggctaagatgagtgaaggtggtggcggtttcggcgctttcaacatggaagatatgcagaagcagcaggaggctactaacaaggcgctcaaggaaattctgagcgaggagcagtataaggcttaccaaaaggctcaggaggaaatgatgaagcgcttccagcagggtggcggcttcggtggataaaatgaagcagattatcacgataaaacaataatatcacttcatatcattcaatgggggaaggtgttggaaacgacactttccccttctttttgcaggatagatttgggattttcatcaaaatcttctacctttgcaaacaaataaataatatgcatgaagtacctgctggccagtctcatcgtcatcaatgtcctcacgtttttcatctatggcattgacaagtggaaggcacgccgaaacaaatggcgcatctcggaagcggcgttgttgtggctggcagtggctggcggcagcatcggtgccttgttgggcatgaaggtgtggcaccacaagacgatgcacaagaaattcaagtatggtttacctgccattttgctgctacaggtggcgctggcaggtttcatcctgtatctgtttgtattcaaataaaatctttcacacatgaacaaattaatgacattcatcatgggcatgctggggatgagcacctcggcttgcagccaagcattccaaaatgtttcggtagaagagtttgcaaccttgattgacagccccgacgtgcaactggtcgatgtgagaactgccgaggaatatgcagaagggcacttgatgggtgccatcaacatcgacgtgaacagcaacgctttcatacaggaggcgaagaagaaactgagcacggacaggatggtggcagtgtattgcaaaagtggcagaagagcctctaatgcggcaggactattggctgccgaaaactatcaggtgacgaacatgcagggtggcatcctggcttggaaagagaagcagatgcctgtgacgaaggacatgacagaggtggacattttcaagacgaagagcggaaagactgtgcgactgtatgcactggtgcatgccagcatccgcatccagtatgacgacatggaactggagattgaccctgtgaggaaattgggcaaccgcaccatcgactacacgaaggtgccacaacctgacttcatctttgtgacgcatgagcatggcgaccattttgaccaagaggccatcaagcaactgactcgtgtgaacacacgtttcatcacaaaccgcagatgtgcagacatgatgggctatgggttggtgatggacaatggcaacaaggaagacctcaactttggc

SEQ ID NO: 601 - DNA, 21070 bp, synthetic construct
  source 1..21070: mol_type = other DNA
  misc_feature 1..21070: note = Synthetic
atagccgaacttacggttgcaatccacctgcaaagaagtcaaatcgtagagtcgaggcggtgcttccgttccctttttcttctgaatatcagtcaccgtaaaaggttgcccttcaatagattggagaactgccctaccctcttcttccgtcaagaactctatctgcttgtagataggacccttactcttgatggtcttgccttcttctgcagcagccttcacttctgcggcatcctctgcttccgcttcctcatcatgagcgatggcggtgaatttggtgtcgcggtagagtgtagagagcacccaactttgtttgggcacaaaactctctatctcctgttgacgacgcacgatcaacgccaaagtgggtgtctgcacacgtccgacagaaagtacctgcttctcctgaccatacttgagcgtgtagagacgtgtggcattcatgccgagtgtccagtcaccgatggcacggcaaagtcctgcctcatagagtgattggtattcaatttggtctttcagattgttgaagccttcacggatagcctcttctgtcagcgaagaaatccacagacgtttgacaggacattttgccccagccttctgcatcacccaacgctgaatcagttcaccctcttgccctgcatcaccgcagttgatgatactatcagcagcctgcatgagcttctcaatcgtggcaaactgacgcttcaccccgtcatcatccttcagacgaataccgaaacgtgcaggaatcatcggcaggtcccataaatcccaacgcttccaacgctcaaaatactcatggggattcttcagctcgcacaaatgtccgaacgtccaagtgacctgatagccattgccctcaatgtagccttgcttcatttctttggctcccaacacgttggcaatgtcacgtgccacactcggtttctccgctatacaaacaatcatgagtgtttctgttggtcgtgcagttccttcgcctgccgcaagatgtcgctggcaaagatgaagtcttccagtttcttgttggtggcatccatgatttccttgttgctcccctgccattcggcacgtccttcgcagatgaaggtgatgttttcaccaatgcccatcacggagttcatgtcgtgggtgttgacgatggtggtgattttatcctcatgcgtgatgccagcaatgagttcgtcaatcacgatgctcgtcttagggtcaagacctgagttcggttcgtcacagaaaagatatttcggttgcagcacaatggcacgcgcgatagccacacgcttctgcataccgcccgaaatctcgccggggaacttgttttcagctccttgcagattgacacgcgccaaacaatcaagtgccctgcgtttgcggtcttcgtaagcatcatacgaaaacatgtttaagggaaacatcacgttgtccaacaccgacatggagtcgaacagcgcagcactctggaaaatcatgcccatctcacggcgaagcaagattttctccttcttcgacaaagacacaaaatcacggtcatcgtaataaatgcttcccttggtcggtgtgagcaatcccacgatgttcttcatcagcaccgtcttaccgctaccactctgaccaatgatgaggttcacctcaccatcacggaacgtggcattgatgtcctgaagcacttccctgtcctcaaaactcttgtataagtgttctacttttatcatgtcagcatgtttgtcaagaaaatatcagaaaagagtacaagaatactgctggtcaccacagcatcggtgctcgacttacccacttccacactgccgccttccacggtgtaacccttgtaggcagagacgctggtgatgatgaagccataaacaaccgccttgatcataccgcaccagaagaaccattggttgaactgataacggaaaccctcatccagttcaggtacagtggtggttcccatcaacgaggtggcgtatgcacccatgatacccgcggccacactcaatgtaaccaagatgggcatgatggtcatcagccctactatcttaggcagtatgaggtaattagcagaattgacacccatgatgtcaagcgcatcaatctgctgcgtgatgcgcatggtgccaatctccgaagcaatgttcgaccccaccttacccgcaagaatcagacacatgatgctcgatgaaaactccagcaacataatctcacgcgtcgtgtaaccaaccaccatacggggcatccacggactctgaatgttcaacttgatttgaagacaaatcaccgcaccgatgaagaaggagatgatgagcacgatgccaatcgaattatatcccaattgatacatttccgtgacatattgcttcaagaacattctccatctgtctggctgtgaaagcacacgccccatcagcatgacatacctacccagatgggttaatccactctttattgaaagcacttctattgtgattttaatgatttataaatggcaaaatcttggcaaaattagtcatttttgttcaaaagagccgcttttaacatagttttttcttttataaagtgactaatcgccaaacaattcgtacttttgtaactaatttgaattgatatggagctaaataaacaatccataaccaccaacgcgggcgatgagaacataccagagttttctgacgaacggaacacactctacactcgtgatcttgtcaagatatacggaaaacgcactgtggcaaacaatgtgtccatcagtgtgcgtcaaggagagattgtaggactgttgggaccgaacggagcaggaaagaccacgtcgttctacatgacgacgggtttggtggtgcccaatagcggacgggtgttcatcaacgatgaggaaatcaccaaagaccccgtttccacccgtgccaagaaaggcgtgggctatttggcgcaagaggcaagcgtgttccgtaccatgagcgtggaagacaacatcatgaccgtgctggagatgaaatacaagtccaccgaagagcagcgggagcatctcgaacggttgctcgacgagttcaacctgcagaaagtgcggaagaaccgcggaaatcagctgtcgggaggtgagcgacgacgttgtgagattgcccgttgtcttgccatcgaccccaaattcatcatgcttgacgagccgttcgccggtgtggaccctatcgcagtggaggacattcagtatgtggtgtggaagttgaaagaccgcaacatcggcatcctcatcaccgaccacaacgtgcaggagaccctctgcatcaccgaccgcgcctatctcctcttcgaagggcgcatcctcttcaaaggcacaccgcccgagttggcaagcaatcccattgtgaaggagaaatacctcggaagcaattttgtgcttcgtccaaaagacttccagatgattgaagagaagaagaaaagagagttggaggataattaacacattaatatattaaatgacagaaaccgaaaagttagtgaagtcctgcatcgcaggcatccaagaaaagaagggaaagaaaatacgtgtagtcaacctcgaaggcattgacgatactatcaccaaatatctcgtcatcggcgaaggcaactcacccagtcaggtggcagccatcacagaatctgtgcgcgatttcgctcgcaaggagcagaatgcgcgtccgtcggcattggacggaacaagaaacaacctctgggttgccatcgactttattgatgtagtggtgcatatcttcgtacccgatgcacgcgagttctacgatgttgacaacctttgggaagacgctgaaatcactgacattccagacattgattgacgaaacatgagtacaaacaacaataacagcaacaacaaactgcaaaagccacgcttcaacttcacgtggctctatatcttgctcattgcaggattggcattcatgatattcacacgccacgacacatcagcttcacgcagtgtcgattacaccaccttcaaggattttgtgaacaagggatatgtggctgatgtaactgtcaacaaagacaacaacaccctcacccttgccatcgattccaaacacgagaagcaagtctttggtgctgtgagcaagaacaagaaacccgcccgcatcaaggtggagtttggttccattgacaatctggagagttacctcgacgcacagaacaaagagggcaacttcaaaggcaaggtcacttacgaacgcgataacgacttctttacgaatctcttgtggaacttcgcgcccctcgtcatcatcatcctcatctggttcttcatcatgagaggaatgggtggcggcggcttcatgggaggtgcgggcaacatcttctccgtaggaaagtcgaaagcgcagctcttcgagaaagacgacaagaactctccgcaaatcaccttcaaggacgtggcaggacaagctggtgccaagcaggaagtgcaggagattgttgatttcctgaaaaagcccgaaaaatacaccaacctcggtggtaagataccgaagggcgccctcctggtgggacctccgggaaccggtaagacccttcttgccaaggctgtggcaggcgaggctggcgtacctttcttctccctgtcaggttccgaattcgtggagatgttcgtgggtgtgggagccagcagagtgcgcgacctcttccagcaggcaaaggcgaaagccccctgcatcatcttcatcgacgagattgacgccatcggtcgtgcccgcagcaaaactgctgccatgggaggcaacgacgagcgcgagagcaccctcaaccagctcctcaccgagatggacggcttcggcaccaacagcggcatcatcatcttggcagccaccaaccgtgctgacattctcgacggtgccttgctccgtgccggtcgcttcgaccgtcagattcacgttgacctgccagacctcaacgaacgtaaggaaatcttcatggtgcatctgaaaccgctcaagatagacgagaccgtggaagtagcacagctggcacgccagacaccaggtttttctggtgccgacatcgccaacgtctgcaacgaggcagccctcatcgcagcccgcaacaacaaggagtgggtggacaagcagtgtttcctcgatgccgttgaccgcatcatcggtggcttggagaaaaagaccaaactgctcaccgcacaagagaagcgcaccattgcccttcacgaggcaggacacgccaccatctcttggttcctcgaatatgccaacccattggtcaaagtcaccatcgtgccacgtggtcaagcccttggcgcagcatggtacatgcccgaagagcgccagatttccaccaaggaagagatactcgacgacatctgtgcgacactcggtggacgtgccgctgaagaactcttcacgggacgcatctccacaggagccatgaacgacttggagaaagtcaccaagcgcgcctacggcatgattgcctatgcaggtatgggcgacaaactgcccaacctctgctactacgacaatcaggagtaccagttcagcaagccttatagcgacaagactgccgaggccatcgacgaagaagtgcgcaccctcattgcaggcgaatatgaacgtgccaagaaagtgcttttggagcacaaggacggtcatgcacaactggcacaaagactcatagaaaaagaagtcatctttgctgaagacctcgaagacatctttggcaagcgcccgtggacctcacgcaccgacgaaatcctcgcatccaatgccgaagacgagcagaaagaaggtgagcaaccctccagcggtaccgaccacaagaaagagaacgaggaaatcatccgtcagaagattgtgcaggcagtccttgagaaggcagagaaagccaaagagaacggacaggattccgacaatcccccctccgacaaaccaaccgaaaccgacaaaccaaaagaaacgtgaaaaatctgattatacgtgccatcacgggtgcactattcgtcatcgtccttgtgggcggaatcgtgttcaacccctactctctcctgattctcttcaccgtcatcacagccttgacggtgtgggaattcactacgattgtcaatcgtcacatgcacctgcatgtcaaccgtttcatcaccaccgttgcggcagcctacctctatgtcgccgtgtgggcattcaacaccaacatcatgggcgcggaggtcttcatcccctacctcatttccatcatctacctgttggtgtctgaaatctacttcgaccgccccgaaaacatccagaactggggcatgaccttcatggcacagctctacatcgctctgccactcgcatcgctgaacaccctttgtttcatcagcacaccagcaggagtgacctactactactggtacgccctgtcgttgttcatcttcctgtgggcaagcgacaccggcgcctacctgttcgggtcatggctgggcaagcaccacctcttcccgcgcatctctcccaagaaatcatgggaaggcagcatcggtggaggcatcacagccattgccgcctcacaaatcattgccagtttcatcccctttgccgaaacactccccgacaccaccagccgcctcctgtgggcaggacttgccctgctcaccgtcattgtcggcacatggggcgacctcgtcgagtcagtgctcaagcgccgtctcggcatcaaagactccggcaacatcctaccagggcatggaggcatgctcgatcgctttgatagttcactgctcgccattcccgcagcagtcgtctatgtctatacaattatgcttaatataattcactaaacaactatgactgaaattcagaaccccactgaggaacctgtagtggaacctacagccgaacctgcaaccgaacccgttgcagcagaagaaacagcagccgttgcagaaactgcaaccgagccagtagccgaagaagccgctgagccagtagccgaagacgctgccgaagagcctcaggcagaaacctcaactacttctttcgccacctacgaaaccgaagcagaagtcgtcaaccgtctccgcgagatttcagaaagcgacgaagaggtcactcgccaagaactcgacagcctcaaaagcaacttctaccgcatccatcgccaagaggcagatgccgcctacaagaagttcatcgaagaaggaggtgcagccgaggagtatgctccagaacccgaccccgaagagaccgccttcaaggaattgatggcagccatccgcgagaagcgtgcagccattgctgccgcattggaacaggaacgtgaggcaaactatcagaagaaactcgaaatcatcgacaagataaaagcgctcacggacaatcccgacgagattaaccgtggctacaacgacttcaaggaacttcagcagcagtggaacgacatcaaggaagtgccagcagaacacgccaccaccctctggaaaacctaccagcaggcagtcgaggcattctacgacaccctcaagctgagcaacgaactccgcgcctacgacttcaagaagaacctggagcgcaagaccgccctctgcgaggcagccgagaaactggcagaagagaccgacatcatcgtcgccttccgcaagttgcagcagctccatcaggacttccgcgagacaggtccagtggcaagcgaactgcgcgaggaaatctggacacgtttcaaagatgcctccaccgtcatcaacaagcgccatcaggaatacttcgaagcccgcaagcagaaggaagaggagaacctcgaaaagaagaccgccatttgcgaaaccatcgaaggcttcgacatcgaaggactgaaaacctttgctgaatggaacgccatctcagagaaaatcaccgccttgcaggcagagtggaaaaccatcggctacgcaccccagaagatgaacaccaaaatcttcgagcgcttccgtgccgcatgcgaccacttcttcacccgcaagaacgaatacttccagtcagtacgcgaaaacctcaaccagaactatgccctcaagctcgaactcgtcgagcaggcagaagcactgaaggacagcaccgattggaaagccaccaccgacgcactcgtcgaactgcagaagaaatggaaggaaatcggcaccgtgcctaagaagtacagcgaccagatttgggagcgcttcaacgcagcctgcgatgccttcttcgctgccaagaaagaggcaaacaagggtgcaaacgaagagcagcacgccaacttagaaaagaagcgcgccatcatcgacgccctcacagccatcgtgcccgaagagttcgaaggcgacctccgcacccgactccgtgaagcacaggacgaatggaaccagattggtcacgtgcccttcaaggagaaagacaagctctacaagcttctccgcgaacagatggaccgtctttatggctatgccaacgaacatgccgcaaagcgtcgcatcgaccgcttcaaggagagcatcaagggaggcaacggaggtgatgtacgttcacgccttctccgtcagcttgacatcctcaacaacgagatcaagacctacgagaacaacctcggcttcctcaccctcagcagcaaatccaagcagggcaacagcctcatcgaagagctcaaccgcaagatggagaagctcaaggcagacaaggaagaagtcagagccaaactgaaagcactcgacgagcagtaatgctcaccgcatcataccaaaaggagggttgccaccaacggcacaccctcctttctatttaccccccttcatgcgaatgaaaaaacaaaaattttaccatttctttgaaaatgaaaaatgaaagaatgagaaaatgaaatatctacgatgtgtctgtcaacgctaaactctcaacctttaacattacacattttcatccaattttgtttcatattaaacatagtggtccattggagtttagcactaaacgattctgccgttccccgtcttctcgcccactgctattgaggtatctcacccatacacccaatgatgtctcactcatagaactttctgtttttattgtttctgtctgataagttcaaaaggaggaaaagaaaagaataaagcagtaagtagtacgggagaaggcaggctctatgcatactcagacagtatgcttagagtaagcttagaagcagcttagagtatggatagatgcatgataggagtatggtagaggctcgtaagagtgtgtgtcctctggtgctccttgtgttcgtagtggtaagatagtagtaaggtagtaggttcgtagtggtaaggtagaagttggtagtagttgtcaactgtcaagtggctacgacgaatgctctaaaggttctctgcttacaactcaaaaagtttagtgcagtgctaaagttaaaagttaaaaatcattttgagcatttttctcatttcagcacagcgtatttgttgtctttctccagatgttgttgacggcaataaaaactggaaaaatcttacgtttcttttgtattgtgttcggttttcactaactttgtcacacaaaacctgaaaaaaagtaaaacctgtaccgtgatttggaacaacacaggtgtacctttgtagtcggaattaattagcaaacaaaacaataataagatgaaagaccagaaacaattcgtaggtttatactccgttactaaaactttacgcttccaatcaggaggtctttcacatacaacaaaaaagcccccgttaaggacgagggcaaaaacctgaatgttttcacaacggaataatccttattgtgatttgcttcaaaagattttgtgatgtacagaaatatttctatatttgcatacaaaaacaataacaatcttctataaccagatacaaaaaaagtcccacgaaacgcaggactaagaagattctacggcttatagccttgttgtgaaaagtctttcacaattagtatctgctgcaaaggtacgcataaatttgatactaacaaacaaaaattgaaataaaatgggaagaattctaggaattgatgtcggaacgaactctttagggctcgttgtacgtgatgaagacatatcgacaaatccgacagaacaaattgttttcagttctgtcaacctttttgattctggagtcggtaatgggcaaagcggagaattttcttttgcggcagaacgaacaaaatccagaggacatcgaaagttgtacaaattccgaagatatagaaaatgggaaacactaaaactccttattgaacaaagtgacaagaaatactgcccgctttctcaatcagaactcgaacaatggacaacatatgataaaaagcgagggctcaaacggagatatcccattgatgctcttcctttccaacaatggattcgtttagacttcgatggtgatgggaaaccagactattcgtctccatatgaattgagaaatgaactagccacgaaacaattggattttgaagaagaaatcaatcgctttaaattaggaagagcaatctaccatattgcagaacgaagagggttcaaaagcagtaaaggacaaaccattaaagaacaagaagacaatattacagaagatacagagctacaacaatccgagatggacaaagctctatctttcgataaatcaatctatcctactgttagttgtgctttatatgctatcaatcaatctggtcagcgagtccggaaagaatgttccgttatcaggaaacaatataaagaagagattgaatatattttcaactttcaaaagggacttgatacccaatccgacttatacaaagggctcatttctgaaaagaaaaaggatggaactattttttacaagaatcctctaaagtcacaaaaaggactcattggaaagtgtacgcttgagccgaacaaaccaagatgcccacagagtcgtccagaatacgaaaaattccgtgcatggagtctcattaacaatatccgcttcggcatagattgtaacaaagaacttcctcttgagaccaaaaaagcgctcttcaacgaagtatttgtccgagcatctgatttccgatttgaaaccatcagaaaatggattgagaacaaaacaggagagcatcttgtttataaaacagacaggaaacagcgtaccatcaactataaagacaatactcctgtcatcgcttgctgtgttacattccgattcaaacaattattaggggagaactggcaagattggtctttcctacctaacactcaacatacaaacagcaaagataagactcagaagcatcccacgacataccattgggaggatgtttggcacgtttgcttttgtgcggacgacgaagagcctttacgattatttgcaaataaaagcagccttgattacaccctcttgttaaggttgtggaaagccatgcccatcgcatatgcaaatcttagtttgaaagctattaacaatatcaacaggttcctagaaaagggactgatttataatgaagcatgcttgttggcaaaattgcctgacatattcaaaagcaaatggacgaacgaagtcgaagcgatactattagattccattacgtctattatcaaagcaaataatgaagaaagaaaaattgtaaacatcgccaactcacttatcgcaaattacaagtctctggaatacgatgaaaaacaaggatttaaggactacttgtacaatctttccgagaatgattatcgtgatattgagaaatgtgcaataggattctacggaataaaaacatggaacgaaaaggatgacaatgaacgaacgacgcttataaagcaaatcgctcatttgtatcagcattttttccatgatgaaaaacgacaatatattaagccaaacaaaatagaagatgccatcaaacattttttagcagacaactttgaagatttagattccaaagatctatctaaactttatcatcactcacagatagaatattacaagcctgcatctatctgcagagtggaaaaaggtgacaaggtgctgtacatgaaactattggagaatccagctcttgcttctttaagaaatccaatggctcttcgtgtattacacaccttaaagcgtaaagtcaacgacttgctaagcgaaggtattatcaacgaagatgacactcgtgttgtagtagaggtcacccgtaaacttaatgatgcaaacatgcgttgggctattaaacattatcaagatgttcatgatgctgaaaatgctgagtatcgcaaaatgattgaagagcatttaggatcgtatgaagacattccaaaagtacgaatgcttgtagaacaacatgattgcaatgggcaaacatctcaggaaaaggcaaatcaaaagcaggagttttattatgagcgttatatgaccgacctcatcaaaaaatatcgcctatgggtggaacaaggaggattctgtatctatactcgaaaacctataacaatcagcgccctcatcaatggcggaagtgtggacatagaacacaccataccacgtagcttgtctttcgatgattcactatgcaataaaacattatgcgattcctattttaatcaaaagattaaagagaaccgcatcccctcgcaattggctaattatgatgacatcttgttaaacattcagccatgggtggaaaaagtggaagacattcgaggacgtgttggcttttggaaaaataaatccaagaaagcacagacaaaggaacaaaaagatcatgctattcgccagaaacatttatgggaattagaattggattattggcagaagaaagttgacaaattccttgtcaaagaagtgacaacgagcttccgcaacaatcaacttgtggatacttctattattgcaaaatacaccatgcattttctgaaatcagtcttttcacgtgttgaagtccagaaaggcaaaaccacttctgacttcagaaagattttaggaattcaagatgatgatactttaaaagttcgtgacagtaattcacatcatgccattgatgcaatggtcttgaccttcataccagttgcagcacgtcgcgacgaattacttgaagtcttttttgaacgtcaggaagctaaagatatggggcatgatgtgtcgcagtttgacataaagataaaacagctgttacgaaaaagtggcattacagctaattttagcgaaattgttgaaaacattaaatcaacagtcctcgcattcaacgaaagaagaagccaagcactcacaattgcaaaacgcaggaaaagagtgaggggaaaaatcgtgcctcaaagagacgagaatggtaaaattatcatggaaaaagatgaggaaggcaacttcaaaacagaccgattgggtcatcggattcctcttgcaaagcattggatcaagggggattgcataaggggagaattacatgacaagacatattatggagccattacccaatatggtagtgatgatattaaatatgtacttcgtgttccactcaaatacaaaacaaatagtttggacaaaggcttcaagagttgggatgagttgcaaaacgctattgtaaataaagcattagtgaaaatgatgaaatcacagttccctgaagaaacttcgttcaaagatgcgtgtgaacaaggtatttatatgatggataaagacacaaacaagataaatcgcatccgccatgtaagatgttatgcctcatctgttaccaatcctattaaagtcaaagaacaggtttataggtcggataaagaatataagaacttctattatgccaagaatggcgaaaacattgcttatgccttatatgcgaatggaaagaatagagcttatgaatgcctctcactaatggatgctgccaagattagtaatgtggaaggcgtacatgatttagcatcagtattcccagaaacgaaagaggtcataaataaaagcgggaaatgcaccgtttacaataaagtattttcactaattcctggacaaatggtgattttgaaaagggatgatgaaatgcttatgtcattaacccaagaagaaatttcgcacagattataccgattaaaaagaatctacagtcctgatgatggtcgcctacaacttcagcatcatttagaatcaagagatgataaggcgcttgaacaagcatatcccaataatggaagaagtggaaaaaatggattctcgaccattaattacgaagaaccatatccccgtcttttgctgtcactttctaagcaaaacttttggatagaaggcacagacttcgttattaaaaatggcaaagtaattgcattatgattaagaagaccctctactttggcaatcccatctacctcagcctccgcaatgcccaactggtgttgcggaagcctgatgcggacaaattggaagagtcgtttaaacagggtgccgaacgaaccattccgattgaggacatcggtgtggtggtgctcgacaacagacgcatcaccatcacgacaggggcgatggagactctgcttggcaacaactgcgccatcatcacatgcgacagcaccaacttgcctgtggggctgatgctgcctctcagtggaaataccacacaaagtgagcgtttccgcaaccaaattgatgcttcgctaccactaaaaaaacagctttggcaacagaccattcgacagaagattctaaatcaggctacggtgctgaacaagaataccggagcgatagtcaagaatatgcaagtgtgggctaacgaagtgaagagtggcgaccctgataatcttgaagcacgtgccgccacctactattggaggaacctcttccccactcttcccaacttcgtccgaggaagggaaggcgaccctcccaacaacttgctcaattatggctatgccatccttcgagcttgcgtggctcgcggattggtggggagcggcctcttgcccacattgggcatccatcaccataaccgttacaatgcctattgtctggcagatgacattatggaaccttatcgtcctttcgtggacgacttggtcatcaacatcatgcaagagtaccccgattacagcgaactgacacggagcatcaaggcagcacttctcacgattccgtcactcgacgtgatgctagatggaaaacggagtccactaatgattgccgttggccaaacaaccgccagcctcgccaaatgcttcaacggagaactgcgtaaaattgcctatcctgaattgtagaaaacagagaacatgagtagtttgtcacgcctcaccgaataccgagttatgtggattttagtattcttcgacttgcccaccgaaacaaaaaaggacaagaaacgctatacggactttcgcaagaaactccaaagtgatggattcaccatgttccagttctccatctacatccgacactgtgccagcagcgagaatgcagaggtacatttaaaaagagttaaatcttttctgccagagttcggaaaggtcggattgctaaccataactgacaaacagttcggcaacatgcaacttttctatggtcaaaaaccaactgaacccaaaacgcctggagtacagttggaattattctgaaaatgaaaaaaccagccgtcaagctggatttttcatgtcatacccccttcttttttattttctaatcaccccaataaccttttgatactcttttacttacaaagattcaggtgtatatgactatgcaaagatactaatttgaaagcaaatcacaaccagcgatggtgtggcattcacggcatattaggtgtatatgactatgcaaagatactaatttgaaagcaaatcacaacccagcgcggcaagggttgccacgtgtgggaggtgtatatgactatgcaaagatactaatttgaaagcaaatcacaactgacgggtgaaccgtcaagcgcaggagggaggtgtatatgactatgcaaagatactaatttgaaagcaaatcacaacgtcgtgccgatgttcttcatcgtcatcacggtgtatatgactatgcaaagatactaatttgaaagcaaatcacaactgaagaatggaaagtaactctcatcggtcacggtgtatatgactatgcaaagatactaatttgaaagcaaatcacaacgtgggtggggtgctcctcatcgcctgcaggggtgtatatgactatgcaaagatactaatttgaaagcaaatcacaacggtcacggtaagcatcccagttggcagacgggtgtatatgactatgcaaagatactaatttgaaagcaaatcacaactatcactaatcctttaatacctaattctgaggtgtatatgactatgcaaagatactaatttgaaagcaaatcacaacctttaggttggactgatattgctaatcccggtgtatatgactatgcaaagatactaatttgaaagcaaatcacaactgtcctttatgacagtcttttctccaggaaggtgtatatgactatgcaaagatactaatttgaaagcaaatcacaacgcaacagccctgcagcctgcttcacatacaggtgtatatgactatgcaaagatactaatttgaaagcaaatcacaactgattctcacaaattacatgaaaaccattcggtgtatatgactatgcaaagatactaatttgaaagcaaatcacaactctcgccctggatggtgttcacatccgatggtgtatatgactatgcaaagatactaatttgaaagcaaatcacaaccgaacctggctgcatcagccgcgagctcttggtgtatatgactatgcaaagatactaatttgaaagcaaatcacaacatctgctggctgctgtctcaggacaagaacggtgtatatgactatgcaaagatactaatttgaaagcaaatcacaacttcggcacacgtctgaactatctgttgcaggtgtatatgactatgcaaagatactaatttgaaagcaaatcacaacttcctgttgttgtttgctgtagttttcataggtgtatatgactatgcaaagatactaatttgaaagcaaatcacaacttataacaggtggtaaataataaacaatttggtgtatatgactatgcaaagatactaatttgaaagcaaatcacaacagagcactgtccgctatactcgccctgaggggtgtatatgactatgcaaagatactaatttgaaagcaaatcacaacggcatgcttaggatgctcggggtgaaggaggtgtatatgactatgcaaagatactaatttgaaagcaaatcacaacgaactcctgaacacgacgaacagcgtcgcggtgtatatgactatgcaaagatactaatttgaaagcaaatcacaacatatgtttcagtttgattccaaaggaaagcggtgtatatgactatgcaaagatactaatttgaaagcaaatcacaacagtcgcgggcatgttccaatttcctcaagggtgtatatgactatgcaaagatactaatttgaaagcaaatcacaacagaattggaagaagggcaatgacagtgggaggtgtatatgactatgcaaagatactaatttgaaagcaaatcacaactgctttttaggcatcaaaatgttaaataatagatttttttctattatttttataagatgtttgtttaataatagaaaatttactacctttgtgttgtcaaaccatttattatcatgaagaagcttattatcaacctttgtgcaagcactgacagcttcggtgcatttgcagaaaatgctgagggtatttatggcgcaggaaacaccattgaagaatgcaagaaggatgtcctcctttctatcgaacaaatcaaggcgaaccttcctgaagaacaatggcctgacatcatcaagggagagtatgaagtggagtggcactatgacgtgcagagccttcttctccactatggtggcattatgtcattgtctggtattgaacaaattactggtatccatcagaagcagttgtgggcttatatgcatggacgttcgaagccgcgtcaggcgcaaaagcaacgcctggagacttcgcttcatgctttcggggcagaacttgccaagatggcagtactatagtataccccatgtttgtttttgtttgacgacgtaaccaaacgtggcgcccggtgccgttgacggcatcgggctttttagacaacttcaatttctgctaatagggaatatgatagcactaaagtttacaagtgctcaacttcctaggagttaaggagttatcgctacgctcaggagttaagccattacctatatttcgtggtttctcacctcatgctgttctcagccagcaggtcgtagcggataccgtcgttcagcatggagactccgattggttctgtttcgggctgcttctcggttttctgcgagggagtgcttcgttttgccaactggtgaggcgtgatgggttgactgactggttttacttgatacacagtgtcgtgtaccacttcgtgcacggtcacagtgtcggtgacaacgatggtttttgccaattctgatgcaggtgtctctgctgacgggcgcagatataaacccaaagcgaaacctgcaagacaggcggctgggatggcgacataccatccccaacggctctgacgcttccagggacggatgtgcatgcggtcattttgttcctgacgcagttggcgagcggcagcaatgatgtcgtcattgctcaaggggctctgtggggaatgtgtgttatgggttgtcatattgctgtagtttttttcggatgatggtcattgttttgtgcagtctcgatttcaccgttccttctggcagatgttctatctgtgcaatctgcgggatggtgagttcctcctcatagcggagggagaagagcagtcggagcggtggcggcaaggactgtaagacggagtaaagggcttcgttcagcctttccttatccatcttcacttccacctcctcgtcgctgacgggttcgacatcgagggtggagaggtagtcggtcacatgctcgttgtgacggtaggtgtttttgcagagattgtaggcgatggagaagagccatgtggcgacgttgctgtcttccagatagcggtcacgtgcctcatacattcgcaggaacacgtcgtgggtgtagtcggcagccagcatctcatcgccgcccagttgacggaagaagaaaccctgcaggcgtcggacgtatcgacggtagagttcctcaaatgccgactcgctgcctcggctcacacggagcatcagctgctcgtcggtcatctgacggtttgatttgaagagaagaatgctcatgggttcactcctgatcaaggttcaacttcatcgtttcatactccagatagctgggactgtccgcctccagactcagattcgtcatgtcgtagccttgcgaatgcagccgctgatagagatgggacagcaattccctgagccacgtgtagcgttcggcgttgtgcttcttgtaatagggaagttggtcgcgcaacaggataatgtagttcatggcataaaggtttccctccgcactctcccgtttctctggctggaacgacatgcgcagatactccaaccagtagcgcgtctcgatgttgcgccgcttcaccgccatgttgtcgtagggctttggggaatagcgcagcgtgagtccctcgttgtagaagtgaggctgcaaatccttcggaatgccttccccgaggcagaaccaggtcacgcttgtggctgacacatagacgggacgcttggaatgggtgcagatatggcggaagatgcggggatacgattcgttctgatagggcgaccagagtttgtcccacaaggcatcatcgaaatccatgccgattcgcttgaagacgctcccgatgtattctttccataccgcacaattctcgttgtacagaattttgtcgcggtgcacccccttcaccagttgcaggatgagcttgccaatgatgtctccatcgtaaggagccagatagacagccccctcgtccatgccctgcagttcgttgaaatgatattgcagttcctcggctgggtagagcccgcgttcgtagtattcggtcagcacgcgcgtcaaccgagcggtgtcctgcttggggatgagatagcccgcccatgtcttataatccgacgccacggcatcgtgcggcaagtggtcaacggcaaggtcggcaaacttttcatagtgttcgaagaactcttccgagctccatccgtcctcccggtatgctccttcgtacgcgcaataataaaatgtataggtatcgggtatcgcctgcttcatgcgacccaccacattcagttccttgcgcagttcctcgcccttgttccagtccttgaagtgcagacgctccaccaagccgttttccacttcgaagaggtttcgccacgccttctcgtccttcgggtgctgagccacgaagtcgttccaatagctgtacaggctgtccagcttttccttcttctcgaggagcatctcgatatgcccttctatctgttccgtttcctgcgcacagacatttgctgtacctgccgcgatgagcaacaatgcaatcaatatctttttcattttcttctacgttttgtttggttttctaattgtttcactgtccgaaagcacttgacgtctttttgcttttcatgacagcatacacccgaaaaccgaaaccgttcacaaaaacagcatcttttttggctcactcgtaaacacctgtgtctgtcttaaacaaaaacactcgcaagtaataaaaccgcggatttagccgatttcacggatttatttctacaaccacgaatttcacgaattgggagagccttggcggctcttgggaaaccatccggacggggctttcgccaagaaagccaaaaattcgcattcgtataattggctacgccgagctaaaggttcgtggtcaagaaaatccgtttaatccgctcaatcgttccgcaggaacttgtttataaaagacataccccttcgggatgattaagctgattcagcggatttataggatttgaatcattttgtctggaaataaatttgaatgattttgaaaagatttgtacgatttcgcccgcagggcactcccccacacgcc

SEQ ID NO: 602 - DNA, 13394 bp, synthetic construct
  misc_feature 1..13394: note = Synthetic
  source 1..13394: mol_type = other DNA
cgatccgcagtgcctctgccagagcggcatggctgagctgatccagaacggccagctcagcagcgattttcgtagctggttcccggtgctcagccccggcggcaccatggtccccggcatctccggcatcaaaccccgcaccaccatccgcggcgacgcctgggcgtaaggcggacctgtcgtcgaactcccaaacccacggcaaaccgagtcccaatcccgcaaaaaaggtgcccccgatcgtcgtttccgacgatcgggggcatagcctgcgtgatcttgccacagcaagtgacaagtcacttgttgtgagaagacaccaggccggggtcggttacaatgcccttatcttcccatgaaacgctggacttgtcaagcgttttctgagatgatgcaattcatccgcgtgggctggaaacgcgaacagggcggcagttgaaggagatgcggcatggttccatacgtgctggggctggatctagggccaacatcgataggatgggcacttctcgggcaggaaggcgacagagaagtctcgctggttgacgctggagtgcgtatctttcccgagggagtggatcgggacaccaagggtcttgaaaagtccaagaacatgacccgccgggaagctcgcggggcaagacgcatcaaggaacgtcgcagaaggcggaaaggccgactcgtggcgatcctgaaggaagcgggtctgtggcccgacgacgaccagagctttcggagtctgtgtcttcttgacccgtacgaactccgcgccaaagcgctcgatgagcggctggcccctcacgaacttgggcgggtcctgtatcacctgaaccagcgcaggggattcaagtcgaatcgcaagtccggcaagtcccgagaggatggcaaagtcctcaagtccatcacggagctcgaagagcagatcgcttccgcgaaatgccgaacccttggcgaatacctgcatcggcttggaaggtccgaacgcattcgaaatcgctatacgcgacgcgagatgtatcagcgggaattcgatctaatctgggccaggcaaacggaataccacgggccaatcctctctgatgaactcaagaagaagctggcggacgaggtaatcttctttcaactccccttgcgggttcaggatgaactgatcggcttctgcgagttcgagaccgaccagcgccgatgtccgaaggccgactggcacgcccagcagttccgaatgcttcaggacatcaacaacctccagatcatcaaccccgacgggtcaagcatgcctctggctcccgatcagcggcaaaccctggttgaggtccttggaaccagagcgaagatggacttcgaccaaatccgcaaggcgctcggtctgcttgaaacgcaaaccttcaactacgaggaagggaaacgcaagagcctgaagggcaacctcatggaagcgggccttgccaaggcgttcggcaggaaacgctgggccgaaatgcaggctcaccgcgaccgcatcactgaagctctgctggaaatcgaggacccaaacgaatttcgccggattgcaggggaagagtgggctgccgacgatgagcagattgaggcgcttctcaagatcgacctgcccgatggctacctgcacctctcgaagaaggccatcctgaagcttctgccgttcatggagcagggcgaacggatggccgacgctgtgaagaaggctggataccttcgtcccgatcagaaggccggtgacaatcacgaccggcttccgcaaccgccggatatccgcaatcccattgtcaagaaaagccttcacgaggtccgaaaggtcgtcaacgcgatcatccgggagtacggcaaaccggcccggatcgtggttgagcttgcccgcgacatgcacggatcggtcgatgaccgtaacgagttgcaccttcggatgctcaaaaacgagcgggagcgcgaagaagtccgcgagagcatccgaagcgaatacgggatcaccaatcccggccgcgacgatatccagcggcttcgcctctggaacgaacagggccagacgtgtccctacaccggcaacaccatcgccaggagccagcttttcagttccgacgttcaggtcgatcacatccttccttacccgcgatcgttggacgactcgatgatgaacaaggtcgtttgcttcacgtcagcgaaccgggaaaagggaaaccagacccctcaggagtggctggccgcctttcccgaccggtacgaacgcatgctccaggcgatcaagccgctcccgtggcgcaaacgccgaaagttcacccagcaggcgattgatctgggccagtgcatcgaccggcaactgaacgacacccgatacatcagccgcgaagtgcgcaggtacttgcagtcgcttgttatggatgttgattgcacccgcggccaggtcactgctgagcttcgccaccactggggtcttaatcagattctgaaccataccggcgggttcaccaagaatcgcgacgaccaccgccaccatgctgtggatgccgtcgtcgtcgccctgaccacgccttcgcacctgcaacaacttgcccgcacaaaagggattgtccgtgatcctctgccgtttccctgggagcgctttcgcgatgatgtcgccaatcggatcaacgacatcaacgtctccttcaggccgctacggaaggtctacggggccttacatgaggaaactgcctacggaccgaccgccgaggagaacgtctatgcttaccgtaagtcggtgcgagacctcaaagggcccatgatcgcgcagatcgttgatcccgccatccgcaatctcgtgatggagcgcctcaaacagaagggccttgatcccaacaatccgccctcgaatattcccacggaagtttttgccgaacctctaacgatgccatccggagtgcccgtcaagaaagtccgtatccgggacacgtttacgaatctgatccctatgacaaagatgaagacccgaacgggcaagccgtaccggtacgtcaagcctgggtccaaccaccacattgaaatcttcgagtacaccgacgccaagcgggtggctaagcgagatggcgtggtcgtgtccatgttcgacgccgctcaacgcgttcaaagaggtctccccctaatcaaccgcgaccatggatcaggaagaagattcgtcatgtcgcttagcaccaatgaactggtccacgttaaggtggatggacagtatgtgctgtatcgggtccagaagcttgatgcagggaataccagagtcattcttcgactccatacagattccagggttgatgacccgcgcacagtcttgcgcaagagccccaacacccttgacggatataaggtaaccgtcgactacctcggcagaatgcgcccggcgaatgattaagcggaccgtcgaaatctcatccagtccgtgccgcctgtcgctgcggcaagaacagatgatccttcagcgggaagggcaagacgatgtctcgattccgtgcgaagatatcggggtcctcgtcctcgatcagcccgctgtgtccgtctccggccaggtgctgacggcgcttctggaaaaggaggcggtcatcctgctgtgcggaccggatcacctacccgctgggatgctcgtgccattctcagccaatctggtccagacccagcggtttcgggagcagatcgcggccaagctgcctcttcagaaacagctctggaaacagatcgtccaggccaaaatccgccatcaggccgacctgctcggcaaggaccatccggactacagccgcctcatcgccctcacctaccgcgtcaagtccgccgacacgtccaacgtcgaggcccaggccgcccgcatctactggcaggccatcttttgcgatagccgctttcggcgcaagcgcgagggcgatgcgccgaacaactttctcaactacggctacgccgtcctgcgggccgccgtcgcccgcgccctgtgctgttccggcctgcatccatcgatcggcatccatcaccgaaacaaatacaacgcctacgcgctggcggacgacctgatggagccgttccgaccgatggttgacgcgcgggccagacagattgccctcgatggtaagaccgagatcgaccgggacgtcaaagcccatctcctggctgtgctgaccgatacggtccaacttggggataccgccggacccttcatggtggcgctgccgcggatgaccgcttcgctggcccgatgctttgctggcgaacagaagactttggagatcccccagccatgcgaatctccggataccgggccatgtgggtgatcgccatgttcgacctgcccaccgacacccgtcaagccagaaaggcgtacgcgaccttccgaaagaaccttatcaaggacgggtttaccatgatacaatattcggtgtatgttcggcactgcgccagcgaggaaaacacggctgtgcatgccgatcgcgtggcgtcgtttctgccggatgacggcgaggtgagaatcctatgcatcaccgacaagcagttcgagaagatgaggattttctggggaaaaatgcgcaaaccaacgccgccggcccccaagcaactcgagcttttctgaccttcgaatcgcccttaacccctgccgccgctggacttgcagggcgggtattgtaaccgaccccgacctgcagtcaattcacaactggtgccagaggttggcggtgtccacgtagattgtaaccgaccccgacctgcagtcaattcacaaccaattcgttcatggcgtccgccatggcggaattgtaaccgaccccgacctgcagtcaattcacaacagaatggcgttgacggtcgggttggcccggattgtaaccgaccccgacctgcagtcaattcacaactcattgatcgctaccacatcattgcgtttcattgtaaccgaccccgacctgcagtcaattcacaacgatgcaattgcacttttgtcgcgggtcgaattgtaaccgaccccgacctgcagtcaattcacaacaggtcgaagaggtctacggcaagtccccgaattgtaaccgaccccgacctgcagtcaattcacaactacccgccaaacgggtcgagcaccacgccgattgtaaccgaccccgacctgcagtcaattcacaactggaatcgtgcgagcagtacatggggcaggattgtaaccgaccccgacctgcagtcaattcacaactcctccaatcgtcgtttaggtttccaatccattgtaaccgaccccgacctgcagtcaattcacaacggtcggccacaaactgaccgagtgggacggattgtaaccgaccccgacctgcagtcaattcacaacgttggaagcgttgccgcgtatctcgaagcattgtaaccgaccccgacctgcagtcaattcacaaccgtgctggccgatcatccccaggcccacgtattgtaaccgaccccgacctgcagtcaattcacaacgctgttactggtacggcgatctgaaagccgattgtaaccgaccccgacctgcagtcaattcacaacacatctggtggctcctccacacaagccagaattgtaaccgaccccgacctgcagtcaattcacaactaacggccagcgattcgcggctttggctcattgtaaccgaccccgacctgcagtcaattcacaacccgcagagtcggcggaacgagcacgattcattgtaaccgaccccgacctgcagtcaattcacaaccgacgtacccgccttgatgcacggctcgacattgtaaccgaccccgacctgcagtcaattcacaacattgagaaacccagtgatcatcgaatgtgcattgtaaccgaccccgacctgcagtcaattcacaacgctgctttatctatgtcaaccgccaactgtattgtaaccgaccccgacctgcagtcaattcacaactctagtacaagcccagcattcgccgaaacaattgtaaccgaccccgacctgcagtcaattcacaacgccgatggcggcgaggccacgctgcaactcattgtaaccgaccccgacctgcagtcaattcacaactggtggtggcagttgtgtgtcggcctgcggattgtaaccgaccccgacctgcagtcaattcacaacttcagcagcccggcagtaacctctggcgtattgtaaccgaccccgacctgcagtcaattcacaacatgctgctcggtggccttcatcacgtcccaattgtaaccgaccccgacctgcagtcaattcacaacgacaagcttgcacgtcacgtcgtaggtgaattgtaaccgaccccgacctgcagtcaattcacaactgactatatcggcataatcataatgtgtcattgtaaccgaccccgacctgcagtcaattcacaacttgccgtcggtgatcttgaccggcagcgagattgtaaccgaccccgacctgcagtcaattcacaacgattgccctggcagacgatcccgcggtcctattgtaaccgaccccgacctgcagtcaattcacaacatgaaccctcgccctccccgccatcgtctgccgcgtttgcagtctgctgtttggtgtgctagctcagcctgcagttgacttcatggcgcaatccggcggcgtaggtaaggcgggtcggtgggccttgctactgcttcggcatgtctttcggatattcgaggatttcgtgcatgacgtcggtgagggggccgccgttgggttggatgtgtttgatttgggggtctgagccgaggttggcgtagaggtcggcgcggctgacgatctggaggcgtccgtcggcgagggcccagacttcgccgtctggggtctggcggaggatggtgctggtgggcgtgggcgtcaggacctgggcggcggcgttgtcgatcgtgatgaaccggtcggtaaagtagctgtcgatggacagggcgccgaggtcgcggcggaggccggcgtagatgatttggcggctggggtcggcgaggagtttttcgaaggtcgggccgtagcggacggtggctggggcgttttcgagattgaccaggacgatccggctgtgatggcggagcggttcgtaggtggcggtgaaccacgtgccgtcgtcggcttcgacggagaatccgccgtggtagtcgtcgcggaggaaggcggtgcggtcgttggggattcgccaccacatgccgccggcgggccacgagcagtggacgttgggcgcgtagtcggcgatttggtcggcgcgggcggcgaggcgctgggcgaaggtccgcatccagtcgagttgtttggggtcgttgacgagggcgtggttttcccagccggctgaggtgctcagcaggaagtggtagatgcctttggagccgccggcgatctgtcggctgaaggtatcgaccatgtcggcttcggatcggtagccgacgtagtcgaagtgcatgccgccttcgtggtgggtttcggtggtgaggcaccagagcgttcgcatcgagtcggcgcatctgccgtggccttcgagggcgatgtaggtcaggcgatcaccggagccgtagtcttcgatgccgacgccgtcgaagccgccgtgcaggcgggtgttgccggcgtagcggctgtccatgtaggcgcgtttgaagacgatcggcacgtcggcgacgcgtttgatcgcgtcggcgagacggttgcggtgctccatgaacgagtggtggcgaaagtcgaggtagtcgtaccagagctgggttgtggcgtagtccagttcgtgcgatgttttgctggtcgggcaccaggcgaaggcgcggttttgccacgggctgttgagcggtccggcctggagcggggtcaggttggcggcggaggtaaagccggcgagcggcgtggccgggctgaccgcccatgcctcgtgcagggcggcgatatttcggtatttcgcgcggagccattcggcgtactcggcttggaattcggggaagtggaagaagaagcccgcgtggtcgccgtagatgccgggctcgttgtcgatcggatcgacgatgaatcggaagcccgggcccaggcgcagctgcgagaggtgtcggccgatcgcatcggcgaaacgcgcgccgtgttgccagtagttgccgaaggggccgttgaaggtgacgttggggacgaggtaggcggtgtaggtgtggccttctcgcggcagcgtcaggtcgaccgccacgtcgagcttgttgtcggcgaatcggaagagggcttggccgacgtcgacgagggcgggatcggttcgatcgacgagggcgtagaggacgtggttgacgcggtggattttggtgtgggcggcgccgaattcgatcggcttggccggacgatggacgcccgaggcggtgatgttgtcgatcatgaagttgcccagatggaccgcgtcgcccgatccgctgtcgaggctgcggccgccgatttcctcgaacatccgcaccacgtaggcgtcgaggtgcgtttcggggctgccgtagccgaaggcggtgagctcgaggccgtagcggatgccgaggtcttcgaacctgtcgatcaggtgctgccacatccacgttggcacgtggccgaagcgggcgggcggattgacgtaggtgtcgaggacgccctttgcggcgagcagggttatcgaatggaggtccttggcccactgctgcgggttgccgccgctgacgaggtatctgctttcgaacatgccgccgacgggcaggtagggccggccgtcccagatcagggcgttgccctggttgacgtaccagaagtgcgggacttgccgctcgtcgacgaacgtgccgtagccgagggcgcgtcggaggatcgggtaggctgcggcgttggggtcgtcgatgcggaggcggcccgcgtcgaacgttgcctgggcggcgatgcagacggcggcttggtattggccggtgggaatgtcgtttgggatcggcagttcggcgcgaaaggtgatgcggccgtcatgaatgggtgggaggtcctgatcgtgcacgagccagagcacctggtcctgtttcaggagaattgagactcgtgtgccatcgggcagcggcgcagcggcggtgagttcggcttcgatggtcagcgtttgtccgagcgacgcggcgggcggaacgtctgcgcggaccagcttgacggtgggcgattgcggtttgggacgcgggcggcttttgatgtcgatggttgccgctggttcgttgccgttcgtgttgaccttcgcaccgggaaccttgaggcgcagctcgtacgttcccggcggcgcgcattcggggatttcgagcgtgaccggctggttggcctgagtcgccaacaaggcggcggtgtagcggctgttccactcggccatcggtttggacagttcgtagatgaccgggctttcggttgcgaacctcgccgttacctggatcgcgtctccgagcgtcgcggtcgtcggcgcgtccagcgactcgagcgtcagcgacgcgtgcgggcggttgacgatcgtcacgtcgtcgagcacgaacgtgcccttaccgatggcgttgatctccaagccggccagttcgtcgtcgatcagctcggctgagacgtcgcgggccaggtgcagcgaggcgttcgtccatcggcccttggtcggcggcaggattttgagatatcgctgatggtcggtcttcgagtgcacgtagaggtgaatctggtcgccggtgaaatcgggagacagataataccagaagctcagcgcgctgttggactcgacgacgccgaggtcgaagcgcaggtgatcgacgcagccttgcgcggttcggcccagcaaagcccctttgccgtcgtggacgatctcgtgcgtgatctcctggacaccggcgggcaggtcgttcgaggtcggcgactcataaaatccccacgcatactccgccgattcgaagtcgtcgcgaaagacgaccgtatcgtctgaaccgatggcaaacgaaggaaccgcaagcaggcagatcgcaagaagactggcagcaaatcgcatgaagttctccggttcacagcgaaggtctaaaggccgcctcgaggggcggtggggcccgagccgatgtactcctcgaacgcgtcgacgctgggagtcggcgagccggaatgattgtccacgtggccgtcggcgcagagcacgggcgttatgccctgtccgtggaacccgccccagttgccgtcgtcgatgtccagcagcacgccgaaacgcgtcggatcggccagacgatcgacgttgaccggaaccgtccacccggccggcggccagtgccagccgagcttccagttgtagaagtacgtggcgttggtggccaacgtcgcccgccgctcacccaccgtgcagtagaagacgatgctgcggctgttctcgaagctctcgggcgtcgcgatcggcgcgtcgccgtgcacgtacgggtagaacgggcactggcggggattccagatgcaccagtagccggagcccggcggatcccagccggcgggaaagatgtcggcgctgtcgttgaggtaggctcgcacggctacgccgagctgccgcaggcggctgtcgcactgaatgagcctggccgattcgcgggcctgactcagcgccggcagcagcatggccaccagcacggcgatgatcgccaccaccacgagcaactcgatcagggtaaaggctctcggtttcatacgggcgttcctccggcatcggcaagcctgtccgccagtgacgcgcggctgacgaactcgaccggcaggacgcagtgctcgatggcgccgcgcgggttgcccattcggccgatcagcatctccatcgcagcctggcccatctgctcgaccggctgacgcaccgaggccagcggcggatcgaggtagcggcagatcggctcatcgtcgtagccgatcacgctgatgtcgctggggatcgccacgcccattcgcttgagggttcggcaggcgtcagccgccgccccgtcggtgcagcagaggatggccgtcggccgatccggctgatccatcatccgtcggatcgcctggtccaccgcccgctcccaactgaccagcgggttttcgagcaccaggtcgccgacgagcgcgcggtcgaaggcgacgccgccgtcgttgaccgcatcgcgcagcccctcgaaccgccgccgtgccgtcgggtcgaccatcgggccgatgtagccgatccgccggtgtccgcgccggaccagttcctgcccgacggtatagccgccggcgcggttgtcggcggagacggtgggcacctcgatttcgcgccaggattcgccgatcaggacgaacggataggcctgccccttgagtttgacgatcagttcggcgaagcgcgggtggcagatcgagccgagtatcgccccgctgggggccagttcagggagcctttccaggacgcggagggtcacgtccaggtcgccgtactggtgggcgtcgtggagctggatctggatgccgcgatcggccccggaccgctgggcgctgcgaacgatgcggacccacggctcgcgggtcatgtcgggcaccacgatctcgaccagccgcgtggccacatggcgatcgcgaacgaagacgcccttgccggggcggcgctcgaccaacccctcatcgacaagctggtcgatggcccgccggacggatacgcggctgaggcccgtccgccgcaccatctcgtgttccgacccgatcaactgattcggctggcttcggccggcgtgaatctcgtcgcggagggtctcgaccagagaggcatagactggattactggtattaatactggtattagacatgaccccagtgtatcgcagcgatccgagaatggcaagcgaaaatcaccgggggttcggcgaatctgtgtcgccacaagtaccgcccctacaatcggttataggcttatgccggttgcgagcttggccgggcggcagaatcggtaggcatcagtcgtctggattcgcaacgggaccgcgtgtcacggatcgcggaccggaagctcaaggggatccgagcctacctggggaccttgacccaccggcgacttcgatcggcttggaggatggcgtcgataacctgctgggcgcggagggcgtcgtcgaagttgggggtgaccgaacggcgatggcggatcgcgtcgataaagtcgcgggcctgcttgagccggaagcccaatggcggacactggcgaaaagccttccagatggcggggccgtagaattggcggaccgcagcgggcacgctggtgcggacgaagcgggcggccgccatgtccttttgggtcaggcagagctgaagctcatcgggcttctggtagtcgtagacgacggtgccgccttcggcgttgatctcgatggattggtgctcgttgagtccgcagccgcggccgggggcgaaccgggtgacctcgaaaacgccggctgccccgttcttgaactcagccatgaaggaggcggcgtcatcgacgtcggttttttcccagcggttggtgtttgggtcgcggcgtttgggcagccacgtgcgggtcaggccgcagaccgagtcaaactcgccgatcaggtgccgggcgtagtcgatcaggtgcgagccgacgtcgccgagttggccgctgccggtcagctttcgccgggtccgccacgaggccccgtcgccgccccagagctgcaggtagaacgcccgaaagtggtagacccggccgagcgtgccgtcgtcgataagctgcttgaggaaccggatggccggcacgtagcggtagttgtaggcgatcatgttcaccaggcgggcccgtttgaccgcgtcgcgcatccggcgggcctgcgtggcgtcgagggccagcggcttttcgcacagcacgtgcagcttccgctgcgcagcggccatgaccatcggatagtgcagatagttcggcgtggcgaccacgacggcgtcgagcggttcgctttccagcatccgctgatagtcgctgtagaccgcgggcacgccgaacggctcggcgacgcggcgggcgagggattcggactcgtcgcacagggcggcgacgcgaacgtccttgcagagcttaaagccgggcaggtggacggcctgcgagatgccgccggccccgatgatcgcgaggttgatcttcctggacgctttggaggtggccatgtgtatgctcctgtatggacgggccgccgcgggtgcggtcagatcggatcgggcaggtacggcttgaggaacttctgcccgagcagaaggccctgcttgactttttcgggcgaattgggcagatcgtcgaaaccgaagagcacgtcctcgtgctcgaggttcagatcgccggcaaagccgacctcgtgaagggccgagaggaacgccggccagtcgacctcgccccatccgggcatgcggtagcgccaccagt

SEQ ID NO: 603 - DNA, 4565 bp, synthetic construct
  source 1..4565: mol_type = other DNA
  misc_feature 1..4565: note = Synthetic
tgggacgttggaaggggaggaggatactatatgctcctatttgaaaaaataaacgcggtaactcttggttaacacggttaaggaagtgacagaaagaagtttaatcttaaagagtatataaaggtgctcccgaaaaccttttgagttttcgggagcatagcctgcgtgactttcgtcacttgttgtgaaaagtaccgcagaccaaggttgattacaataaaaaatagatatatcctgttattgatgaaagtcaagcatttttgtatattaaatgtaaattaacaagaagcaataattacttgataattagttgaggaggcgattatggcttaccgtttggggttggacttagggcctacgtcgattgggtgggcactggttaacatagaaaaagatatggaaacgaaactccttgatgccggggttcgtgtttttcctgaaggagttgaccgagataccaaaggtcttgaaaaatccaaaaatgagactcggcggatggctcggggggctcggcggcagaaagaacgtcgacgccgtcgaaaaaagaagttggccggtatcttaaagcgagctcaactttggccgattcaccctgaagagttaaagacggtctttcaggccgatccttacgagcttcgggctcgcggtttggatgaaaaattatcgccttttgagttgggacgggttttatatcatctgaatcagcgccgaggtttcaaatcgaaccggaaatccggcaagagcaaggaagacggtaaggtcatgcaggggattaccgaattggaaacacggatcaaccaatccggcgctcgaactctgggcgaatatttttataaggtgaaggcctgcgaacggattcgcaatcactatacgcgtcgggagaagtatcaaaaggaattcgacgcgatatgggagaagcaaaaagcattttacccagcgattttgacagaggaattaaagcatcagcttgcaaatgaggtcattttttttcaaaggcccttaaaacttcaggatgagttaattggaagatgcgaacttgagccggatgagtatcgctgtccgcgtggggactggtatgcccagcggtttcggatcgttcaggacgtcaataatttagcggtcattcagccgacgggtgagatgcagtctctgaccgttgaacaacggaaacaactgattgagcacctcagtcgtgaaaaggaaatggatttcgaaaagattcggaagaaactcggacttcttgaaacacagcggttcaatctggaagaagggggacggaaaaagcttttaggtaattccattgaagcggggttagtcaaagtttttggaaaacactggccggagtttcagggtcagttggatcagtttaacgactttttgttaacggtggaagatcctgatatttttgagcggacctgtcgggaccaatggaagttaacggataagcaaatcaaggaaatggagaagatcgtcgttcctgaaaagtatcttcatctatccaaaaaggcgattcggaagcttttaccctttatggaatcgggcgatatttatacgaaggccgttgagaaggcgggatatcttcgaaacgatcaaaaagtctctttgaatttggatcgattggaattaccgcccgatctgcggaatccgatcgttcagcgagcgttatatgaagtgcgaaaagtggtgaatgcgattatccgggaatatggaaagcctcaagaggtgattatcgagttagcccgggatgtcaaagggtctgtggatcaacggaacgagatggtttgggagatgcggaaacgggaagaggagcgggaagagattaaaggtcttttgatcaaggaatttaatcttaccaatccgtcccgaagtgatattgagcgttatcggctctggcaggaccagggaacgatctgtccttacagtggacagtcgattccgggtcatcaactcttttcctcggatgttcaggtcgatcatattttaccatatagtcgatctcttgacgactcgtatcaaaataaggttgtctgctttacgacggcgaataaggacaaaagcaatcaaactccttatgaatgggtttccggggattccgttcgatatgaagcgatgcttcaacgggtcagtaaatttacgggcaaagggtgcggtggtaagaaaagaaagttttcacaaaaagaaattgagattaatgagtgcatatcgcggcaacttaacgatactcggtatatttgtcgagaagttcggaaatatcttcagacgctcggcgtgacggtcgaatgcacgaaggggcagatgacgtcggagcttcgtcatcagtggggactcaatcagattctggatcataagaccggttttaaaaagaaccgggacgatcaccggcatcatgcggtggacgccgtagtgattgccttgacgacccggaagcacctccagtttttgtccaagacgaaaggatacggggctgaacgtttgcctttaccctgggaaggatttcgcgatcaggtagccatgcgaatcaacgatattaacgtatcgcatcgtgctacgcgaaaagtctgtggtcctttacataatgaaaccgcttatggaccaacgaaggaaaaaaacaagtttgtctatcgaaaggaactaactgcattgaaagggcctatgattaaaaatatacgtgataagacaattcaaaccttgataaaaaatcggcttgctgtttttatgcttgatcctgaaaatccacccaaagatattcccaaagaagtatttgcccaaacacttaccatgcctaaaggggttccaataaaacgagtgcgaataacagaaacctttaataaccttattccgattaattcgatgaataatagacatggtcaaccttatagatatgttaatcctggagccaatcatcatttggagatcgttgaagacctaaccacacataaaaggtttgcggtagcggtcacgatgttcgaagcggcggaaagaattcgaaaaaaggagcctatcgttaatcatgatcacggatgcgataagcgatttatcatgtcgttatgtaaaaatgacatgtttttgctaaaaattgacgataggtttgttcttcatcgagttcaaaagctaaatgtgaaccaaattgccctaaggcctcacaatatagcaacaattgacgataatactacacgtcagttaaggacggctaattcccttgaagggcaaaaagttttaattgatcctctggggaggataagagtagccaatgattaagcgtacgatagagatatcgtccggaccggccaagctttcgttgaagctgaatcagatgattctcgaaagggaaaatacgccgccggtgagtattccttgtgaagatatcggagtgctcgtcatcgatcatcctggcgtatcctatacgcacggtttgatcaacaaactacttgaatgtgagacggcggtgattttttgcgatcaaaagcatcttcccggcggtttgttattgccgtatgccggtaataccctgcatggggagcgggtccggcagcaggcgtcggtaaaagtgcctttgcgaaaacagctttggaagcagatcattcaagccaagattcgtcatcaagccctggctgtcgggaaagaacatggggattttcggaagctttttaattattcgtatcaagttcgatccggggacccgtcgaatattgaagggcaggctgctcgcgtttattggtcgattctcttcagtggtgagggattcaaacggcaaaccgagggcggggggataaacgatctactgaattatgggtatacgattctgcgttcgaccgtggcgcgagcggtttgcgtttcgggtcttcatccttcccttgggcttcatcataagaatcgctataatccttatgcgttggccgatgatttgatggagccgtatcggccgatggttgatcttcgcgttaaatcgctctggaaaaaagggaagcaggcggttgatcgggaagtcaaggcgtccttgttgagtttgttggtggaaacggtaaagattgaggattctacaggaccatttatggttaatttgaaccggatgacagcatccctttgccggtgttatgccggagaaagcaaggagttggagattcccgagccatggatttctccggatatcgaagcatgtgggtcgtagcgatgttcgatttgccgaccgatacgaaaaaggcacgaaaggactatgccacctttcggaaaaaccttctcaaagacggttttaccatgttacaatactcggtatacgttcgacattgtgccagcgaggaaaacgccgatgtccacgtaaatcgagtgaataattttttgcccgatgatggcgaagtgcgagtgatatgtattaccgacaaacagtacgaaaagatgaagattttctggggaaaaatgagaaaaccaaccccatcggccccgcagcaactcgaacttttttaaggtcgaattgctgcaaggccgttttcttgtcgggatttacagatcaggtattgtaaccaaccttgatctgagatcaatccacaactggtaggcttcaactcgtc

SEQ ID NO: 604 - DNA, 13590 bp, synthetic construct
  misc_feature 1..13590: note = Synthetic
  source 1..13590: mol_type = other DNA
ttgtcgacttaaaagctcaggataacgcctacaaagatgagatagatgccgccatagctggcgttttgcaaagcacttctttcatcggcggggcggcgcttgatgaatttgaagcaaatttagccaaatatgtaggcgtgaaaaacgccataggctgttcgagtgggacttcggctcttgttttagcgcttttagccctaaatatcaagcaaggcgatgaagtcatcgtgccaagctttactttcatcgctacggctgaaatggtgagtttgctgggcgcaacgcctgtttttgcggacattagtttagatgattataatgtgagcgttgagagtatcaagcaccttgtaagtgaaaaaacaaaggcggttatcgctgtgagtatctttgggcaaatgcccgatttgcttgctttgaatgaattttgcaagagtaaaaatatcgttttgatagaagatggcgcgcaaagctttggcgcgacacaagacataggggggggggagttgaaaaagtcctgttctattgccccactttcttgcacgagcttttttccgtcaaagcctttgggcgcgtatggagacgctggggctgtttttaccaacgatgacgcgcttgctaaaaaaattcgcaccattttaaatcacggacaaaaagagcgttacaagcacgaaatcatcggcattaacgggcgacttgatagcattcaagcggcgattttaaatgtgaaattaaggcatttagatgatgagctggcaaaaagagaaaaaatcgctcaaatttatcaaaaaaggctgcaaaatgccattttaccacacattaaaaagggctttacgagcgtgtatgcgcagtattctgtgcgggtgcaagagcgttctaaatgtatagaaaagctcactgcaaagggcattccaacggcaattcactaccccttagggctacatttgcaagaagcctttaaatcgcttggctacaaaaaaggctcactgccaaacactgagctggtgagcgaacagattttatcactgccgatgagtgcctttttagatgaggctcatcaaaatgaggtgattaaggcttttgaatgaaaataggcattgctgggcttggcaaaatggggacaaaccatttaaacgagctgagaaaagatgatgaattcaaagtcgccgccctttatgatttgcgccaaaatgctgaatttaaagagccattttacacgaatttagatgaatttttaaaggcaaatttagacattgtcatcatcgcaacgcctactagcacgcatttagagctggcaaaagccattttagcaaaggtaaaatgtgtgcttatcgaaaagcccttggcgatgaattcaaaagagatgaatgaaataaaagagctggctaaaaagcacgaaagtagcgtggctgtgggttttagcgagaggtttaatcctgcgattttagccctaaaaaaagagcttgcaaatgaaaaaatcatcagcataaacataaaacgatactcgccctttcctgcgcgcataagcgatgtggggattttgcaggatttaagcatacacgatattgatttagtaggctttttaagcggagaaatctttgtaaagcaaggacttttgagcctaaaaaaagatgacagagagatagaggcgattatcacgcttcaaagcgggctaaattcaaagcaaaatatcatcgccacggttcatcaaagctggaactgcgccttaaaaattcgccttgtgagcgtgataacagaaaatgctttttttgaggcggatttaaacaatttttccttacaaaaaaacggcttgccacttgccttacaaggcgcaagtcctttatttagcgagcataaagagcttttgggtttagctaaaagcggcaaaatggggcgtttggcaagtatcaaagatgcgcttaacgcgcaagcgtgcttggagtgagcttgaagctggttttgtttttaaatatgggaggcgtcagcaagcgcgaggattgcgagctttttttgaaaaatatgtttaacgataaatacattttgacgataaaaagcgacattttgcgctcttttgtggcgttttttatcacaaaatttcgcgctaaaaaaatgtggcaaaattatcttaaaatcgggggcaaatcgcccttaaacgacataagcgcaaggctttgcgagaagttaaatgctgaatttttaaatcaaaatttaaaagataatgctaaaaaaatgagtcaaaattcagccctaaattcaaaaactcatcacagcaaaaagggcgaaaatttagagcttgcgcccaaagaaagcaaaaatttaaagctcaaatcacagcttaaatttgattttatcaacacctatgtgccgccctttgcaagcgaagttttaagcaaatatgagcttacaaaagatgatgaaatcgtgctttttccactctatccgcaccactcgcaaaccaccgtgctttcatcacttgaatgcgttaaaggcgagattttaaaagcacaaattcaagcaaaagtgagtgaaattcctgttttttttgagagtgaaatttacaacgaaatgctgataaagcacattttaaaggcaaatgagacttacaaaaaagcgcacaaaaaaacgctcattttttcagcgcactccatacctgtatcgactataaaggctggggatatttaccaaacgcacattgaaaggcattttgcgcttttaaaagagcgtttaaagccttattttaaggatatagtgcttggctatcagtcaaaactaggacctgtgaaatggcttgaaccaagcactagtgagcttttggctcagcttacaaatgaagcgcttgtttatccgctgtctttttgcgtagattgcagtgaaaccgcttttgaactagaaatcgagtatagaaaaatcgccgcaaaggactacaaagtcatcgcttgtcctaatgatagtgctgaatttgtggagtttgtgaaagcgtatttaaaggacagatgatgaaaaaatacctttttgttttgcttttagccttttcagtagcgggctgctcggtaacgggcgataggcaagtcgatgcgatgattgataaaatgggcattgaaatcatacacgatatccccatcaacgacaacacaaaggctggcaagcacatagacaacaccatacatatgaaagcgcgctcattttaccccgataaacagcagtatttgctggtgcttttgcacgagatagcccatcacataggctctttaaacaagcgcgtgtcttatcaactctactcacaaagcgattacaggctgcttgaagagcttatcgcaaacaaatacgccacaacgatgatgaaaaaatttggctacaaactgcgctttaactacgacaaactcaacaaagagtatatgaacgagctgacaacgcagcacggctactccaaagagcgagtcaatcaatatgtcaatgccgagctaaaacgctgcttgcaaacaagtgatagacttttgaaacgccgaatttagcgtgcttttggtttgcgttgatttggcataatgatagcataatgcaaatttaaggagtgaaaatgagagttttagggtttgatataggcattcgttcgataggctggtgtctgcaagaaaatggcgaaattgtagcttgtggcgttcgcatacctcgaagtgtagaagatgcgcagacaaaagaatcccttgcagcacaaagaggcgcagcaaggcgcattcgtagaaacattgctcgcaaaaaggggagaatggaaagcctcaaaataatgatttgcaaggaatttggcttaaatttggctgattactactcaaaagatggcgatttgccaaaggcttatgcaggcgaaaattttaaaagtccttatgaattacgctcaaaagcactgacagaaaaattaagtgctgatgaacttgcaagagtaattttacacatagcaaaacacagaggctatacgaacaaacacgctagaaaagaaagcgataaggacaaaggaaaggttttaagtgccataaaaagcaatgaacaagctctaaaagagtatcaaagcgtaggtgcatatctttacaaagagttttatcaaaaacaaagaagttcagaagaaattcaaacaaaagtagagcttttaaaagcattttatgataaaaataaaatcaaaatcgaaaaacaagataaaaataaactagaacagcaaagcccaaatcaatacaaaaaagtccgtaacacaactgatgtttatgagcgttgtatgaagcaagaatggctacaagctgaactagaactcatctttgaaaaacagcgtgaatttggcttaaaattcagcgatgaatttaaagatgagattttaaaagtaatgttttttcagcgccctcttaaaggctctgctgataaagtaggcttttgcacattttttcctaataaaaaaagagctccaaaagatagtttaagcgggatagagtatgttgcgctcggcaaaatcatcaatgagttaaaatacattgagaaaaagataaaagcaaaagattgcataaggttttatgcgggcgaagtggttgatactccgcaaaatatcaatgctcttttagacattgtccttaaaaagggcgaaatcagctacaaagaatttcgctcaatccttaaactcaacgagaaatttaaagatgtgaagattttttctaaaaatgcgaaacttgattatactcaaaaaaccattgatgaagccgaaaaagctaaatttttagagttaaaatcatctaaggacaatccaaacattccaaatttaaaaggttttcaaaaagctttgggagaatgctttgaaaaatttgacagaaaaacgcttgatgatatagcttttgatttggcgacaatcaacgacaaacaagaactctttaagcagtttgaaaactacgatttaagcgcagaacaaaaagaagccttatcacagctttctttttcaaaatttcttaatctcagttttaaggctttaagtgagattattcctttgatgaaacaaggtttgcgttatgatgaagctgtggaaaagctgggctttaagccatctgatgagtatgattacaacgaagtgcaaaaagaacttcacaaccccgttgtttctcatatccttgccgaagtcgttaaggttttaaaagctattttaaaagaacacggacaagtgcataaaatcaacatagaatttactcgtgaagcgggcataagcaaggataaaagaagtaaaacagaacaagagcaaagaaaaaagtttcaagctaatgaaaaggctaaggaaaaatgtcatcaattaggcattgccgcaactaaaaagaatatactgaaaatcaagctttggttggagcaaggtgaggtttgtgtgtatagttgcaataatggtaagggcaagaaaattaccgaaaaagatttgcaagatgaaactatgctccaaatcgaccacatttatccgtattcaaggagctttgatgatagttataacaacaaagtgcttgtttttagctcagaaaatcaagttaaaagagaaaaaacaccatttgaagcctttggtaacaatgcaaacaaatggaatagcattgtttcttttgtgagtgggaacaaggcttatacctacactaaaactaatgcaaagacaaataaaaaggaattatgtttcactaaaaaagggcaaagaattctcgatgaaaattttaaaacaaaagagcaaggctttatccaaagaaatttagttgatacaagctatatagctaatgttgtaagggattatattgacaaaaatgtcaaattcttgcctcttgataataaggaattgttgcaaagttctatgttctttgaattggacggctacaacgaaaaggacgatacgaaaaaagaatacaaacgcaaacacatagaaatcatcagcggaaatttaacttcaatgatgaagcattattggggacttcattttttagataagaaaaatgaatttggcgagtatgaaaaggatagaagtcatcatttacaccacgcccttgatgctatcatcatttcttatatgaatgctagtagggtaaaggcttttgccgactttaaaaagcgattagaaacgatgaaagcaagtgaatatgctgaaaaattaagtgaagcagagcgagaacaaaaacgcattaagagaaagaaaagcacctttgaagtgccagctaactatgctaatcgcaatgaatttgcagataaaatcaaagaaaaaatctttggtatttttgtttctcagccgccaaataaaaggacaagaggggctttgcataaagaaagcttttactcgcaaaaggatacaagccttataaatagtaaggatactatggaagatgcactcaaacttggcaaggtgcgacaaattggcacaaaaatcgtcagcaatgcaaatatggtgcgtttagacatttttaaacgcaaaaaagataacaaattctttggtgtgccgatttatactatggactttgcgaaaggaattttgccaaataaggcagttggcacaaaagaatggatagatatgaacgaagattatgaatttttattcagcattttcccaaatgacttgctctacataaagaaaaaaggtatggaaaaggctgagttgtgctattatgtgaaatttaacattgcaaatggtgcgatgacttttaaaacacacgataatagattacaatcacttactgaaaaccaaataaaactttatggcacaaagattcctactgaagagaatgtgcaaggagtagttggcattcaaaatttagaaatctttgaaaaatggcaagtttctccgctgggcgaggtaaaaaaggcggaatttaaaaaacgagaaaacatttcgcttaaatccacgcccaaaaacaccaaacactcaatgccaaattcaaatttggagacacaatgagctttgatgaagcctttaaaagcgtgattatcgcaaatgatgcgaagttgagtttaaaacaaaatcatttgcatatttctcaaagcgacaatgaggcgaatctctatttaaaagatttagcttttataatccttgaatcgccgcaaatcacgctcacttcggcacttttaagcgcactagcaaagcacaatgtcgtgcttttaagctgcgatgaaagccacttgccaaatggcgtttttatgccctttttaacgcactttcaagccgcactcaccgccaaagagcaacttggggcaaagcctcaaacaaaggctattttgtggcaaaggattgtcaaaaacaaaatccgcaatcaagcctttgttttgcgtgaggctggctttgacaaagaagcggacgagcttgaaaatttagctaaaaatgtgcgcttaaatgatggctcgtatatggaaagccgtgctgctgcgctttattttaaaacgctttttggctcaaattttagccgtgatgagctttgctttgaaaattcagctctaaactatggctacgccgttgtgcgcgctgctgtggtgcgtgccgtgtgcgtgagcgggcttgtaagctgggagggggtaaagcacgctaacgcttttaatcaatttaacctagccgatgatttaatcgagccttttcgcgcctttgtagatagctgtgttttggggctttgtgctgaatttaaaggcgatgagtttttgcaaaaagagcataaaagagcgcttgttaaaaacttgcaaaaagcggtgtttgtaaatgagcgcaaactgcctttaatccgcgctgtaaatcatttcgtgcaaagttttaaaagcaccttgcttaatggcacagagcttgcaaatgtcagctttgcttgaagataaatttatgcgcgttttgctgctttttgacctgccaacaacgagcaaaaaagagcaaaaaaatgcggcgaaattccgcaacgaactcataaaacttggcttttttatgatgcaatttagcgtgtatatgcgaatttgcaagggcttggtttcggcgaatgctgttatttcgcgtgtgcgtggaattttgccgccgcttggcaatgtgcgcgcgctcatcatcactgaaaagcagtttgacaatatgcaaattctgcttggaagtgcgggctttaacgaaagcgtgaatgacgataaaaatctcgtgctgtttgcgtttgatgagaaaatcggagattatcggtatttgggcaacggacaaggtgagtgtgatgagagcgttaaaaatgacgaaaatgcttgtgggagcgaaaatgcgccaaaatgtgaaaatttggatttttcaaagggaaaaaatgctgggaaagagaattttgtaagcaaatcaaaacgcaaaaagccaaaagagcaaagtttgtttgaattttaagcttttaaagggcgtttaaatgagctttaaaaaggcttttaatggcacaaaagcgcgtgagactttaaaaatttggcgggcattttacttgctgatgagaaaggctattttacgctcatcttgcatatatcaagcttgtttttatgcctaaaatacgctctttgctctaaatcataaagcttgttttttagctctttggggatttgactaaaacgcaaatcgctgagcttagcttgtgattcttgtgcgagatactcgaaaaattcgcatttgtccttagcgtgcaaggaaagggcgcaaagtgctatgagaatgagttttggcataataatcctttgtgggtaaatttaaattagacaagcatttggggtaattttggctgaaatttagggcaaatgcttgtggctttatgcgggctatattgtaaatttggctggtaaattgagtgttaatggctttgatgaacttggcttttatgggtggattgtgcgtgttttggtgtggtttatccttttacaagagcgtattttgagtgtttttggttatttaaactttttcaaagcgtgctttgtatgtgtttttgagttttagaatttatttaaaggcttgaaaatacgctatttgatttattataaattgaaatttgctactaaaatgcgtgataacgcctttttaagcaagtgcaaagtgcctttttatcgcaataaatcatatacaaaaaacggcaaaggcgcgtttatcctttgtcgtaagtgccaaaaaagagctaggcaaagcaaaatcaatgcttttaccttacaaagtgtcgcaaaaagcccttataaagcattgcataaggcttgtagaaaattcgcgtaaaatcgggtgggcttagggattgactagcttgtctcccttgaaacaagcataaccctgcggggcgcccacaaccccttattttagtcccttgttaattcttttgctataagtatagcaaaaaatcgtatatttttgcctaaaatttcgcaaaaaccttgaaaaattcttactctatggtaggtatattttaccataaaaagaattaacaagggactaaaactaacccgcagtcgctcctagtggtaagcttattttaccataaaaagaattaacaagggactaaaacagcaaaggcaacaaatcgcccgtttttatcattttaccataaaaagaattaacaagggactaaaactaattctatattgaaaactagatttttcacattttaccataaaaagaattaacaagggactaaaactttttctatatcggcttttttctgctctgcattttaccataaaaagaattaacaagggactaaaactgatgaagttcttaattatatgggtaaatcattttaccataaaaagaattaacaagggactaaaactgtcccccttaattattatgcgccgcgctgattttaccataaaaagaattaacaagggactaaaactcttttagctctctaacaaaggcataatctattttaccataaaaagaattaacaagggactaaaactcttttagctctctaacaaaggcataatctattttaccataaaaagaattaacaagggactaaaactgttttggtttggttttgtcatttcttttcattttaccataaaaagaattaacaagggactaaaaccctatcctttcttgtgagtttaacacggctattttaccataaaaagaattaacaagggactaaaacatcactatgccgtgtttgtccttttctagcattttaccataaaaagaattaacaagggactaaaacaacacggcgacagctatttgatgagcttaaattttaccataaaaagaattaacaagggactaaaacttactccatttacaaattataaagctctgcattttaccataaaaagaattaacaagggactaaaactcttgcgttcttttttcatactcttcatagattttaccataaaaagaattaacaagggactaaaactctttcgacaggcgaaagtttcttttcttgattttaccataaaaagaattaacaagggactaaaacccagctcttgcgccaacagcagcagccgcgattttaccataaaaagaattaacaagggactaaaaccaaaaaaacacttactcatcatcaaatagattttaccataaaaagaattaacaagggactaaaaccttgcttgaaaatatgccgattgtggctaaattttaccataaaaagaattaacaagggactaaaacttatgatttatacatttggaataggctttaattttaccataaaaagaattaacaagggactaaaacgctcgctcgattgaatgcaaatgctcgtttattttaccataaaaagaattaacaagggactaaaactactcacgcagtgagctttgatttgcttgaattttaccataaaaagaattaacaagggactaaaactgacaatgaaatactttgcagcatagtcgcattttaccataaaaagaattaacaagggactaaaaccttggcagtccaaataaagcctgccgccccattttaccataaaaagaattaacaagggactaaaaccaaagctcatcgctgtaagaaatgtagatgattttaccataaaaagaattaacaagggactaaaacgcatccttgtgatgtttttggttggctaaaattttaccataaaaagaattaacaagggactaaaactgataaggcttttgtagtttaggtttgtgcattttaccataaaaagaattaacaagggactaaaactcggcatttggctttatgcccgtgcttgctattttaccataaaaagaattaacaagggactaaaactccataaaagccttataagtttcggagttaattttaccataaaaagaattaacaagggactaaaacacattagctttgtgattttgcttgacacaaattttaccataaaaagaattaacaagggactaaaacgcgtccttgtggtgtttttggttggctagaattttaccataaaaagaattaacaagggactaaaacataaaagaattcttataaaacgccaccgccattttaccataaaaagaattaacaagggactaaaaccattttaggcaacgcctcataaacccatttattttaccataaaaagaattaacaagggactaaaacaaaatttagggtaattctattgtcaaaattattttaccataaaaagaattaacaagggactaaaacccgtcattcgcattatctcggctcttgtcaattttaccataaaaagaattaacaagggactaaaactgatgtttctcacaaaaaactaaaattcgcattttaccataaaaagaattaacaagggactaaaacaaaaaagagtaaatcgcatcgtaagccgttattttaccataaaaagaattaacaagggactaaaactcataagtcacaatagtttttatttgcgaaattttaccataaaaagaattaacaagggactaaaacttacaataataaaacggattttccaaaataattttaccataaaaagaattaacaagggactaaaacaatctttttcatcttgcgataatctatcttattttaccataaaaagaattaacaagggactaaaaccgcttatccacttcttcatactctaaattaattttaccataaaaagaattaacaagggactaaaactgtcccccttaattattatgcgccgcgctgattttaccataaaaagaattaacaagggactaaaaccacttcactctcttttgctaaaaactctttattttaccataaaaagaattaacaagggactaaaacttaaagactacgcgcaaagcaagggcgaggattttaccataaaaagaattaacaagggactaaaaccccaaagctctaaatttccactcactgcctattttaccataaaaagaattaacaagggactaaaacctcaaatcttttttattgtcttgcctttgtattttaccataaaaagaattaacaagggactaaaacatagtctgctagcttattgtcaacttcttgattttaccataaaaagaattaacaagggactaaaacttaaaagtctcaacgcaccattttaaacccattttaccataaaaagaattaacaagggactaaaactcaaaacttgtgaaatctgctgttacttgaattttaccataaaaagaattaacaagggactaaaacttaaagactacgcgcaaagcaagggcgaggattttaccataaaaagaattaacaagggactaaaactttgcgtaaagctgtttatgttatcagtgtattttaccataaaaagaattaacaagggactaaaacttgtgctcatagatataattcacgcagtaaattttaccataaaaagaattaacaagggactaaaactcctctttgatgatttgccccaaagcctctattttaccataaaaagaattaacaagggactaaaacgtatagccctgcaaggtgtcataccaagctattttaccataaaaagaattaacaagggactaaaacatttcgctttgcataccttgctttttgaggattttaccataaaaagaattaacaagggactaaaactcgccccgctgtgtaaatggctttgctcgcattttaccataaaaagaattaacaagggactaaaactctcttctatgcttggcacatcattgctgtattttaccataaaaagaattaacaagggactaaaacttatttcttatgcgcaaaaattttgggcaaattttaccataaaaagaattaacaagggactaaaaccggagcacggtgttattattggtttcgcgtattttaccataaaaagaattaacaagggactaaaactataagattggagaatttcagagttattctattttaccataaaaagaattaacaagggactaaaacacctttaagcctttttaaaacgcttaaaaaattttaccataaaaagaattaacaagggactaaaactttgcgctctacaaccgacagcccaaaagaattttaccataaaaagaattaacaagggactaaaactgtggaggagcaggaacagggaagtcataattttaccataaaaagaattaacaagggactaaaacattatttcgctccttttttgtcttctctgaattttaccataaaaagaattaacaagggactaaaac

SEQ ID NO: 605 - DNA, 23228 bp, synthetic construct
  source 1..23228: mol_type = other DNA
  misc_feature 1..23228: note = Synthetic
cataccggccaacggcttggtcgcgaagtcctggacccgcacatagtccgcatagatcggcgcaatgttccggtaatcttcaggggagctaatatcttcaacaaggccgctaccaaccgtcgcagcagttcgcgcctcacttggcggggtcgtcacttcctgtaagatttcaggttcaggcgcggcaacgggggccacaactggcgctgccttgtcattgctggcaggaaccgacaggcgtaaaccgggaaacatattgcgccccggtgaaaaaggagagggacctcggaaaggggtgcttgagctcatgatttcgtgactgcctttttcgcggtggtcagagttcgttcttggtcaaacaggctcattgaaccgtcggtttgctgcgatgtttcacaatgcgccagtatccgcccgcgcgatgttcgctcaataatgcccgcatgcagcagccatggttcgatttcatcttcaatcgttccgggatcttcacccaatgcggcagacagggttttcaatccggtcggcttgttgcgatatcggcccgcaaggcagtcaatatatgccctctctcgctccccaagccctctatcgtcaatccccagcgcttccagtgcatgagaagcaatgtctggtccaatagtcgtcgtgctaccggccgttgcgaaatcccgaacgcgacgcaatagccggttggcgatacgtggtgtaccgcgagaccggcacgctatcatttcagacgcttcctgcgtcatctggagccccatgaggcgaccagacctgagtatcacggatgccaggtcgtcgttactgtagagctccagcttgatgtcaatgctgaacctgtccttgagcggacgtgacaacataccggaccttgtcgttgctccgacaagtgtgaaccgctcgataggcagccggatatgctttgcctcagggccatcgcccgacagaatatcaatggcaaagtcttccatcgccgaatatagcacttcttcgatatgcacgggcaggcggtgaatttcgtcaagaaatagaacatcgccttcagacagggaaagcaatgttgtggcgagttctccagcatgcttgatggctggcgccgcaattgatttaaagctctttccgagttcgtttgcgacgatctgagcaagtgtcgtcttgccgaggcccgggggtccaaaaaacagcgtatggtcgagcggctcattcctgcttttagcgctttcaagataaacgccaagcaggcgacttgccttgggctgtcccacgaattcggatagcagcaccggtcgcaaggccgggtcgtcctgaatgttatggccttgcagaatatctgtcatgacgcactctggtcctcggttagaaagctgctggtcttttgcgctcgggattcggccctaaaggaaaacacctaaacggatttttgcataattgcaaggataaccaacgggttcaaaagaaaatgtcaacaaatttaacgacccgcgagtgttgtgtaaagcaaaaactaaggaaaacgtgaagaaatcctttgacgtaatccataagacgggcaaacattatttacgaactcggcctctgtacaactcaggggcgctcgcaatggcggctgacctgtcgccccgtagttcgaggttgcgagctcactcttttgcaggttttaacatcgttcggagcgacaaaatgcccaagatgctttccgtcattaccgcctttccgacccgtttgatggttggtgttgcggttgctatctcttcaattggggcctcgaccgcaaatgctgctggtattggcgacgtggcaactgatgtcaaaggccagctccagggcattggtgacctagtggttgccggtgcatttcttgggggactcgttctgatgggtgccggtctcgttcgcttgaaagccgcggctgatgctggtggcgttcaggttaaatactccgaaggcctgtggcgcctcggcgtaggcggcggtctcgttgctcttcccgcaattaccggtgtcggcgcagataccatctttggcgaaggcggcggtgaagcggccagcattggcgacatcgacatcgactaaggcgctgtggttcgcctttcgtcccgcgcgaaaagaccccctggactttcagggggtcttttgttgtccagcgtcagcgagggctattcctgaaccagcccatcttccggccagacatcaccccaggttccttgggtcgcgttgcgagtatattcggtcgcccgttgttcgaagaagccagcatgctcgacactgttaagcatggaatccatccacggcagcgggttttcgtcgatgttgtacagcttgtccatcccaagacggaccaggcggtcatcagcgacataccggatatattgcttcacttcttccggcgtcagcccctgaaccggaccttcctggaacgcaaggtcaatgaaacggtcttcgtgttcgacgatttcctttgcaatggtcgtgatgcgttcaaagagcttatcacggtcgatttccggatgttccgcaacccactcatgaaacaggcggatcatcgacagacaatgcagggtttcatcacgaacggagtaggtgacaatctgtcccatacccttgagcttgttgaagcgggggaagttcatcaagatggcgaagcttgcaaacagctgtacgccttccgtgaaagccccgaaagcagccatggtttcagcaacttcctgcgggttcttcgggtcgaatgaccgcatatagtcgaacttgtccttcatctcggtatagtcgaggaaggcctcgtattcggtctctggcatgccgatggtgtcaagaaggtgcgaatacgcgtcaatgtggatcgtttccatgtccgagaacgcgaccaacatcatagccacttccggcggcttaatgaaacgcgtgtaatggcgcatgtagcagttgttcacctcaacatccgactgggtaaagaaacggaaaatctgggtaacaaggttgcgttcttcgggtgtcaggctgtggtgccagtccttaacatcgtcggccaaaggaacttcttccggcagccaatgcatgttgtgctggtctttccatgattgataagcccacggatactggaaaggtttaaaggcgatccgttcttcaactagagacatcttcttttcctgtgtcagaaacttgttggtcaagtcacggctgagtcgcgcgtgaaatcacggtttgggggaggcgggtgtttttgcgagagcgtcttcgactgctttcacaagaagtggttcgaaaattggatggaggcgacaggaacgtttcgcggccacgatgatatcgtcttggccagatctgtctttcatcagatccaccaatctcttcaactcagtcagcatctcggtagttagttcgccttcaggcgttagctttccgacggaatgctgatagaattcgtagtatttggtgaagactgggtagtccccatcggggtatgattcctggcggaaccggtaaaggcgctcaaaaagggtacggtcgcacggctggctgataaacgtttccgacgtgctgaaccgcagccatccccgctgaacttcagtcttcttgagttgcgccaaagcatcttgggccgccatgcaatcaagcgtcaattcttctgccttgataacattcaaaagccgctgagcatcaattggctgatgcaccatgacgcgcatctgttcttccgtcggcgtttgacccttgggcacaataatcggaatcagatcaagcgcgaaatcgagttgcatgtagattacaaggtcgttgtacattccccgtgagaaatgtcgcgggagagattccggtgtcaactcaacgtcgccgactttaatggacgtgacgaccggccgatattcgtcattttgggggtcttcctccagcgcgcggaatctcagtcgcgtagtcgcaaccacctcaatatcactggcaggcttcccaaatcgtttgatgaagtttttccattttgctgaagtcagcattaggttttccttttgcgcatgaaactatggagccggggtgacgatggacaaaaggcgggtgtttgctcgaagaaagctacacccgtccctcgtcgtccatgccttacaatgtgtcactggcaggcaaggcactcgtcatatgcgccattcaatgcttcggcgctctgaggcttagcctcgacggacttcgcggcggcaccaccagagattctctgattggcgaaggtcgcaacaacttctgtcgatgcctcggaaatcttctgcgcgcgcttcacagcaagcgaacggcagtagtaaaggcttttcacaccctttttccatgccgcccagtgaatctggtgtagcttctgcttgtggatatccccccgaaggaaaaggttcaccgactgggattggtcaaccagcggtgcgcgatcactcgcgtgctcaacaacccacatctggtcgatttcgtttgcggtcttgaagacgtcgcgctcaaggtcagaaaggaattcaagatgctgaacagagccttcattgcgtgtgatggaacgccaggtcgcttcatcatcgcggccatatgatgccaggacctttttgaggtgcttgttgcgaacctcaaatgtgccgaccagacgcttctctgaatatacgttggcggtgacagggtcgataccaggggagcattgaccggcaataacggagatggaagccgtcggcgcgattgctgttttgttcgagaagcgagccatgacgccatgctcttcggcatcggggcacgctccgcgctcttcagccagcacttcggatgctgcatcaacggcgtctttgatgtgaccaaacatccgtttgttccagaccttcgccatcaccccatcgaacggaataccttttgcctggaggaagctgtggaagcccatcgctccaagcccgacagaacgctcgcgggatgcagcataaatggcgtcgtccatgaggccgcgatattgattgccgaccgctttatcgacagcctcacaggcctttgcataatcggcctcatcgaggataagctcacgcagctgtgctttgatagggtcaccgacttcgcgaatggcagcacgtgtcatcgacggtgcgtttgcaatgaagaagctcaggacgttgtcgaggaaacgcatgacatcttcaatgaaagtcgggtgcgtattccattcgtcgaacttttcgagattgagcgatgagaggcagcatacggccgtacgcatccggcccaagtggtcgagaccggtcggaagcgtaatttccacgcaaagattactggttttgacaatcaggccagactttttgtgatgttccgggattgcacggttaacggtgtcgatgaacagcaggtagggttcaccggtttccatacgggcagtaagcagcctgatccaaagcgaacgcgcactgattgagcgaattgtttcaccggtatgcggtgacttcagggcccactggtcgtttttctccaccgcatgcatgaacgcatccgagatggcgacgccatgatgcatgttcaacgtcttccggttcgggtctccaccggtcgcgcggcgcatttcgatgaattcttcgatttccgggtgccagacagggagataggatgctgccgaaccgcggcgcagactgccttgggaaatggccagagagagagagtcctggaccttcatgaagggaacgacaccgctggttttccccaccttaccaacgcgctcaccgagagaacgcaggttgccccaatagcttccgatgccgccaccgcgggatgcgagttcaatattctctgcccacaagcctttaatgctcggcagcgagtcctggcattcattcaggaagcagctgatcggcatgccgcggttggttccagcactcgacaaaaccggtgttgctggcatcatccagtgattggagatgtagtcatacatccgctgggcatgatcggcatcatctgcgaactcggcggccacattggcaaaccgatcctgtacgccttcgcccggaagcaggtagagttctttgagcattgccatcgcaaatggggtaaccaacgcgtcacgtgaatggtctacgtgaacgccacgtacattggttgcggcatcgaccgtgctgctgttgattgtgctgtcagatgttgatttagcaacatccggagagatgctattcatggcgaattcctgtgtgttttagttcagataaactgacggtcagaccggacgcgtttttgtcgcgaggctgcaataagaccttcaagttctcttgcaagaaagaaagaaaccagacctatatttcttcccgtggatattgactttccgaaaggacattagtctcaatgagttatgggtagttatgtaaaaatctttcctttttcctttgtggcgtaggaaaacaggaaagactaatcagcggaatgaccgttacgccgtcaaccgcgaacttctttgggatagctgaggaaggttcgtggtgcaccactgaacaatctcgttccagtccttaacccgatggaggacatcttcatcggtattgtaaggctgagaatagagcacaccgacctgaccattttcggcagcagcgcgcacatgtccaatactgtcatcaaaaagaatgcactgcccgcctggctcctgaagctcaaggagcgttgcaaccttcgacccgttcaaaggcaacgtgatgatttcatccagctcaaaaggcgccagatttttcaaacgcatctcgcgcgtcaatggatggtttccgccagaagtaacacacacaacaggagtgtcagggagttcctcgcggatgcgcgcaataccgtcttttgcacctttcataagcggaatgtcgctatagtagtcttctgcgacactcagttcgcggatgatttcctgcatctccgcgggcttaaggcttgggaaagtgtatgccagatcataagacgggtcgaacttgtacgacatcaatgcgcgatgcccacgtacttcctcaacatacctgactaattgcgccatatagtcaatcagcaccatgtcggcgtcaaacacgattttgtatggcatcataattccttctgacgcgagagtaatttattgttcgtattcctttgttctggcgacatcctacacattttgcagtgaatctaaaggaaaaaatgaagttgtcctttgtctctgtcgggcatagtctcgttttaccagcagcgcatggggaaactagcggcactgcccacttccaaaattcgctttttcctgaagataccggctttcaatcgaacgtgggcacaacggagcacagacttatggatttttcagtctatttcccgcgggaagaatacgaacatatggagacgaactggggtgccgcggactatcggcagcgccaggatttgctcgaacctttaaagctggcagtggggcgcttcctgttcgatatggcccgagaaggcatgcttcaaccggtttcgggattgcgccacaggcgcattcgaatactgggagagtggaacaagctcgtcagtgacgctgccagtggcgcgacgtttgaggaaatctgcgccaacaatccactatcgcaattgtatatcagggaaacggacgaaacgatttcgtggcaggataatccctacaaactgctttgccactacgtaacctttgacatgaattcccccaacctgggcgataccagcggtgaagcgcggtatgacgggctggtgaggaacatgaattcaggaacaagtccccaatttggacatagtcgcctgaacccacagtattgcagcaacaccggtgacgacatttcggtaacttttgatgcgtggcgcgtaaacgcagtcatagagcggtttctggagccagatgcctctaagccagtcggggctcccttcactctcagtgaggagcccttaacggatgctccagcaccggttgttgaagtcatcgaagcaaacttcccctccggggaggtcatcgtcacgagctatgttaaccgggacgatttcaacgatcatgtcgagctgaagatagacgacagggaacttccccgcctagattctgagttgggtgcagtcgcaaaagccaaggctatcgcgagcgaacttggcttctttacaatttatggcccagaggtgttttcagtcctggccaaaaacggagccatcattatcagccgtcgaccgtttggggacgaagaagaaaaaatcgacgatcctgatgtcactgtgcttgcagaatgcctgtctggagcggttcataccgtcaccattatcgaccgggccgtcctgacggaattgttcgcgaaggcctatgagtgttctctggagcatgcggtggagctggtagctgagtatctgcgagacccatcctcagagcatgtagctttgacggtaacgccaggaacctattacctgcatgggagctacatcccaaatgaattccaacggatgtttcaatccgatgagttggacatctcacaaatccctgaggtgtcttacattgtggcaaaccggtgcctttgtgtatcgaacgatatcagcgctccaacacccaacgcattctagcctaggaatcatgtgaccgtcgacgtgtcgatagaagccaaaaatttcgacacgtcgcctcgagtatgtcgacagtaacgacatatgccgacagtccagccctcagtctttcctgacacacgtaaagctgtgtgtcgtatccttgtagaaggtgacccaactgctgaaatttctgaagtaggcagtgtcgggattggccgtaccgctacctgtcgaagtccagaaatcaacaccatccggtagaagaagattgttgggaacttcgtctcttgccgggacataccagtcatcatgtccgtgtgcgaccagattgtaacatgtcacaaaaatgttcggactaactccatcgtccggattggcggttccgtctccagccgtgatgtgattgtacaggatcagggagtttgcctcgcctgttattggggacgttgctaaggtcgcgaatgctgaagtaccccagtatcccattcccatatccgtgaagaccgcatacatcggaacgttaccgtcgggagaagttccaatgtaaacagagccatcggcgcagatagtgcctggcgaggcagcttcgggagctccgttgcaaggctcgggcgcaacgggcggttcttcggaaacatctgtcgtcgacacaagctccattgtccgtaggttatggcgaaaaatgaaacctgagccatctggcgacgcaagggctgatgtgtgcagatagaaagcctgcgctgccaggaaaatgaaggccgctgttaggatgtttttcatgttttcctatcccctaaaggaaaacatgaaaatatcaccgatttgaagatctgtccaattcttgcacctatcttgggtagaaaaatcgttcacatacggattgaaggggatgaatattcaaaggcaggctgctccaccggacgccaaccatcacgtgccagtttgtcctgttcccagaaactcagcttgttgatatcgggatacgtttccggagtatgttcggaaatcaccggttcccgttccgcggcatcccagaaaaccatacgcccgtcaggatgcaaaccaaggcactccccgtgatccaccgtcccgatgtggccatgaatgatttccgaacgcagtccagcatgctgttccattgcagtcatcccattttctttggagctgcctgaatgtttccctcatctctggaaagacacaagacctggccgaacgccagctatcattactgtgattagaatggtcgaggtggggtggggaatagaagagggcgggccggagcccgccccccaagtgggcgctataacagcttgtcattagccacccagcaattcgccttttgctacaaagacaagctcaatatgagcaaagttttcctttgcgtcaataaatttctttcattttccttaaaaataaagcaaaacatattccaaactcctttcgatcccaatcttcgagctccgttcatgagggtcttatgcagctgtcgatgtcaaaacttgctcccgccacgcaggcttttatcacgatgaacaagccgtcctatcgagccacaaaaccctatcggcttgcattggacttggggcaatcctcgatcgggtgggcggtctacctgcttgataaaaacctgaaggtctcatcccttattgaccttggcaccgcaatccacccccatggtctgaatagcaaaatgagtgcctcgaaaggtgccgagcgtcgtaagagccggttggcaaggcggaccaatgcccacaagcgccagcgcatgaatgcattactgaaagccctgaccaaccacaaactgttcccggcttgccagtctcagcagaacgccctcaagcagcttcacccgtatgccctcagagccaaaggagttacagaaagacttgagccatttgagttcggccgcgtacttctccaccttgcaaagtttcgagggccgaaattcaaccggttgtcggacgacaaaacggagactggcattctcaaagaaggggcttccaagcttgaagcggccttggcagagcgtggatacagaaccatcgcgcagctccagcacgaacatcacttgggtaaccaggattcaactcgtgttccgcaacaagtcaaaatgaaaaagctccgcatcccggcatcaagcaaagatgctttcgccttttacagctccagaaccgctgttctgtccgagttcgatatcctatgggagcgccagaaacaggaacatccggacttgctgacagacgatgcacggtatgccgtattccatgctatcttcgaccaaaggccggtatccatgccagagcctggacgttgcccttaccatcccgaggggccaaggatttccaaagcgcacccgctcttccaggaataccggttacgccaaacgatttctgacatccgtttgaccgacagcatgttgcgaaaaagggccctgaatgacacggaatatgaaaaactgtatgatgccctctctactcgcaaggaaatgagatttccggcaatccgcaagttattaaagctggacgacagcatccgtatctcccacgaatacgaaggtgccaaggcgctcaaagggaatgaaaccgctgcattactcggacacaaggaccgatttgggacaacctgggcgaagttgccccttcacgaccagacggctgttgttgtctggttacttacgcaagatgatgaagatgcgctgattgcgtggctgcaagacagctttgctctggccgaagaccgagcacgaaatatcgcaaacaccagcttacccataggccaaggcggagtaggggttacggcgacgatgcacctgcttcagtttatgcgcctgcaccattctgctcatgaggcagggcttctgtctggttataatgacgcgaggctgatgaccggtgagatttatgacgaacttccttattatggggaagctttgccccatcgtgtcggcttcggggacggggtcagcgaagctctggatcgcaagttcggacgtattgccaacccaagcgtccacatcggtcttaatcaactgcgaaagcttgtaaacgcgttgatagcaaagcacgggcacccaacacaggtaatcatcgaggtcgcagacgaaatcaagttatctgcgaaagccttggaagctcgaaagaaggcgaatgcagataaccgtttccgcaaagaaagacaccacaaggaactggacaagctgggcatacctgaaggaggccgtcgtgatgcattgttgaagatggcgttatgggaagagcttggacctgaccctgaagcacggttcgacgtctatagtggtgaacgcatcaccttgaaatcgcttttcaatggcgacttcgaggttgaacacatcctcccgatgacgcgatctgaagacaacagccccgcgaacaagacgctttgctccacgcacctgaaccggttgaagggtaacagaaccccttgggaagcgtttagccgtgaccggatggtcagcgaggacgaatggcagaaaatgcttgaacgcgcccgggctgctctaccacgtaaaaaggccgaccgcttcacagaggctgcatcggaaaagctgatagacccggaaggattcctcgaccgtcatctgcacgacacccgctatctgtgccaggtcgccaaggaatatctgtctctggtctgcgatccgttgcaagtatgggtgacaagcggcagatttaccgctgcccttcgcacccaccttcaactaaacacgcttcttaacaaagaaggcaatgtgaagaaccgtgacgaccatcgtcaccatgcccttgatgcggccgtcatcggcttgatggaccgggtatatgtgaccgagtttcgcaggtttgaagcggcattggttgaacatagagccaaacctttcgagttccgcataccttatgcgcggttccgtgacgaactcgaatgcaaactggaatacatgacagtcttccaccgaccgaacaacgggttccaaccgggcaagaccgatatgtctttgtgctccccgggagagattctcgtcgataccatctatcgtctggagggcgacaaacccgcaggcaatgaacttacccgcgtttcccagcgtgttgaagtcctcaagtacttcgacagtatgaagaaactgcttgaggccgacatggcggaacaaacccgtgcatcgatgctgtctgtcattgagccagagttggctgcaaacccgccaaaagacgacaaacaaaagtcgtctcgtgactttgcattcaaatcggccttgctgaagtgggcggacaaaaccgggactaatcgcgtccgcatctatacaaacaagcgcgttgtcatggttcatggcaaacacgcccgaaaatgcgataataactcgttcgttgatgtgttccagcaaccagatggtcaatggatgttcgatgtcgtatcggcgtatgacgcaatcaccatgggtactgagccgcggtggaaaaagacctatccagcagctcgcaaagttatgcggctgtataaaaatgatatggtctgcattacagaagagcgtcgagcgtacatttaccgggtggtgagtttcacaccgggcagattacgattacaaccgcacaacatggcgaaaggtcaagaagtctccagcgcagcttcaacatggcaaaaagcgtctctcaaaaaaatcaatgttgacattctcgggcatgtcaaaggccttccttacttcgaccgatgagaacaaaaccggattcatgtgataaaaccggccaaaaccatcccgaaagcacacaggaaacccggcattttctcacgatgaatgccgggtttcttgttgtaaatcatcgacttacggaaggtctattgtagcaaaaggtaaattgttgggcaaccaagaccgccagcctgtccatcagcacaccggagtcattgtagcaaaaggtaaattgttgggcaaccaagacttattatcgcggctggtcgccagagcggaactgtagcaaaaggcgaattgcggagtaaccaagacaccatcatgatcggggaaaaggctgtcgataattgtagcaaaaggtaaattgcggagtaaccaagacagcgacgagcgaactgcgcttttctattattattcaatggtaaggctaactttcaaaccgcagcaagcagttttccttttttgtggggtttacgaaggaaaactatactttgttgacttgattatgtgccttttcctgcccataatagggaaaagctcgccttgtggagaccgctctctaatgtcgttgttgacgaaactcaaaagttgcaccaattctgtatttcgacgggcgcatgcgccgaaaagcacaaaagtgcttgttctgattgacggagaccagttctcgaacgaggttacaaaacacatttccagtctactggaggtgatgggactgtctgccgatggcgccatgcatgtgtatgcaaatgaggcgaacatgggatggaatgccaatgtgaaagacggctcggtctctatcacgaaggttcctactcacaaagacgctgccgatttgaggcttatcatggacttgggaaagttcaagattgagccaggcatgacgattgcgatcgcaagcgcagacaagatttttcttaatgttttacgcattctcaaagagcgtggatgcagaaccatttccctttatcctgccaatggatggtcgcagccggatttcagtcaggctgccgacatttgtatcaacatccctcagtcaacgattaaaaaggcaatagcgtcaaaagcgcctgtcaaaagaaagtctcaactgcaaatcaaacagaccgttcacatcccaaccatgcaggcagcactagaaacttatatgcagatgggaggggataggaatgcacgatttcctatctcagaattcggcaactggctcaagaaccatacaaaccttgaaatcgacggcaaactgtctgatgccattcgagcgttgccgaattggcagctttccgacttggatgaggctcctgtgatggtagagcgaaaaagcaaacccagtgcttgaaggcttcatcgcatagaaaatgcccggccatcattacgaaaagccgggcaggggacaaggcttggccaggtcaggccggaacagaagcagcaacgtcggcctttgcatttcgttctgcatgaaactcttctggagaatatgacttctccacgccggttacctgattccgaaccagaatctcggaacatttgatgccgggttcgccacgcatatagccaacattgcggtcgacatggagcttgatggtttcctgcaacttgccgtcttgatagttggcaatctgatccttcttcaaaaccgagaatttgtcggaatcccgcatgcccttgacgatctggcggtagatttccgggttgtcgataaccaccgggtcctgtccttcctgtttgacgacaaacacgtcttccgaaccggccccgtcgccggatttcacccgggcagcgtattcaatcttcgagatttccgcatgccaggctttgccggactttgtcatgaaagcatcttccggcaggtcgaaaaactcccgaacatttttcatggtggttttgaccgcccagttggtcgcacttgcggcgctcacgactgctgtacctccaagagccatgcccaccaggaagttaactgtggatgcgtctgtgaaatcccgaatggtgaaggcagttatgccacccaccgcgaccgcagcaagggccttgaactcaaccccgctgttttcaaatcgatcaaaggcgagggaggttagtttgcttgtcatgttctatttctcctcagagatagttgaccgccggaccaaggcaacggccgacacttgacgaccattctttcgaagaaaggtatccctctactatgcaagtgacaaaagcggtgctttagctgacgtctttgttacgacaagaccttgattatgttcgaaggcagaagaattcgcctggttgcgatatatccgagttttcgtaccccataaatcccgatggagacgagatgtaaagagtaagcatgtagtgaacaccaccattttcaacatctatcccttcgccggttacccagtaaggattggatggtgaggagctgtaatccggaaagaaatcgaattttgcgtttcgattgttcactataatgctttctgccaccaaatagtctggcaaggctcccccctgcgatgcgcagtagtcttgcgcatcctgccagggcagggtcgggtagtctagtgccatcaaatagtaacgcacagaagactgagtggtaacgtattcagaaccatcttggcaagcagtcccaacaggacctgtggtacacccatcatagacgaacacagaggcgcccgctgaagccgtgttattggcaacgtcactgactgatatctggaagtcgtaactacctccagaataagaggtgcccgttatttggcccgtctgtgcgtctaacgacagtcctggaggaacgcttcccgaccaatcccagaacaacgcatcgccctctgggtcagatgcactcagcgcggaactataagcagtccccatagccaaactggatacgatgctacctgacaggactggaggaagattttcagtttccacggctgattgaagcacatctgtcgccattttgtgcctgaagcgatattcttgtgcatctgcttcgggagccacaacaaacgcacttactaacaaggcaaaaagccaactcaattggaagcgcatggcggatacacctcatctctaatgccatatctgtgcatcgtcttcaaggccatgcctttgatagcacgctttccctgaaggattaatcaattaatagtattcatgaactataagaaaacaagcagagttttcttattttaaggaaaattcgctgttacggcttcacctatcaagaaagtcggtccaaattgagtacgagctctgctatgagaatggtttcaactggtatcatttttgacggacagaaaggcttcgactatattcattaccggataagatgcggactatgtgaacatcggaggaagagccaatgtcggaatacggtacctggggcgtcgaggacaacccaatagtcgcgcaaatcaaaagatgcatggatgcgtttgaccgaattgagagcaaagtagttcaccggccggatgatgaagcgcaaaccacagtctggcacaacatcaccgggcggtggtatccgttcattatttccggccttctctgcgcaattgccattgaggctgttgctgtcgctgtgatggtacgatagccgccgcccggcttgattaactactgccgttagcccccatatttatggcgaaaccttctgttgtcgtctaaaacctttgcatttaaactcaaggttgatgaactgtgtgtaaagcgcagataaacaacatgagcaaccgccagacttcggggtctaaatattggagaggctgaatgttaaatagaaatatcaagacaggggcggcgttggcgcttgccacatccataatggtttccatgccactcagtgctgcgagcgctgcggacacggcatttaaagaaacaacacaaaggtccactgcattcatcaaaacaaccagtgctgaagactgcccctatattccagccgcggtatccaattctggttcggatactcaaggccttgtggcgggagcatttctgggcgcagcaagcactgtggtcgcaaaggcagcttacaccggtgtaaaagactaccttaacgatttgaaggacgcaaaaaccgcgacttacatcgcttccggtccggttgatctgacggcaaacaactgcattgtcattacccggggcgtggttacggctgccagtatctctgataagacggtggaggcgggtatctctcaggagcgctataatcagacgctccaactggcgaagacgccggactttatgctccagctaaacattcttcaggacgatgcccaaaacatccaggtagagacaacggcagaggacgggacagccgccacagaaacgctatcgcagttcgtgattaaaccgagatattttgtctttggaaagtcagcgtcggagcgcagtgagacaaacagcaaggagattggcctcgttctggtcctgagggaagagccgacatcaaaaacgtccaaggatgacgtagaaaaggacgcgacattcgtaatccccatcaatctgggaaaagttgcacctcgaaccttcatggcgacctacgagatgtttccaggggaagctgccacactcaaggtcaagaaggggacaaagctcaatggttatgctttgatttcagagacagaagaggccgggaaaatactgaaactgatatccagtgcgtatgaggatagcggggatgacatcaaaaccgcgcttaccgatgccctgaaggacgcccttcccaagtctgaagattgattttacggggaggggcggttgaccagcaccaacagaaataaccctcgagaggaaaatgggtaggactagatgaaataaggatattgttgacatcaaagaacaaaaccggattcatgcaaaaacccggtcgaaatctcactcgaaacaacaagaaactcggcacttttctgatgaagaatgcggagtttcttgttgtgtgtcagatacttatctgaagcctattgtagcaaaaggtaaattgttgggcaaccaagactagtcatccggcagaaatgcgagcggatcgattgtagcaaaaggtaaattgttgggcaaccaagaccattaaccggtcgtgctgttcgcgaggtgaattgtagcaaaaggtaaattgcaaagcaaaacgaattacgacgaggagatagcttccaagacctcgtcatcatcatcgaaccagccgtttccggctaagtcaaaccgttcgtcgagcattacgcacagctcaatggcggccttggaagggtcggctgggtgtttacgaatggtttcttccacctgagttcgaatgctgttggccatgtgggttcctttaagtttttggtcattgtggttggagcgtgcgaggggcagacgggtcatctcgtcaatgttctataatatatcttatgacaaatttgttgacgacgcccgcaactaggctccatctaagagtggcgtgaaatcaaggattttggaagcatttcttactaaatctcgcagcaagcataaatagctaagatagctaaccgcgccgctaagccgagatgactttgcatattttcgagaattcgccctaccggccttgaaaggcagacgttcgagaaagacattacggcgagaaaagactatgaggacatcaaaaatgacgaaaaccaaaataccctccgaacccaaacatcactttgtgccacagttctggattaaacagttccggcccatcaacaacccttccatccctgaaaatcaaaagtatcatgtatatgtgctgcgtgatacagcatcgggcattgagctgaaattcgagcatacatctggcttgatgcaggttccgcacctatacactattcagcctgaaggcgttgccaacacggatggcgaaaccgtctatttgaaccaagtggacaatgacggcagtaaagcttttcaagctattctggacgaagactacagcgccgctgtccgagacgcgttggcagaatttttcgcagttcaattcatgcgtgcgccccagacgttgtctcgccatgcaccgctttcgcaagatttagccagtggaattcgactgggcctggacgcaggcagttacaacgaattttgtcaaatactccaaggcattctccccaccgttcctgccttcactgaggaagagtatcagcgcattgtggaggtctcgaaaaacatgagcgaaaacgaaaggaacaaatgggaggacgagctttgtaaattgttgtccgtacctgggggaaacgcagatataccctttaccgatctgcttcacgaccgtagtggactggccccaatcaagtcagtattactcgacatgcagtggacactgaaaaaagcggaaagtggtgacttcattcttggagacgcatccctgctcacggacaaaggagatatttcgtctggaattaggataccattctccatgtcgcaggctttgtatctcacacctgccgcagccccgaccagtttgattgagactgatattgcttcagcgaatgaagtctttagtttgaacctggaatcagcagctcgcacaagacaatggcttattggctccaaacaggctttggaacacagggatattcaacatcagttccggagtgcccgcccgcttacacagccctgatgacagaaacccaaaggtgttatcgtcatcagggcgtttatccttgggcacctctagaattaaaaagaaaacttcgattgttcggcgattttctttcttctataagcgtttttcaggtcaaagaataattgagaatacgaaaacattatctttgccgccgagggcgattgtgatgcgttcattgccacactcttttgcgaataggtgtggtaatgaatgcaataaaccagatcgagggcgaaccaatgtttccatctcaaaaaatagctaactatttcctgcgctccgccgcctctcgtgggcagtttttaaatgctggacaggttctgaagctgacctatttagcgcatgcgcattatctcggtcaaaacaatgagccgctggtaaaggaacctgccattgcattgaattacggccccacattctcggatctatacgctgacctatcgtcgttccgtatggataccatctgtcaaacactgccagaaccactctcgcctgcggcaccggagatgtccgaagacatcatgaagttcctggacaattgctttgaagcatttgggcatctcgcattcaaacagttggcagtcctcgcgcgccctgagggtagcccttggcacagcgcccgccagcaacaagaccgagaaataagcaatacggatattgcagcgttctatgcccgtgaatatgctttcgaccccaattccagtgacgcagggccatcaccttcgatgtgagatgcaataccatagtcagcgtctcatacctgacgctgccagcttcgccgcctcggtcggggaccgatacgcttccagcgcttcctcatcgttctcgagcacaaactcgacgtaatccctatcgacacccggcatagtggggaagttggcgaccgtctctgaagggatggcatcaatgtacgccagcagagacgtaacgacctctctgagatcgtgttggttctgaagaactaaccgcagttcactagctttcagttcgacttcaagttcacttcccggattgagaacctggatgctgtcgccgtgtccatgcattgaagaccactgttcgacaaaagctttaattcttgtttcgctctcacacatgttggtacccatttctatcaacaaaaccaccgctcaaacatattccggaacaagcggcaaggtacaatttatttgttggttgcgtttatcgctcatagcatttccccagtatcaaaaagggaacatcacatgagcaaaaacatgttcgccagcatctcagcagttgtcgagcgtacacagatcggcggcattgggattttggcctccgaagaccagaacacgtgggagcctgacgaaatctgccgtttctttcaggatatcatcgatggcgtaccgctcaacgtggtcgttatgtgggaagtctccgaccaagaaaaccaatctaatgtgaaatgtgtcgaaccctatggctttccacgtcatgcaacaaagtcctacgtggttattcatggccgcgaggaaatcggagcccttagttgggcagcatctgtcgtcgatggagattttaaaaccgaccttcagaggatctcgtcaatttggaacaacgacagatgctttgttgtcgacctttcaacgcctcgccatgaggtgcactatgtgacaaaagcagaaacggaaagtcgggccacattgatcccgttcgggaacttgctcactttatccagcttcacgaaattgcttcacatgcaggatgaactagggaccgtcaaaaatctggagccggatgagcaaaggaggcttgggctattggcagaccgagtgcgcaacactcagattccgttggtgacacgaagccatctgaaatacaccgaagcattgaaactctctcggcgaatgagcgcgaaaacctatactgaattttcgaggaatcagagttcggtgacggagggtgaaacgccctcttcccttcggccttagtcaaacatcgtgccgggcacagttgcccttggagacttctatgaataacgtaaccataaagcacgcagtttgggccacaggcgttccacccgtcacaaccgcgtactgggcccaggaagattggatggctttcgaggatggtttcaggccaggtgattattatggtgaacgctatgacaagcaagcttggactgaatatctcaaggccaagaacgaacgcatcgtagccgaaatgcgggaaaataggggctggtctcctgaccctcgttctggtgaaccactcttcggtcggacggtgcactcagatgcaaaacttgccatccgtcaggcggtgttcgaggcaccgaaggtagtagcgtgggttccggagggtttctccgagcagaccggctgggtcgtctatgacccgaaagagccaattaaggggcttgagccggagttgctttgtttgaagcccgtagcactccctattccgctgagcgaaactgggaggaacattttaaatgcggtgctcgatgacgttgtgcattccatgaggaaacttcacacagacagcaatgcagatgttgcggtaccaaggccgtgaccaactaattgaaagggaaaagcaatgcgccacgcatcgttatatgaaattttcgaggatgctatcgcgacacaagggtggagcgacaatagccaacgtgtcgtcctacagcgatacatcgaaaaccagcaatcagaagcggccttcgacgaccatttgctacaacatgcccgcgaggtgaatcaggagcatattgtctcgtcagatggcttggaaggctacatgggctggagagacagagacatggtccgcatcatgcttgaatacatcgaaaaccagaagagtgatgattcctttgctgtttttctgagacaatgtgaatggataaacggtaagacctttaaggcggataatggtcgtgaactcacacagtcggaacacgggttcgtatcgggcaacatcctgatcgatgtggacgatctcgtaagccgcgacctcgaaggtgttatggagctcttcgcggagaagttggtaggaaatgagctgctatccgacatcagctatgatgtcgttggagtggaagacggtcaaatcgtcatgcgcatcactggcgatattcaacatattctcgcttcacgtgccgagaatgatgtggacggaagtttctctccgtgagttcagttgaacggtggcggccaatttgctgatttttaggcatatctgttgcggaccagggatagatagtgcgggagtatccattgcccgagctcgcatcggataacataaaggctgcccttctaccgcgactgagttactcgggatgaaatcaccttaaatacctgcacagaagaggaagtgagctaatgagtttggatgaatttgaggtgcctcggtgcaagctccagggaatactgaacgattttcaatcaggactcctcgagtatg

SEQ ID NO: 606 - DNA, 17449 bp, synthetic construct
  misc_feature 1..17449: note = Synthetic
  source 1..17449: mol_type = other DNA
tagtgtcagtatcaaagcacgagacatctccataagtattagttactgtaatggaatagagcccagacatttcaataggtaaatcactatttgtataaccagtactccattggtatgtatcaaacccttgtccaggagttaaggttataatctcaccttcgcaagcagctgtgtcaggacctagatcaatctcgggctgaggtattactgtaatagttatagaatccatgtcactattaccatgaattgtatcactaacaataccataatatgttgttgtttgagtaggataaacagtgtatggaccgaacccatcttgaccagctacttgtccatagctagtgctatctggacaaacaatatttaccatatctaatccccagtgatcaaaatccatacttgaataagcatgttgtctaaatctaaacatagtattaggagaagcggctcctggaggtacttgaaaattatattgagcccaggtagtgaaaggagtttgttgtccagcacctactgctacaaatccagtactattaggatatgaaggacatataactccatcaggtctgaaatatgcaatatctatccaagtagtcccaccatttatagaatattgtaatgatattccttcatctgctaaatcgggaccttcacaagtagtaccactattaccgtgttgcacttcaaatcttaaccagaatgatatttcacaatctgtacttacagaaaatgggactgttgttaaagttctgggaataggtacattgtaccccatccacatataaatagcatcgggcccaggaccacacggatttgtaaaatctacacctgtagttgctacccagcccgctcctggtgtacctgtgttgaaatcattactcatcaaatatccacaaccaccctctccccaaattgttacactgtcgccctcacatattacagtttgattagcatatacttgcatattacattgcccatatatttctgatatattagtaaatgcaatgattaaaaaaagtttcaaataatttaaaaatatttttgttttcatattttttgtttaaaaattaacataattattgagttttaatgtattataaatatagtaccatttagttcattataattattctcagcatctttatacataagtttataagtatagactccctgaggtagataatcgccattgtatttgccatcccatctaaatcctggatctaaagtatgatataataattcaccccatttattatatatactaaaagaaaaattatcaatatctatattttctgcaaatatatggaaataatcattgacttcatcaacattatagggactaaaagcattaggtacgaaaatttgagtaattacgctacaatcctctatatatactgtagtttgaccatttacagtatcacaacctattacttgtacttcgaaatcataagaaccaggaggataatagtctatatataatacgggtttatttagtccattagaccaatgatattgataccaattattatgagattgtgaaactgataaagtaaggctctcattatgacatatagttgtatctattggtaaatttatcgaagcagttggtattaattttacatatatagtatcagcatctccacaaatattgtaattatcataagtgacgctaacccaataattaccataattatttgccatgatagtaggtgtagtcatgccattagaccataaatatgtaaaaccactatcaggttgagtagcatctaatagaatgggttgagtgacgcataaatcttcacctaaatttacatgagcattaggtacaaaaaatacaataacactatcgcttgcactgcaagtgatattactcattatattggaaacagtaacataataggtgccattctcagttacattaattctagaagtattttcttcagtgttccaataataactgtcgaaattatcgccaggagatagagaaacagagataccttcacaagtatctatatctaatccaagttctggttctggatttggtattacattgatagtaatggaatcgatggcctggtaatcatgaacagtgtcatatattcccactgaataagtagtagtttgtgtaggattaacaataataggaccttctatagtatcgccagtagaccattctatataagggaaagtaggacataaaatttgtactatatcgaggccccagtgatcaaatccttgtccagaatatacttcttgataccatctaaatcttgttgcattagatactgctcctggtggcactaagaaattatactgattccacgttgtaaatgcagtagtttgtcctgttcctacagaagtaaaacctgcagtatatgggaatgttgggcatattaccccatctggcctgaagtatgctatagttacccatgtattgccgttatctatggaatattgtaaagaaacaccttcacctacaagatctggtccttcacagggggaactttgtccttgtatagaaaactttaaccaaaatgatataatacaatctgtagttacactaaatggaactgttgtcaatattcttggtattggcacattccctcccatccacatatgtatgctgtcaggcccagggccacaaggatttgtgaagtcgacaccagtagtagctacccaccctgtaccaggtgtaccatcattgaaattattattcattaatgaaccacattcaccatctgcccataaacttacactatcaccttggcatataatagtatcattagcataaactgttatattacattgtgctgataaatgattggtaaaagttgatacaataataaaagtacttataatacttaaaaataaattttttaacatttttgatttttctatttagacaagcaaaattaataaatgttaaatagatgttaaaaaaaattaatcttttttattttataaatgtattctaaaataaatattattattttactaatttttataatctaatgaatgtagaagaataaataattgtattttaactataagattattaattttttatttagttataatcttgtaaattttaaatttttacttatctatcctactaagtgtaaattctaaagcttcatttatcatttcctcaggaggtaaaagaataaaatcatttttgatcatggaattagttaattctctagcgtaggtaatatctttttttgcccattggtaagcttgttgatagcttaatatttttctggctactccatttttaatggcttccatagctacagtagcagctacaatagggaaaacctctgcttcatccattgttggcataatgttattagcatctataccacgatcataagcaaattgtgctaatgcattagctgctgctatagccatctcatcagttatttttttagatctcaccattagagcacctttcaaaatgcctgggaaaccaagagaattatttacttgatttgggaaatcgcctctaccagtggctacgacatatgctccagcctctttagctgcataaggatatatttctggcacgggattagcacaagcgaaaactatagctttatctgccattaatttaatccattcttgtttaatggtattaggacctggcttagataaagaaattaatacatctgcacctaacatagcttctgctatgtcatttaccttaccaggattagttgtcagacataattcccattttctgtaataacgtttatcattgtaaatgtcttttctatctatatttaatgaacctttactatcaaagacaattatattttgaggatctgctcctctagcaattaataatctagcaattgtagtatttgaagctccagcaccgtaaagaatgatttttacattttctatttttttattaacaattttcaaagcatttaataaaccagctaaagtgacgcaggctgttccctgagcatcatcgtgccaaacaggtatatcgcagctatctcgcaaagtgtctaaaactttgaaacaattaggttggcttatatcttccaggtttatagctccgaaggaatgttgaaccatttgtacaaacttaatgatattatctgggtcattttctcctttttcatttttgctatctatacataatggtactgcatctatgccacctaaatatttcattaaaaatgctttaccttccattacacctaaaccacctggaggagttacatcgccatcacctagtacacgtgtagaatcgctgattacagctaccatattaccacgattacttaattcgaaagattcgtcattgttatctcttatgagagtgcttacagcgctgacaccaggtgtataccatacattaaaccaattaaaaccaggattgggaactttaggaactatttgtatcttaccattataaaatctatgtgatagctcagctaattttttaaaaaaaattgtcttagctttagacaattgctcctctgtgaatgatgaggggaataatcgatctacatcttttaatgttattttatttctcataataacaatattatttaataaatttaatctcttgggaaagtaaatgaatagccaagggtaataacagtattatacatccctctattaaagtagtaagtagcgccagagtaatgcttacgaataggcaaaatagattgatctacttcgaaaaacatcctatgagaatcattaatatcataactaaaacctgctaccacactgaattcaaatctataaaaaggttctagcatagccactaaaccattctcatcccatatattatcagtggttttagtaagtactgctcctgctaagccaataaaaacatttaggttatctactggtaattcatattcatataacagtggcatttctatgtaatttaatctaagcaaaaagctagttgggttttcgctagtgggattttttctactacccttttgagagaatactaattctaattttaattttgattgttcattaatattataaaaagtaaaaacaccagctctagcaccgaatttattaaaacccgagagttgatctccagacacttgactgccattaagtcctaatgtgaaaccaccaccaaaattttggccaaaagtaattgtagatattaatattaagatgataaaaacaatttttttcatattgcttataaattctcattaaaataattctctattaaatcattaagatgatagcgatctacacccatgacattatgactatgagtaggataaacaaagaaatctactaatttacctttgtctatacatgcttttaagaaactcaatacattttgaggaaccaccacatcatcttgataaccatgaattaataatattttgccatgaacattattcacgtaattaagtaaacttgcatttttataaccatcaggattttgctcaggagtatccatgtacctttcgccgtacattacttcataatatttccagtctattacagcaccacctgccacagcaactttgaaagttttgggttgtttgagcatcagactcatagtcatgaagccaccatagctccagccatgaacgccgattctattagtatctatccaagttttttgctttagccaattaataccagtcatctgatcttcgacctcatatttgcctaaatttctatgaataatactttcgaattcaaaacctctattagctgaaccacgattgtcgagagtaaatatgacataaccacgactagctaaataaggtaaaaaagtacctgcaccacctgtccaactatcagttatcatttgagcatgaggacctccatatacgtaatctatcacagggtatctttttgtagaatcgaaatctaatggaagaaataatctacaatataatgtatctccattactattggtaagtgtaaatatttgtggtttaggtaaaatattatctctgaaaagatctatagctagtatcaagtttgtagctttattttttttgagatctatgtattgagcatgatatacagtatctgtattagaatattcatcaataacggctgtaccatttttatttattactatgctatgagtacctctacctttgtctaattgattaaattgtaaagtagtgaaatcaaaactataggcatgcgtctctataggagagtcatatgtaccatagaaccacaatgcgtcaccattattgaaaaaatcaccgaactccgttaccatccaattaccataagttatttgtcttagcagattgccattaatatcatataaatacaaatgccaatatccatctctctgactaaaatatataaattgatcattatgattaggtctgaaatatagaggtgtctgcggctctacgtatctatcatttttttcttcgaaaagtgtttttactaatgagccattgtttgtatcatacatattcatttgtagataattctgatctctatttaatatacctatgaagatatatttctcgcttggatgccaagtaacacttgttaaatagtgatctatattttcacctgtttgtaaatatacagtagattttttattaacatcataaacacctaaagtaacgtaatgactttgcatgccagccataggatatttaatatttttcaaagtagcaacacgtgtagtaatgtctacaagtgggtaatctgatacttttcgttgatccattctataaaaagctaaatatctacctgtaggagaccaaaaaataccagtatttatgccaaattcattacgatgaacagattgtccaaatacaatattagtgtctatatcactagctactacagtctgcatgccattatgagctatgtataaattgtttttcagagtatatgccacttgcagagtatttggctcaatagcaaggtatttggctgcatttggccatttagctataaattctgatttttttgttttgaaattataaatatacaaagtggtatctattgtcatcactaaagtatctttacctttccactgatattctgggaaagcttctaaactaccagataattctggcggtaaaacttttttcaattgttcttgacatagtaaattagtatatttaccatttttaaaaagtactagattttctagactatctactaaagagaaagactctccatcgggataagcttgtacttgtgttaatgagtaaaagcgttgataatatttgaaaatatctcgataggaattaatcttttgtgcatcaataaatgtaactgcaaataagctaataaaaaggaaaataaattttaaatttttcatatattttattttattagcaaaaataataataaaagataaaagtaataaataaaatttgttagatgaatttgataaataagtaaaattatttattacttacgttatttttgtttatttgcagtatttctgatgaaattatatgcacttgctaatgaaatattgcccggcacctcgccctcaccaatgaaattttttatattattccatgtattgataattatctggtttttataattattattggcttgtgttatttcttcctgctccattattgcagctatattttgtaaaccttgataaatggtgcgagtgtctactaattctgctgaatattctaaatcttgttgttgtaaaggaatgattgattttttcatttctaatggtgcaatattagactcagctaaataattaatgtttggagtattatgattattagtatgttctatggtagtggagctatgagctgtctgagtagtatttagtgtagaatgattataagaagggttttgataagtttctattaacttttcatattcatatctaggagctaaagttaggaactcattattattaatttttttgtctaaaaaactaatactagctaaaatactcacaactaacactagagctactatagcagcatatctcaaaattggtaaaaagtttatttgttttttattatcactaggtatagctttcaatttttgcttaaagtcttcatctaaagagacatttgcagtatcactttcattataaatttggtaaaaaacatttacatatttttgttttttactattttctaaatctatgtattgatgtagaaatttatcgaaatttttattttttttcattttcataataaattctccattttaccaatgattgatttgacttgttgtctaccacgatgcagatatacttttacttgagtttcgctaatgtttagttggtctgctatttctctatagctatagccttgctcatctctcatcataataattttttgttgtagctctggcaaagtattaattacattggttaaattttttttaacatcaaaattacttatataagaataattagtctggtaaagctctattacatttacattcatatcctcatcatcatcctgataagagaaatacaaagattcgaatctattagcatatctagtttcatctattatcaagtgataagcaatagtgaataaatatggtttaatcttgttattttttattttgtctttgttttcccataaacgaataaagctctcctgtactacatcttttgccatatcatcatcttgtaatgcttttaaggcaaaagcatacaaatgatcactgtatttatctacagatttattatattcttttatagtcataacttatctacaaatataacgattttttatttaaaaagttacaaattattaaatttgtaaaaaaaatgtctgaattagatgagaaatacatgctcagatgcatagaattagcagcaaaaggtctcggatatgtgaaatctaatccactagttggttgtgtaattgtgaaagatgataaaattattagcgaaggttatcatcatgcttttggtatgccacacgctgagcgagtagctattgataatttagaagataaaactcaaataaaagatagtacaatctatgtgaatttagaaccatgctctcattatggtaaaacacctccttgtgcaccatatgtagccaagatgaacccacgtagagtagttatagcagatatagatcctaaccctttagtaaataatcaaggaattaagatattacaagatgcaggaatacaagtagatgtaggcatttgtagtatagagaataggaagctaaataaacgtttttttacttttatagaaaaaaaacgtccatacattatacttaaatgggcacaaactctcgatggattcattgcagagaaacagcaaaatggtataaattggataagcaataatgcagctaagcagatagtgcataaatggcgagctgaagagatggcaatattagtaggagctggcacagtgagatgtgacgacccactactcacaaccagacattggtgtggtgataatccgataagaatggtagttactaattctggtaaattacctctaaaagctaaaatattcgatgagcaagcaaaaacaattttattttataaaaacaatctaaatatcactgtcaatgcagacaaaatggatgtcgtaaaaatcgaaaaagattttatagatacattatatgcttattgtgtggataataatattacttccatacttatagagggaggtagtcaattattaaatacttttattagcagagagcaatgggatgaggctagagttgtggtaggtgataaagtatttggtcagggagtgcgagcacctatcattagccaatacacagagataaatattgaaaacatagataacgataggataattcattataccagataaaataaaagaggcgagttgccccgcctctactgttttcacaacggacttaaagtccttattgtgaattgctaacattttgatatgcaaaattaataattatttttaaataacaaaaaaaattatttttaaaattaattttatttaaaaatccatatattttagataaaatattatatttgcataaataaaaaaacaaaccatatgaaaattttaggattagatttaggtgtagcctctattggatgggcactagtagaaaaaaataatgaaaatggagaaatcaatttaattaaatcaggtgtgaggataataccaatagaaaccaaagatgccttgcaatttagttctggtaatactgcatcgccaaatattgagaggcgagaaaaacgtatgcagcgacgaatgtattttcgtaggaaaaaacgcaatcagtctttaataaaagcactaaaagataaaggactatgggatgtgaacttgattaatatagaaaaaaataaattatgggagctcagaaataatgctgtaaatgaacaaatccctttgacagaacttggcagaatattgtaccatttagctcaacgtcgcggatataaacaaatgagaatagaacaagatgaatccgatgctaatagtaaatctgactataagaaaaatatttatactcgatatcagactataaaaaatgaaaacgttaccgtcggtcagtatttttataaagaattatctaataatgaacattatagagtaaaggagcaaattttccctagaaaagcctacgaagaagaatttgaaaaaattataaataaacaaaaagaatattacccagatattttaacagatgaatataataataaaattaggcatatcatttttcatcaaagacctttgaaatctcaaaaacaccttttaggtgtgtgcactttagaaggaaaaactatcaaaataaaaaataatgatggcacagtaaaagaaaaatatgcgggtccccccgttgtagctaagactaatcctttatttcaaatacatagaatatggcaaactattaataatattaccattaaaaataaaaaaactcataaaatttatgaactttctatagaagaaaaaaataaaatttttaatgaattacagaataaagattcattatctattaaacaattatataaaatattaaatttatccgatgatgaatggtattttgataaacttagtaaaaatggaataaaaggtaatgaacttttgactcttataaggaatgctctgaaaggagagaactatccacaggatatgctaaaacttgaaatcaaaattattaattataaaaagaaaatagttgacaaagatactggcgaaatcaaagaacaagagctcgaaatgattgatccagatgtagtaaatgagcctctttataaactttggcatattttatattctgtagtagataaagaagaatgtatgaaggctctaataaaaaattttaaacttactgagtctgctgctgataaattatcagatatcaatatgaactcaatgaaatatggtagcttgtcattaaaagctatcagaaaaacccttccatatttaatgaaaggaatgatatatagcgtggcatgcgatacagcaggttatgatttttctaatgctatcactaaagaagaaaatacatttagaaaagtaaaaaataaattggatttattacctaaaaatagccttagacaacctattgtagaaaaaattctaaatcaaatgattcatgtaattaattatataattgacgaaaataatggattagtgagtagagaagaaagagaaaaagggaattttgctattcatatagagctggctcgagaactcaaaactagtaaagatgaaaaacaaaaaatctctagttcaattagaagaaataaaatcgaaaatgaaaaaatcacctctgaactaacaaataaatatggtttgactcctacacgaaaattaatagaaaaatataaattatataatgaactaattcctgatgggagtaatgttgtgcaaccgcaatgcttgtattgtggaggttttatctctctgactgaagcattgactggagacgctatagatgtagatcatataatacctcaatctaagcttttcgatgattccaaaaataacaaaattctggtgcatgctagctgcaatagaacaaaaggaaatttgactgcatacgattttatgaaaactaaaaattctgatattttcaataattatctttcattagtcgaaactttaaagaataaaaaaagcatatcttatattaaatataaatatttattaataagtgaaaaagatatacctcaggatttcctagatagagatcttagagtatctcaatatataactaaaaaagctagagaattatgtatgaatatatcacgagatgtgttagtaacatctggcacaattactgcccgtctgagggaactatggggatacaacgatattctattcgaaattaataatgaactaatgaataatcttgatttaacagatgatgacatagctcaattagaagaaatatttagagataaacgaacagatcatcgccatcatgctattgatgcagttactatagctagtaccacgcgtagtattattcagcgaataaatacattaagctctactgagagtaaagaaaaaattaatgaatatttaaagcaaatgaatcaagaatcattggatactgtatataatcctaatgagaaaaatttaagattactgcacaaatatttagccaatcagccacatcctaagcgtgatcaagtaaaacaaagtatgaagtatatacttatatcttttaaacctggcaaaaaagtagccacttactcaaaaaggatagtatatttaggcaataaacccaaaatattacaaactcgtattttgacaccacgtggagctctgcacgaagaaagttattatggccgcatacctatctatgaatttaaagacctcaaatatgctatacaaaatccagatttagtggttaataatcatattcgtaatcaaatcaaagaattacttgacaaatataataatgatacaaaaaaattatggaaggatattgataaagaaaaagtgttcatttattctgatattaacaactctaatgctataaaagatgttaagtgctatcattatgaatatgttattaaaaaatctgtacaaggcgacaaagtagatcaaaaagctattgataaaaaaataaaagagatccttgctaatagtaaaaatgttaaagaagaagtttatttcaattatgcgaaacacataccaattcgtagtgtgagagtctttactggactaaatgaaagtagtatgagacctatcagattaaacgacaaaaatgagcctattacctttgtgaaattaggtaataatcatcatatagctatctatcaagataaaaacgagaagtatcaagagcatttatgtgatttctggcatgcagtagaacgaaaaaaatataatatccctgtaataatcgaaaaccctgataagatatgggatgaaatattagaaaatcctgatagctatccacaagattttctgaataagctgccagatccatcatggcatttagtactcagctttcaagcaaatgaaatgtttgtattagggctcagtaatgaagagtttgatcaatattttgtagataaaaattatgctatactttctaatcacttatatagagttcaaaaattatcaactaatcaatatttctttagaaagcaaaatgatacatcatctgatttgtcttctttataccgaaagatagaatatttgaaacaattgtctattcaatcattattaaaagaaaatccaattaaagtaagaataaattatttaggagaaatagtggattataaaaaaacattttaataaacaataaaaaacatgcttaaacgcacaatttattttggtaatccagctcatataagtataaaaaataaacttttatgtgctgagataaaagatgcagatgatccatctattgctaccaagcaggtatcatttgctttttcagatttaggatttatcgtattagatcatccccagattactattacacattatgctttatctgcattggcagagcaagatatagtggttatttcttgcgatcagaaacatttacctatatcattaaatttacctatttatggtaataccttacattctaagcgaatacaaaagcaaatatctattacagtgccacaaaaaaagcaattgtgggcaagtatcattaaacaaaaaattattaatcaagctaagatactatctatactaaagcctggaatttctgtagagcttttgataaatgctagcaaagatgtacgttcaggagatactactaatagagaagcatatgcttctacattttattggaaacacttatttgacttagatttcataagagatagatatggagatcctcctaatcatctactaaactacggttatgctatagtacgctcatctatagctaaagctatagttggtagtgggctacatccgagtttaggactttttcacaaaaatcaatacaatgcattttgtctagcagatgatctgatggagccatatagaccatttgtagatttcactgtatttagcatggctgctagagaagatatatcagaggaattgactacaaagataaaacgagaattattatcaatattaactatggatgttatagttaataaacgaactagccctctaatggtagctacacagcatacagctgattcttatcagcaatatctgagtgataaaaagacaaaattaaaattaccagaaattccaaaaaattatgcaacaacaaagattaagtgcttatcgtagtatgtggttaataatattatatgatttgccaactgagacagctgagcaaagaaaaaaagcagctcgatttcataaagatctccagagcttaggcttttctatgtttcaatttagcgtgtatgttcgtaactctttaagtggagaatacttaacagttacaaaaaatcaagtaaaaagcttaatgcctagtgatggtacgatagctatgttagaattgaccgatagacaattcgcaaatatcgaaattttcgttggccaaaagaaacaaccgccgcctgataaacctatacaattagaattattttgatttgtataggtcaaataattaaaatcataaattcgaaattattagttatggtggctgacttctatacaactcagacaccacttttacttgttttgctggatgagtaaagcctttatgcttgtaccgataccatcgatcatgaaatttacaaataattccctaatgcagtattaattagagcttacgttttttttaaaaattttagttaaatgttttactaaattatataaaaaaagcactccatggagtgctttttttcataacatttgcagttttttatagaatagtaatcctctacgatcctttattcatcacacatagaggtatggtcgctgcaaacgcttttgcaaagttatcaaaatgttagcaattcacaacatagacaccctgctgtcttaagtcaaaacggctgcaaacgcttttgcaaagttatcaaaatgttagcaattcacaactccagttctgctattaaagataaaactaaagctgcaaacgcttttgcaaagttatcaaaatgttagcaattcacaactgttttacgttccttttcaaaaatagtttcgctgcaaacgcttttgcaaagttatcaaaatgttagcaattcacaacgtcaatttgcttattacatctgcattttgagctgcaaacgcttttgcaaagttatcaaaatgttagcaattcacaacacaccatacacctttacatcgccatcaaacgctgcaaacgcttttgcaaagttatcaaaatgttagcaattcacaacattagctcttttatgtctttaacgtcaaaagctgcaaacgcttttgcaaagttatcaaaatgttagcaattcacaactaaaatcaaacgatgaattttcaaaagtttgctgcaaacgcttttgcaaagttatcaaaatgttagcaattcacaacttatacgtgtttagacaaattaataagtttgctgcaaacgcttttgcaaagttatcaaaatgttagcaattcacaacacaagactttatgtcaaaaaataacataaggctgcaaacgcttttgcaaagttatcaaaatgttagcaattcacaaccaggttcgtcgtgatttatctcaacatctcgctgcaaacgcttttgcaaagttatcaaaatgttagcaattcacaaccactggtaaagcaataaagcatatattacagctgcaaacgcttttgcaaagttatcaaaatgttagcaattcacaactaaatcatcatctaatttgtaaaaataatagctgcaaacgcttttgcaaagttatcaaaatgttagcaattcacaactaaatttcttttattctcaaacctgtttacgctgcaaacgcttttgcaaagttatcaaaatgttagcaattcacaacaagctcccttttaaattcgttgttccattcgctgcaaacgcttttgcaaagttatcaaaatgttagcaattcacaacaagaaagattagagcagcttaatattaagcgctgcaaacgcttttgcaaagttatcaaaatgttagcaattcacaacgattagatatagagttgaacggctctcaaggctgcaaacgcttttgcaaagttatcaaaatgttagcaattcacaaccaccccgcaaggttctaatataatttataagctgcaaacgcttttgcaaagttatcaaaatgttagcaattcacaacgttgtatctttgtgtatagaaattttagaagctgcaaacgcttttgcaaagttatcaaaatgttagcaattcacaacgtgtaaaaaatatactattttgtctaaaagctgcaaacgcttttgcaaagttatcaaaatgttagcaattcacaactcttccagctttcgtgagctgtaaagtctcgctgcaaacgcttttgcaaagttatcaaaatgttagcaattcacaacgcaaatgtgtttaagaaaaaattctcaaagctgcaaacgcttttgcaaagttatcaaaatgttagcaattcacaacatcttcatctaatatataataatctaataagctgcaaacgcttttgcaaagttatcaaaatgttagcaattcacaaccacaattgaccaaattattaacgcattaagctgcaaacgcttttgcaaagttatcaaaatgttagcaattcacaacgagtaaaaggtggtggtggttttggggaaagctgcaaacgcttttgcaaagttatcaaaatgttagcaattcacaacagaatgtcaggtctttttgcattttgtaatgctgcaaacgcttttgcaaagttatcaaaatgttagcaattcacaacacatatatagttgctggagatgtaaaaccagctgcaaacgcttttgcaaagttatcaaaatgttagcaattcacaacttagatattgggataaagcagggacacacggctgcaaacgcttttgcaaagttatcaaaatgttagcaattcacaacacatatat

SEQ ID NO: 607 - DNA, 13111 bp, synthetic construct
  variation 473..603: note = n is a, c, g, or t
  source 1..13111: mol_type = other DNA
  misc_feature 1..13111: note = Synthetic
catgggcgcaagttagccgccaccctcagtatgtatggtctcgcaagatccgccagcctcggggtgttcgcacccagaaaaggctgaagccgccggaaagggtgtcctgcgaacggaccagacgccacgtgcccgtacaccaggcatggtcggcccctgcacccaggatctccaactgcccgaaatcaagtgtccccatcgcctcccggtccggataccgtttttcatagcgtgccgttaccacggactttccgcaggtcctctccttgaggctgatgaagcaagcactgtcatcatacgcctgcatgaagctggggatgtcgccgttattccaggccttttcctgttgggaaatggttgaacggatggcatccatgtccgatgaggagaacgtgggagccgcgcaagctgccaataacaacaggaccacgacagggaagatcttaatgtacatgtggggcctctggtcggannnnnnnnnnnnnnnnnnnnnnnnnnnnnnnnnnnnnnnnnnnnnnnnnnnnnnnnnnnnnnnnnnnnnnnnnnnnnnnnnnnnnnnnnnnnnnnnnnnnnnnnnnnnnnnnnnnnnnnnnnnnnnnnnnngtacatgtggggcctctggtcggattgaaataggactctcctaagccgacttctggacacaggccgaagctaaggatcctgcggacctgccaccctgccgcatttgaatgaccgggccgaaattgaactcctgacgcccgctcccaaaacaaagccccccagctttcgctgaagggcttgctaccgtaggagtagcgcgagagtgacttgaacactcgacctcgtgattatgaatcacgcgctctaaccagctgagctaccgcgccatttcgggccgcgaatatagcaaggtgcccgaaccttgaaaactgggccatacttgcacggcaaccggatctgcttacctttcccccacaccgataccgagcttttcgaccatggcgcaattgaagaccaagccccgcagtaaggctgcgaaacccgccaaaccgtccgtcgggcgcaaaatgagcaagggaaaagccgcatccacgaaaaaggcttccgccaagaaggcgcccgcgaataagtctcccgcaaagaagtcctccgccaagaaggcgcccgtgaaaaaagctccggcgaggaaggccccagccaagaaggcgcccgtgaaaaaggccccggcaaagaaggttcccgccaagaaggcacccgtgaaaaaggccccggtgaagaaggccccagcaaagaaggcacccgtgaaaaaagccccggcgaagaaggccccagcaaagaaggcacccgagaaaaaagccccagcgaaaaaggccccagcaaagaaggcgcccgtgaaaaaggccccggtgaagaatgctcccgcaaagaaggcgcccgtgaaaaaggccccggcacagaaggcccccgccaaaacagtcccctcggtggcgcagctcccgaagaaggaagcggccccggtacgtccgccaaaatcggccctgaagcagcgataccagcttgaattctacctgaacgcctccgtcgcatcgctctacgaacatatcagcacgcccagtggcttcagcaaatggttctgcgatgacgtgaacgtcattgacagcatgtacaccttcaaatggggagaagataccgaggtcgcggaatgcctgaaccaacggtccggcgagtacatccgctttcgatgggcggacgacatggacgaggacccgaacgcctattttgaactgcgcatccgtatcgacggcatgaccaatgagacctgcttggtggtgacggatcacgcgtggcctagggacctggaagaggaaaaggccctctgggaatcgcagatccacacccttacccgggtcctgggcgcttgatccgtacttcttcggacgccgatgttcagcgttcgacctcagcgccatcgttttggcgatctttgcataccgcgcatgaagcgtttgcaccgcatgatcatcggggtctattggggacctctgctcgtcaccttccttatcgtgctcttccttttcagcatgcaatggctgtggaaatgggtggacgacctgatgggaaagggcctgccgtgggacgtgctcaccaaactgatcgcgttcgccacctctgccttcgtccctgccgtgcttcctctcgcggtactgctcagttccattatgaccatgggcgggctgggcgaacgatcggagctgacgccgatgaggtccgctggcctgggattgttcaagataatggcccccttggtggtgttcgtggtcggtctcgcggggttctcgttctatttcagcaacaacgtattgccggtggccaacctgaaattccaaagcctgttgtgggacgtcacccgcgcgaaaccggcgctgaacctgagaccgggcgtcttcttcggcgggttggacggcttctccatccgcgtgggtgacaaggacgaccgcacgggagagttgaaggatgtgctgatctacgaccatcgcaaaccgttccaggcgaacaagaccgttgtccgcgcggagaaagggaccatgcgccgcagcacggacggtcattacctagtgctggtgctggagaatggcaggatctatgatgagcgatcggacaatcccgcacgggccaacgggagctacccgctgcttcgcggccgcttccagcgggaagagatccgcctcgacctttccggcatgggcatgaaacgcacggacgaggacctcttcaaggatcattataaaatgttgacccttgggcagctgcagtatgcggaggacagcttggcgaagcgactggacacgcgaaagaaggagcaggaacaaaacctgcggaacgggttcctcgtgacgcgtgacagcacgaccgggagtgccgcaatggaacccggagaaggtgccggcctcctcgccgccgcacaggaacggaagatctggttccagaccgccaccgacaaggcgcgcaacacgatcaacgaactggggcgatccgtggacgagcggcgggaccgcaccgaacagatcgccaagttccaggtggaatggcaccgcaagctgatgctcgccttcgcctgcgtgatcttcttcttcatcggggcacccttgggcgccatcgtgcgcaaagggggcatgggcgtgcccaccgtgatcgcgatcatcttcttcctcgtgttccatatcctgagctattccaccgagcaaatggtgaaggccggcacgctttccgcatggcccggcatgtggatcagtaccatggtgctgcttcccatcggcatcttcctcacctggaaagcggcaacggacagcccgttgttcgaccgcgatgcgtatgatcgcacgtggaaccgtttccgatcgctcctcaaaccacgccatgcgcatcctccaactgtgcaataagcccccctatccgcccctcgatggcgggtccaaggccatgcacaacatcacgcagggcctgctggacgcggggcaccaggtgaaggtcctgtgcatcagcaccgccaagcacccgttgaaggtcgcctcaatacccgacgaataccgcgagcgcacccgtatcgaaggcgtcttcgtggacacttcgctgaacgtggtggacgcgttcaccgacctggtgacggcggacaactacaacatcagccgtttcttttccccggacatggacatccggctgatccagctgttgtcccaggaggagttcgacatcatccacttggaaagccttttcgtaacgccctacatccccacgctgcgccgctactccaaggcgcgcatcgtgctgcggtcacacaacctcgaacatgtgatccaagaacggatagccaagggggagcgcaacatcctgaagaagccctaccggaaattcctcgcccgccagctcaaggaatatgaacgcgaggtgctgaagcaggtggacggagtggccgccatcacggacgccgacgcccaacacatgagggaacatggctgcgagacgcccatcatcaccgtgcctttcggaatcgaccccggcgattacgaagcacccatgccgcccggcaggcccatcttcttccacttgggcagtatggactggatgcccaatgaggaagggatccgctggctcttgcgcaccgtgtggccccgtgtgatcaaaaagcacccggaggccaagctgcacctggccggtaaccgcatgccaaaggacatgatccgggcccggctgccgggcaccaccgtggtggggcgcgtgccggacgcgaaccgctacatcgcccaacggcatgtgatgctcgtccctctgttcagtgcaggtggcatgcgtgtgaagatcatcgagggcatggccatgggcaagtgcatcatcagcaccactatcggcgcggaaggcatcgaccataccccgggaaagaacatcctgatcgcggataccgccgccgccttcaccgaccagatcgacaaggtgctcgcggaaccacaattggccgatgccatcgggaaagaagcctggaaactggtacgcgcaaggcacaccaattcggacatcatcaaggaactggtggccttctacgcctctctggcaaaaacatgaggctgttggtagtgctttcccgtatgccctacccgctggaaaagggcgacaagctgcgtgcctaccacctgatcaagaggctggccaaacgccatgagatatacttgttctgcctgagcgaccagcacatcaagcctgaagatgcggagcacctgcgcagcttctgcaagcatctgcaagtggtacacctcccccgttggcggatcctgttgcgcgccgtcacctccgttttctcccgtctcccatttcaagtgagctacttccaccatcggcatgcccaacgagcgatcgacagcgtgatcagggacttccggccggaccatgtgctttgccaactggtccgcaccaccgagtatgtgcggcaccgctttgacctgggcaagaccttggactatatggacaccctgagcaagggcatggaacggcgcgccgagaacgccccgttccatctgcgcccgttctttaagaccgagacgcgaagactgatcggctatgaaaacctgatgctcgacctcttcgaccaccatgcgatcatcagcgcacaggaccgcgacctgctttaccacccgcaacgggaccaggtggaggtgatccccaacggtgtggacacggcctatttcaccccgcgggagaccgaaaaaaagcacgatctgcttttcaccgggaacatgaactacccgcccaacattgacagtgtgctcttcctcgtccatcacgtgctgccattggtgcatgcgcaacggccgggcaccaccctgctgatcgccggcgtggaccctgaccagcgggtgcgcgagctggccgtacgcgatacgcgggtcaccgtgagcggctgggtgaaggacatccgcgattcatacgcctctgcccggatattcgtggcccccatgcagatcggcaccggcctgcagaacaaactgctcgaggccttggccatgcgcatgccctgcgtcacctcggacctggccaacaacgccgttggtgccgagcccggagcctccatcctcatcggccacgatccccgcgactatgctgaccacatcttacgcctgttggaccatcccgaggaacgcgatcgcctcgcggcgaacggggagcgcttcgtacaccaggcgttcgactgggaccggtccaccgagcgcttggacaggctgatgttcccggcgcctttgcaagaaagtgtttaggatagcatcaagtgggcctggcggctccttggctgtaggttacaaacttcaggcgcattcggcctcttggtgcccaggtgccttggccccttggcttttggtgtaatcaggcccggcattcaggtcttcggcctcttggcattcaagccgcatgcttcaggctgtcgccgccatcacggtccggcgaggccacgcctgacaacggacaacggacaactacccgccatactccggccgcaacttataccccgcatccggccgctccatgtaatcattcaggtatgcatcgaaggaaggtgtggccggcaccagcaggtagaccgagatgaagcattgctcgcacggggccagctccggcgcggtgtaggccacctccgcttccaacagcaggccatggtccagcatggtggccaagctcacgttctcgcccatgggcaggtagcccagcttctgcccttcccaatacacggccaccgcgttggtatcgtgttcgttcccgtgttcgcgcaccaggtccagcgtgtcctctgcctgcatcttctgtatcagcgccgggccgttgtggtactggaagccgcgcacaaatgcgctgaacacaaagacaccgtggcagttctgcgtccacgccaaacggtcctgctccggcttgggcagcatggcccacggtggcagggtgagcaaggcggctttgcccagcatgttgcggaggaaggtggagcggtccatggcgggaaatgggtggcaataaaaacagaaaggcccccaccgaagcagaggccaagttttcactgcggcttatagccttactgtgatctgatgctgcaaagtaaatgaatttctacattacaaaccgattattgacggataatccaccagcattatgaagcggacacttggactggaccttggcaccaatagcattggttgggcgatcattacagaagtgaatggaaagaaatacatcaatgcgcatgacccagaagagagcatcggtcacaatccggtgctggctggatcggtgatcttcagtgaaggtgttgcgagggtgaaaggccacgaggtgccctcagtgagtacacgtactggagcgaggcggacgaggcgactgtacatgcgccgtcgcatgcggaagcaacgtttgctggagcacttgattaaaaatggaatgtgcccattaagcgaaggcggactgcacctatggaagaaggaaggcatctacccaaaagaagatggcttcacctcttggttcatgttgaacccttacgagttgcgtgcgaagggactacaagagaaactgatgccgttggagttggggcgcatcttttaccacatcgcgcaacgccgaggtttccggagcaatcgcaagggcggtgacggagagcagaagaccctgcatgaaggttcacctgatcggggtatcacgggctatgatgagacgaagaagttgatcgagcgttacgatacgctcggcaaggcgggcgctgaactgcataaaacccatacgccgatccgcaaccgctatgtgatgcgcattgaccttgtcgatgagttcaacaagctgtgggatgcacagaaggattttcacaaggaactgctgtccgatgcgctgaaagcggaattgggagatggcaagaacggtgatctgttcttccaacgggaactgaagggcaagaagggagacgtcggtcgctgtacgttggagcccggcaacaagcgcgcacccatgagcagcccgatcgcggaggtgttcaatgtgcttcatgccgtgaacaatatcaaggtgaacggggagaacctgactgaggccggccgcaaagccgtgctaccgtgtttcttccgcaagagcagccccacctttcctattggcgatgtgcgcaaagccttgaagaaggccaagatcgaaggtgaactgaactacgaaaagtgggagatccgcgcggccaaggagaacaaggaggtgaagctgaccggggcgcataccatcgcgcatttggcagcactttggaacgtggaaggcgtggatattctacgggcgtacggccccatgcgtacggaggatgaggccgaacgcaagaaatgggacgaccgatggaatctgatccatcgcgaacagaacgcttggggcgagatcagtgagcgcaaggcgaaaggacaatatgtgcgaaaagcggagagcaaatacgagcaacgcgacctgaaggagtacgccaagaacgtttggcaccttaccgacgaacaggtcaaggacaggaagaacttcgacctgaagcagggctaccacaacctgagcgcgcgggctatggggcgcatcctcccctacctctaccaaggcataccctatcacgatgccgtgctgttcgcgaacctgcccacagtcttcaaagtggtacacaagaaactggatgcgaacgggcggccgctcaccgacaagaacggcgacttcataactgaactacggaccggccccaacggaaagcctgaaccctatgtggacgatcgctgggccgatatgaacgaagaccaacgcgagcgcatccgcaatggcatgcgtgaacaagtaaagggtcagcgacaatacagcgtggaaacgatcctgctcaacggcctgatccgcaactaccgcgaccagttcaatgataagggccgacgccgggacttctggaacggcgactgggaccagcggcttggccttgccatcgacgaagccttctccaacagccaaaagcaggagatgggcgacagtggtcgtgcgcaacttgcggcaagcatcaaggccgcgttcctccaccacatcgagagccacgacaaggtgctcttcgagaaagtggcctcaatggaggaccgcatcaagttctggttgatcgatacatatccggaatacgaactcgccaagaccatcgacaagcgcgggcttaagcggcgcgtggaccaactctaccaccacagcgccataagcatgtaccgcgaacgcgacgaccggctgggcagcccgcttacgcgcggcatgaagaatcccatggtataccgtgcgctgcacacactgcggaaactggtgaacgacatgatctcaccggacgacccagcaaagaggttgatcgacaagaagacggtggtccacatcgaaatggcccggcagctggacagcgccaacaagcggcgggcttgggagaactaccaggccgagatgaagacctacaacgaagaggcagagaaggaactccgcgaacatttcgaggcgagcggtaacccgcacaaccccaccgatgacgagatcgaacgcatgtggctctaccaggaggcgcggcacttgttcggcgaagccaaatgcgtgtacaccggcaagccgatcggcgtaaacgacctgttcaatggaagcgtggagatagaacacaccctgccacggggcaagacggcggacaatagcatggcaaacaagatgctgtgcgacacgcgctacaaccgcgatgtgaagaaggtgggcttgccgggatcactgcccaacttcagcatgccggcccgcgcagcgaaccgcgattgtccggcgatcaatgacagcaccaagcccatctatgcgaagtggatgaagtacaaacgcgaggtggaagtgctgcgcaacaagagcaagtcggccaccaccaaggagcaaaaggacaaggccatacagaagcgctggtatgcccagttcttccgcaactattggcgcacgaagtacgagcacttgatggccgatgagatcaagccgcgcttcctgaaccggcaattggtggccacggcgcagatcaccaagctggcgcggagctacatgaacagctatttcgagaaggtggtgtgctacaagcccgaagcactgagcgccttccgcaaggaatggatgggcgagagcttcgtgaaagagaaggaccgcagcaagcacagccaccatgcggtggatgccgccgtgtgcgccgccgttgaccgaagtgtattcgatgcacttgcccagtactatgaagtacatgattcgaccgacccgaccgctagttttgaccatccttggaccagctttggaacggacatgcacaagctgcgcgatggcgcgctcatctaccatgtggacaaggcgagcatcgggaggcgaagcaccttcaacaccaaaatgaaactgaaggacggcacctggaaggaggtgaaagccacaggcgatacggtgcggggttcactgcatgaagacaccttctatggccgcattaagcacaagaaagttgaaaccaagtcctacgaactccagactgtcattcgtaaatccctattgggcgttactcagttcccattcacggaagcagacaaggcgaacgtagtggacccagcgatcaaggcgctgctcgctgacaaggatctggacgaaataaagaagaacggcggctttgatatgaacaccaagaacggcgatgccttcacgatacagaagatgaagaaggtgcgcgtgatgatccagagcagggtgaagaacccggttggcattaaagcccaccgcgatcaattgccaggctttgaacacaagcaccagttgtgggttacgggcgggggaaatcccatagcagcagtatatgccgatgaacgcggccgaccatacggctacgtgttcagccagttggaactggcgcaatacgcgaaaaccgcgcagtgccatactcgagcatcacttccccagctcataccgcacacgcaccctgagcatcctgagtggcaggtcatcaagctcagtggtcgccccttcatagtccataccgggcaaaaagtggtgatgtacaagagcgggccggaagagatcatgcgggacgatgcggaggacatgaaccggcgcacttacgtcatagacgagctacaggtgaatggcaacaatatccgcatgctcatgaccaatgtgctcgatgcgcgcgacccgaaactcatcccaaaggaaacagagagtatatggaatccggccaaccctctcaagaggttgcgcttcgctctttcaaagctcaaatgccagttcgacggcatcgacatcgacctgagcccactgccaacaacggtctgaccatcggggaagagacaaaggacgcttcatcccaaccgctccagcgcgaccgccttcagcggaaccaagtgtatgcgcaccacttcccacacgatcttgccatccgcattatcataggagtggatcaggcggttgcgcatgcccacgatcgggcgctgtccaccttcagtacaggatcctgcttagtgagcgtgacaatggcctcaccgatgatggccaagccgcgctcaacggcgcgcttggtcttgacatcgcgggtatagccgttcagcaaaacgatgccagccacgaagccctcgatctcggtgatcgccgtgaggatgtcagaccagaacttggcgcttcgatccatcgtagatcagcttcttggtacgttcgatctcggcacgcaagtaagggttgcgcaggctgctttccgttagcaggtccacgggccgttggaaaaggtcctccaagccgttccagatattgatgagcatgcctcccgccacttcatcggcggcgtccacctccaccagcacgtccacatcgctctccgggccaaaagtaccatgcacactgctgccaaaggcatacaatgcgactgacctggttcgcggccagcagggccccgaaagcggcgcggtcccggtcaatgagttcctttagcatgagctcaaatgtagacagccgtgcaggtgcatatcaccttggcccgatccttggcaggggtctgcccgtataaaccaccaccatggtcggacgcatccttcatttcagccagccttaccacctctcggtgaagctgagccagctcgtgatcaccaacaaggacacgggcgaggtcatcaaccggcccatagaggacacggccgtgctgatgctcgaacattcacagctgacgtacacacatgcagccatgcaggaactgatggcacacaatgtggccgtggtattctgcggtgccgactaccaccctgccggactgctcctccccctcagcggaaatgtattacagcatcatcgcttccaaagccagatcggggcaagcctaccgttgaccaaacaattgtggcagcaaacggtaaaggccaagatccagaaccaggctgctttgctggaaagccttggcaaaagcggacaggctcttcgccaaatggccgatgacgtgaagagcggcgacagcgaaaaccacgaggcccgagctgccaaggcctattggggccaactgttcctgactgatttccgccgagagcgggaaggtgcatggcccaattccgcattgaattacggctatgccgtgcttcgcgcagccacggcaagggccatcgtggccgctggcctattgcccacactgggcatacaccacagcaataagtacaatgccttctgcctggcggacgacctgatggaaccctaccggccgttcatcgatgccgaggtggtggaactgcaacaacttggcatcgacgagctgaacaaggctgccaaagctcaattgatcggcgcggtgctggccgatgtgaaacaggatggaaaaaagggtcctatgatggtggccttgcaccggacagcgcaaagtctattgggctgcttcgataagcaagggcggaaattgagctatcccctgttcaaataagccctatgaaaagccatcagggacggaacacgcactattgcctcaacgcctatcggatcatgtggctctttgtcttcttcgacctcccgacaagcacgcgtgaatacaggcgtgtctattccggttttcggaagcacatcatggcggatggctttaacatgctccaatacagtgtgtacacgcgccattgtgccagtcgggaaagcatgcatgtccatatgaggcgcgtccagaaattcgtacctaaggaaggacaggtgaccattctacagatcacggacaagcagtacagcgggatgatcaatatccttggcagggtccgcgaagcccttgcccctgccccgagccaattggaactcttctaggacaggaaattcgggaagggtcccggaaggcatgccttccgggacttcttttcttcccaccacaacggtcccttaacagcttggtccagagcgactacgtgccattggtgttgtcaaagatcgcgttgcggtatcagatcacagctgccgagctgggccatgtgctccaccagttgttgtcaaagatcgcgttgcggtatcagatcacagctcggaatacgaacctacgcccgaaagcgtcgttgtcaaagatcgcgttgcggtatcagatcacagccaa

SEQ ID NO: 608 - DNA, 14061 bp, synthetic construct
  misc_feature 1..14061: note = Synthetic
  source 1..14061: mol_type = other DNA
cagggtaattcatcaaaggatgacaatgttgttgatgctgagttcgaagaagttaaagacgacaagaaataatcttaaatcataaagattagtttaaaaggtgggtggagtattccacctgccttttgtcagttataaagaggataaaatggccgaaaaacgtgattactatgaggtgcttggcgtagacaaaggggcagatgatgcaacaatcaagcgtgcgttcaagcgtcttgctataaagtatcaccctgacagaaataaggatcctggtgcaggtgataagttccgtgaaattaacgaagcttatcaggtgttgtctgatcctcaaaagagagctgcttacgatcagtatggttttgctggtgctgatggttcacaggccggtggtggtaatccattcggcggtggtggtttcagcggcgctgatttcagtgatattttcggtgatgctttctctgatctcttcggtggtcgtggcggttttggttctcgtaaccagggaccacgtgaaattagaggtcgtgatatcagagctaagttaaccttaactttagaagaagctgtaaaaggctgcaagaagaagttaagtgttaagacttatgttaagtgtaaggactgcggaggctcaggcttaggcaagaacggtaagaaagagacttgccctgattgtaagggtagcggtactgttcatgtacgtcagggctttatggctttttctcagacctgttcacgttgtaatggtacaggtactattatcaccaacggttgtaagacctgcggtggcactggccgtgtagttgacttaaagaccttatcagttgatattcctgctggtgttgatactggcgatagaattcgcttaagtggcgaaggtgaggctggtttaaacggtgctggttccggtgatttatatgttgtaatcgaagtaaaagatcatgagatctttactcgtgatggcaatgatttgtactgtgaagtaccaatcagctttacaacagcagcactaggtggcaaggttgaagttcctacattagatggtcctgtaaatattacagtacatcctgagacccagaccggcgtaatgatgcgtctgtcaggcaagggtgttaagtcttataactcaacctttaaaggtaacctgtactgcaagattgtagttgagacacctgtaaacttaactaaagaacagaaagatctgttaaagaagtttgaggaatcattaaacggtgatgacaaagcttctacaacaggggatagtaaaaagaaaactgacaccgcagcgaagcataagccaaagtcagcaggcttcataaaaggtgttaagaagttctttgaggatctatcaagttaataatgtgagttgtacagctaatcataagttttcatattgaactaagttatagattaggttattatcaactcatatgatcatgaggacgcctgatgtaacagttaggcgtcatttttttatattttgaattgaggctattatcatggatcagactccaatgactcctcgtggcgaggatttacttcgcaaagaattacagcgcttaaagacagtagagagacctcgcattgtagctgcaattgccgaggctagaagccatggtgatcttagcgaaaacgcagagtacgatgcagcaaaagaagagcagggcctttgcgaagcaagaattaaagacatcgaaggcaagctagcaagtgctaacgttatcgatgtatctaagttaaagactcctaacggtggcaagctaaaggttatctttggtgcaactgtaaccgtagttgatgttgatactgacaaagagacaacttacagaatcgtaggtgaagatgaggccgacattcaggctaacttaatttcatacaagactcctatcgctaaaggcttattaggcaagtgcgaagaagacgagattgaaattaagatccctaagggaacaatctgctacgaaattgaaaaggttgagtatatctagagaaaacttagaactctgtatgtaacttaaaatcctagttacataatcctatttaagagaacggaagtggtatttggtgcttccgtttttttttgctgacttgcggaaaagtagactttaaaagtagactttaagtagactttaaagtagactttatttttgaaatatatttaaaatcaaatagatataaaaaatggaaattttttaagttcactgaaagaaactttaaatcgaactaaaaaagtacttttgttctgggaaaataaaaaacgccttattaaaaggcgccttttacatttacagtgaacttagaagttcaactaaagactagcgaggaagaatgaatctgctgtcgtcttttctctgtctgaatagaacagcaattctaccaactagagatactaattcagcattaacagtcttagcagctgtttcagcctgctcttttctaccttcaccagcatttaaacggatcttgataagctcgtgatgctcaatgctgctgtctagctctttaagcactgattctgaaagaccgtcattgcctagtaagacaactggctttaatgaatgagcttgtgcctttaaaaactggcgctgatgtgaattcaatgacatacaaaacctataataagaaaaaatatctgttaaaagcttaatctattgtgatttagacttcgcataaatgttgagcaaattgtataatattatcgagtaattttaaactgaaaaatctatagtaatatttgggatttatatttaatgccagcaaagaaaagaactgcaagccaaactagatggttacaggaacacttttccgatccttatgtgaagcaggcccacaagttaggactgcgttcacgcgcatctttcaagctagaagaattgcagaaaaaagatcacctgatccgacagggtaatatcgtagttgatcttggtgccgctcctggcggttggtctgaatatgccgtaaagtgcatcggagaaagcggtcgtgttatcgcctgtgacattctgccaataagacctattcgtaatgtacagtttttgcaaggtgacttcagagaagatgaagtcttcaaaaaactgtattcaatgatcggtgtcggtgctcatgtagtactatctgacatggctcctaatatgtcaggcaacctagctatcgatcagcctagagccatgctgttatcagaattagccttagatatggcaaggcgtgtactgcgtattggtggtagttttgctgtaaaagttttccagggggtaggttctcaggagttcttaaaagaattacatcaggactttaccactgttaaagtaagaaaacctgatgcttcaagagaccgttctcgtgaagtttatatggtagcaatgggctttaaaggacatcctttaaacggtgttgctccaggcgcagaatttgaagagtctgaagataagactttggagtaagtgagtaaatatgacaaaaaacctaatattatggctagtcattgctgtgattttaatgactctctttgagtcatttaactcatcagacaattcaggtcgtatggaagactacactagcttcgtaagagaagttcagtcagatcagatacaggaagttgtatttgatggcaaggttatcaatggcgtgaaaaagaacggtgaaagattcttaactgttatgcctttgagcgatcctgcaattatcgactctcttttatcacacaatgtaagagcatctggtactaagcctgaagagcagagcttattgctctcaatctttgtgtcatggttcccaatgttgcttttaattggtgtgtggatcttcttctcacgtcaaatgcaaggtggctctaagggcaatcctctgtcatttggtaagtcaaaagcaaaactgctctctgagaatcagattaagacaacctttgatgatgtagcaggttgtgatgaggctaaagaggatgtagttgaattagtagacttcttaaaagatccaaccaagtactctaagttaggcggacgcatcccacgtggagtgttaatggtaggtcctccaggtactggtaaaaccttattagcaagagctattgcaggtgaagctaaggtacctttcttctcaatatctggttctgatttcgtggagatgttcgtaggtgttggtgcttctcgtgtaagagacatgttcgctcaggctaagaagaatgctccatgtattatctttatcgacgaaattgatgcagtaggtcgcaagcgtggcgtcggcatgggcggtggtcatgacgaaagagagcagaccttaaaccagttactagttgagatggatggttttgaaggctttgaagctgtaattatcatcgctgcaactaacagacctgatgttcttgatcctgcactgttacgtccaggtcgttttgacagacaggtggttgtaggtttacctgatgtacgtggtcgtgagcagatcctaaatgttcatgtaaagaaagtacctttaggtaaagatgtcgatactgctactatcgcaagaggtactccaggcttctctggtgctgaattagctaaccttgtaaacgaagctgccttaaacgcagcacgtcataacaagcgtgtagtaagcatgaacgagtttgaagaagccaaagataaactcttaatgggtgctgaacgcagaagcatggctatgaatgagcatgaaaagatcaacactgcttatcatgaggcaggtcatgctatcgtaggtaaattagttccagaacacgatcctgtatacaaggtatctattattcctcgtggcagagctttaggtgtaaccatgtatctgcctgaacaggataaggtatctcaaagccgtatcggtcttttatcaaacatttctactctgttcgctggccgtatcgccgaagagttaatgtttggtactgatgctgtaactacaggtgcttcaaatgatattgaaagagcaactcagattgctcgtagcatggtaacccgttggggcttctcaaagagattggctcctatgcagtatgaaaaggacaatgaaggttctgcatacttaggtggttcatctactactatgatttcaatgtcagatgaaactgccaagatcatcgatgaggaagtaacagaaatcatcaactcatgctacaagaaagctcaggatttacttgaagctaataaggacattcttgagaatatgaaggatgctctattaaagtatgagaccattgatgctgatcagattgacgatttgatgaatcgtaaagaagttcgtccacctcgtaaggtaggagatgctaaatcttcagatcagaaatcagatgataactcaaaagatgagaaatcaaatgatgtaaagactgaggataagtcaactgacaatcagtctgaaaaagctaagactgagaactctgacaatgcatcagagacaaaaaaagacgataatgacaataattcagagcagtaattagacaggacaacttgtcaaaattaccatcgtctcatgaaggatctcttgacaggagatcctttgcttttaatgtaggttaaatgggcaagctgatttatatcagttttgtacaagtttagtgtgggatattcgatgaaattaagactgccaaatagtaaaagccttgatttgtcttttacaaaagtaatgggaaccattgctttagaagagaatgatacccgttcaattgaagatctagttttacttgcaaatagctatgttaaagctggtgctgagctactggagattggagctaaagctggtgctaacggcatcaacgaaactcgtgtgatctctgtgttgtgcgctgtgatgaacagtgtagatgttcctgtagcactaaactcaaacaactatgaaattgtttcacaggctattaaagcaggtgtttcaattgttattaccacaaacggtctgtccacagagggcatgatcgatcttgtcaaaggatcagaggtagctgtatgccttcactttgatcctaaagaaaaaattgaagatgacagcgatgtggtaagtatcatttctgaatactactttgaaagaatcgatactcttttaaatgcaggtattgaaagaaagagattactcattgacccatcagttgtaaatgcttctgtaagtaacagattaagactgttaggaagacttgagagctttaagagttttgctctgcctatctgtattgctctgcctcgttctttaccaaaagaagacagattcatgaaagataatagagtgcttaccttaactacagctttattctgttcatctgtaagtccagttcaaatcatcagaacagcagatgtaggtgaagttgcaattgcaattggtttttggcagattatggcaagtaagactaagccatttaagttatcaaagactatcgtaagacgtctaagacttctacgtgatgcaattcatgaattaagaaagaacaaagaaaagaattaaaatggagcatctttaaaagtctaatcttttaaaggtaaataacttttagaaaaaaaaagaaaacaaagatgaaaagaaaatattttggtacagacggtgtacgtggccgtgtaggtcaatatcctattactcctgattttgcagtaagactaggtttagctgcaggtaaagttttaggtaagaaacatggcggtaaagttatcattggtaaagatactcgtctgtcaggttatatgctagaagctgccttagagtcaggcttttcagcaggtggtatgtctcctgtaatgttaggccctatgccaactcctgctgtagcttatttaactcgagcattcagagcagacctaggcgttgtaatcagtgcttcacataacccatactatgacaatggtattaagttcttctcagctcatggtaccaagttacctgatgaggttgaacttgagattgagtctgtattagatgctaaggatattcctttagcagcttcatcagactttggtcgtgccttcagacaggatgatgctccaggtcgttacattgagtactgcaagagtacctttgcaagccacttctcattagagggcatgaagattgttttagattgtgctaacggcgctacctatcacatcgctccactggttttcagagagttaggagcaactgttatcaccatcggtgataagcctaatggcattaatatcaatgatggtgtaggttctactcatccagaggctttagttgctaaagtcctttcagaaaaagctgatcttggtattgcttttgatggcgacggtgaccgcgttttaatgtgcgacagtcacggtaacttacgtgacggtgacaaccttctgtatatcattgctaacgatactaaaaagcgtggacgtctgccaggtggtgtagtaggtactttaatgacaaacttaggtcttgagttagctttaaagcgtgaaggtattcctttctctcgtgctaaggttggtgacagatacgttatggagcagttgttagagaagaactggactctaggcggagagaacagcggtcacatcatcagcttaaaccatgcaaccacaggtgatggtatcgtatcagcactacaggtcctaaaggcttgtatgtatgcaggcaagacagttgaagagttatctgaaggtctgaccatgtacccacaggatcttatcaacgtaagattaacagcaggtcttgatgtaactcgtgacgagaaagttcaggctgttgtagctgaagttgaaaaagagttaggctcaaccggtcgtgtgcttttacgcaaatcaggaaccgagcctgtggttcgtgtaatggttgaaggtgagaatgcacaggacgttcatactaaagctcaaagaattgctgatgtgatcatccatcaggcaggctgtgaaaatgcttgaaaaaaagcataataacctgtaatatttgcacagctttgtatacgcaaaataggatgcgtttttattatgtacgaaattggtattgtagttttattactaattgcaattgcaatgattgctttgatccttgttcagcagggtaaaggtgctggcatgggcgcttcatttggtgctggtgcatcaaatacagtattcggttcagtaggatctggtaacttcctgactagatcaacttggactttaattattctgttcttcggtgtttgcttattcttaggttacttacagaagtcagctcacgaagagaagtcaagtttcagcaatatttctgagactcctgcaacagagcaggttgaagagaagactgttgttaacactgatgctcctgtagttgatacagatgcacctgcagtttcagacacaacggatgctcctaagactgacgctccagagactaagtaataaaagtttctactaaaaaaaacccaccgtacggtgggttttttattggcgattttagataaattgattagaagacgtagtgcttggtaggagttatgacttcatgcaaaggcatatcccaatgctcaataggtacagcatctaaaagttggaagtcataagctacacctattaaaagacattgagcagagagcttctttaacattctgtcgtaatagcctccacccatacctaatctgttgcctttattatcaaatccaactaatggcacaatcaaagcttcaaatttatcaggagttaccagattctctggtaaattctcaggctctagaatgtggaatcggttttcaattaacctgtcacctttcttatagtaataaaagtccatatgaccttttacgtgaacatccataaaaggtagagctaattcatggtgttctagaagatactcgttgataggctctgttgataactcaccacctaagcttaaatatgatcccaccattttcttttgcaagaagtgtttgtggtgacttaagatttttacaatctcaacaccagcctcataggctttaataggtgttacctgtcttctttgctctaagatctgctgacgcagcgacttacgtaaaactttgttatcaaaaaaatcagtcattgttagctctttgaagagaagttttcatcttggtgattagttttaatgcttcattttcaaatggagttttgtcgtttagatatccttgcaaggtactctctgagtcaagcgcaattaagatagctgcttgtgtaggagttaaattaggattatctcgcatcatagaggatgctttagtttgtaacgaagctatcgctctttgcaatttttctttttgttcttttgcgcatcttaagttaaagctctcaccaaatagtgcacattgaacaaaatcctgagtgttctgatctgacatatgtatttccttctgctaagtctattgtaaagtcatttacttaattgtccaaaacttaatagaaatgagctgaaaacgtgctaataaaaaatgatttataaaatcataattacttttaaaatcaataaaatattaaatatgtatataaaaaatgaatttacaaataaatgatatatataaaaaatataatatgatataattaaacaaagattacataggagaacaaactgagttcagtttcaaacaagctagattctaaagattgggacaagatcattaaagagataaatgcatcaattgcattaggtgagttctacaaagatgatgaaatgacagatgaagagtacattgaagaggctgctgaattcggttactttcaagaagatgaagattttgatgatgagttctttgattaataaccagactgagaaaaatgaaaagatggttaaagtcagttgaaattaaatttttaagatcaaacaaaaagccctcacctaagtgagggcgggttcggtaatctttcgaaaaccttattgtaacaacgttgaaatcccttacagtgtcacaatgcttaaattgtacataagtagaatgataagatcaatttcttaattaaataattgaaaaaatctgtgataattatcgcaatcacaaatttatataaatagaaaataatttttatatattagaataaaaataatattatattgatagtatataggtgaaaatatgtcttatgtgcttggccttgatttaggtatcgcttccgttggttggtcaattgttgaacctggcaaaagaataattgatctaggtgttagagtatttaaaaaggcagaaactgacaaggaaggtgagcctttaaatcttatcagacgagaaagtaggttaagtagaagacgtttatatcgaagagcacatcgtctcaacagacttcttaattttttgatatcttcagggcttatacattctaaagatgaagtattgaagaatgtgtataacgaaaacccttgggcattgcgtacattaggtttgaactctgtccttacaaataatcagttggcaagagtaatttatcatatatgcaaacaccgaggattttactgggcttcatctgctgatgacggcgaggctgataagggaaaaataaaaaatagcctatcttctaaccaaaagttaatgaaagaaaaatgttacaaaactgttggtcagatgatcttttctgagtatccaaactgtcaaagaaataagtctggtgaatattctaaatcacttccaagaacagacttggacatagaattaagagaaatttttaaggcacagcaatcattttcaaatccaattgtcacaaaagattttatcagtgcaattttgggtagcggagacagaaaaacaggattcctttgggagcaaagaccagcattgcaaggagcagacctcctaaaaatggtaggtcactgccgttttgaaaaagatgaattgagagcaccagcagctaatttttatgcagaacagcttgtttggcttactagaattaataatcttcgagtatatgatgaagacagccaagaacgacctttaacaagagaagaacgtgacttaatcctcaatatgcctttggaaatgaaaagtgatattaaatattcttctttaacttcagcttttgagaaggcaaatttatggaaggctggacaatttaaatacaaatctgtcgattatgaacagaaaacacaaaaaaagaaaaaatcagcagaaccttctgacatcacaaagtcttcaaaaaagaatcctgaggataaagttttttataaaagttctcatcttcataaaattagaaaagcattaggcagtagcctatctgaagaatgggaaaagataagaacagaagttctctcaggcaaatatgaacgttacaacagaatagcctatgtattaacagtttacaaggaagattctgatgtgatagaacaattatcaccttatgaatcaagaacacttatagaagcattgctacctgtaagatttagcggttttgttgcattatccgaaaagtctctaaaaaaaataatcccacacatgtttttagggaaaaggtacgatgaggcttgctctgaagctcattacaagcaaaatcaatctgaaggtaaaaaatcaaaatatttgccccatcttttttcaggaagagaacctaacggaactttaatttttaatgaagaaattggtgacatacctagaaatcctgtagttttaagagtgattaaccaaacaagaaaagttgtaaatgctattgtaaagaaatatggttctcctgaatctgtccatattgagttggctcgtgatttagcaaaatcaagagcagagcgaaatgaaattaaaaaaagaaatgaagaagctgcttcaagacgtattaaggagcgtgaagaatttgaaaaacattatggcgcagaaaaaccaaatggaacaaatttactgaagtacagactatataaagaacaagactgtaagtctatgtattccggcaaagaaatcgaccataaaagattatttgaaaaaggttacgttcaaattgatcacattcttccttattcaagatcatatgatgattctcaatccaataaggtcctcgtattaacaaatgagaatcaggataaggggaatcgaattccatttgaatattttgaaacaaaacaacagggcttttcttggtatgaatttgaacagtgggttaaatcctgcaagaatataaaccaaaagaaaaaaagaaatctgttaagacgcacattatcaaatgatgctaaaaaagatttcttagaaagaaacttaaatgatacccgttatgcttgcaggtttgtgaagaattatattgatagattcctttgcctatctgaaaattctgataactctggatgtgttgtagttgcaggtcagcttacggcttacttaagaaattgttggggattaaacaaagttagagaagaaaatgacagacatcatgcattagatgcaactgttattgcttgttgcactagaaaaattgttcaaaaagttggtgtttggtcgaagtcaagagagatgaattcatataattcttcttatgttgatcctgatttaccagtagatgaagatgaaatgcttcttcaaaaattatatgtaaataaaagaaaacctgatttcccaaaaccttggaattgttttagaaatgaagtagagtcaagggtttttgaaagtgatcttgaaaaactaaaagaagagttgaaacagcaatgttcttatacagaaagtgatctgaaaaatgttagaactctttttgtttctcgtgcatgcgaaaaaattggtaaaggcgcattgcatggtgataccgtttatcgtcaaacttcagaaatgagaaaagaaaatgttgcagtaaaaaaggtttctctaaaaaaactgaaatatgcaaggataggagctatcgtagatgcagttagtaaaaaaacaatatgattctgcaaaagatattttagaacctcttgatttgaaattatagtatgtatgttaaaaataggctctagaaagccttttattattttgttaaaatatagttataggtagtttattagtaagtatgataaattgtggaaatatattagagatataataaagataaatatgaacttagttttgatgaaataaaaaatattttaggctttgaattagatcattcttttttaaagtataaaagggagttagaagactttggatacaaagctgttaaaattaaacttaaagaaaaaagtgttttgattgaaaaggtaagataaaaagatgaatagatgtaaatggtgtaatttagataatcttttatatgttaaatatcatgatgaagaatggggcgtattaaatactggtgatgcttatttatttgaaatgctaattttagaaagttttcaggcaggactttcttgggagtgtgttttaaataaaagagaagattttagaaatgcttatgataattttgatattaataaagtagttaggtatgatgaaaataaagttttggagttattaagtaatgaaaaaattataagaaacaaattaaaaattaaggctagtgttaaaactgctagaatttttaaggatattgtaaaagagtatggaagtttttataattatttgtgcaagtttactcaaggaaatattatagtggagtgtgatagaactactagttatttgtctgatcaaatatctaaagatttaaaaaagagaggaatgagttttgttggctctacaattatatattcttttttgcaggcagtaggagttattaattctcatgagtatggctgttttttacataaaaaataattaattgcattaatagttataaaggtgatataaatgaataaagaattagaaggggtttttgaagaatataatggattaagtgaagaagaggttttaaatttaagggaaaaatatgtttccaatgatgaaagtagacgaagaagaattcgttttaagaccaatgaactgtccacatcatatgatgatttatgcaaacaaaagacattcttataaaaacctgccgatccgtatcggtgagatcgcacatgatttccgttacgaatccagcggaacgttaaagggtatcgagcgaggcagacatttctgccagaacgacgcccatctgttcgtaacaccggagcagatcgagtccgagttctccaaggtagtagacctgatctttgatacctacaaggatttcggtattaccgattacagatgtgtcctgtccctgagagatccggagg

SEQ ID NO: 609 - DNA, 8538 bp, synthetic construct
  misc_feature 1..8538: note = Synthetic
  source 1..8538: mol_type = other DNA
ccaggtcgttttgacagacaggtcgtggtaggtttacctgatgtacgtggtcgtgagcagatcttaaatgttcatgtaaagaaagtacctttaggcaaagatgttgatactgcaactatcgcaagaggtactccaggcttctctggtgccgaattagcaaacttggtaaacgaagctgccttaaacgcagcacgtcataacaagcgtgtagtaagcatgaatgagtttgaagaagctaaagataaactcttaatgggtgctgagcgcagaagcatggctatgaatgagcatgaaaagatcaacactgcttatcatgaggcaggtcatgctatcgtaggtaaactggttccagagcacgatcctgtatacaaggtatctattatccctcgtggcagagctttaggtgtaaccatgtatctgcctgaacaggataaggtatctcaaagccgtatcggtctgttatcaaacatttctactctgttcgctggccgtatcgccgaagagttaatgtttggtactgatgctgtaactacaggtgcttcaaatgatattgaaagagcgactcagattgctcgtagcatggtaacccgttggggcttctcaaagagattggctcctatgcagtatgaaaaggacaatgaaggttctgcatacttaggtggttcatctactactatgatttcaatgtcagatgaaactgctaagatcatcgatgaggaagtaacagaaatcatcaactcatgctataagaaagctcaggacttacttgaagctaataaggacattcttgagaatatgaaggatgctctattaaagtatgagaccattgatgctgatcagattgacgatttgatgaatcgtaaagaagttcgcccacctcgtaaggtaggagatgctaaatcttctgatcagaaatcagatgataactcaaaagatgagaaatcaaatgatgtaaagactgaggataagtcaactgacaatcagtctgaaaaagctaagactgagaactctgacaatgcatcagagacaaaaaaagacgataatgacaataattcagagcagtaattagacaggacaacttgtcaaaattaccatcgtctcatgaaggatctcttgacaggagatcctttgcttttaatgtaggttaaatgggtaagctgatttatatcagttttgtacaagtttagtgtgggatattcgatgaaattaagactgccaaatagtaaaagccttgatttgtcttttacaaaagtaatgggaaccattgctttagaagagaatgatacccgttcaattgaagatctagttttacttgcaaatagctatgttaaagctggtgctgagctactggagattggagctaaagctggtgctaacggcatcaacgaaactcgtgtgatctctgtgttgtgcgctgtgatgaacagtgtagatgttcctgtagcactaaactcaaacaactatgaaattgtttcacaggctgttaaggccggtgtctccatggttattaccaccaatggccttgcaactgagggcatgattgaccttataaaacgctctaatgttgcagtatgccttcactttgatccaaaagaaaaaattgaagatgacagcgatgtggtaagtatcatttctgaatacttctttgaaagaatcgatactcttttaaatgccggtattgaaagaaagagattactcattgacccatcagttgtaaatgcttctgtaagtaacagattaagactgttaggaagacttgagagctttaagagttttgctctgccaatctgtattgctctgcctcgttctttaccaaaagaagacagattcatgaaagataatagagtgcttaccttaactacagctttattctgttcatctgtaagtccagttcaaatcatcagaacagcagatgtaggtgaagttgcaattgcaattggtttttggcagattatggcaagtaagactaagccatttaagttatcaaagactatcgtaagacgtctaagacttctacgtgatgcaattcatgacttaagaaagaacaaagaaaagaattaaaatccaacatctttaaaagtctaatcttttaaaggtaaataacttttagaaaaaaagaaaacaaagatgaaaagaaaatattttggtacagacggtgtacgtggccgtgtaggtcaatatcctattactcctgattttgcagtaagactaggtttagctgcaggtaaagttttaggtaagaaacatggcggtaaagttatcattggtaaagatactcgtctgtcaggttatatgctagaagctgccttagagtcaggcttttcagcaggtggtatgtctcctgtaatgttaggccctatgccaactcctgctgtagcatatttaactcgagcattcagagcagacctaggcgttgtaatcagtgcttcacataacccatactatgacaatggtattaagttcttctcagctcatggtaccaagttacctgatgaggttgaacttgagattgagtctgtattagatgctaaggatattcctttagctgcttcatcagactttggtcgtgccttcagacaggatgatgctccaggtcgttacattgagtactgcaagagtacctttgcaagccacttctcattagagggcatgaagattgttttagattgtgctaacggcgctacctatcacatcgctccactggttttcagagagttaggagcaactgttatcaccatcggtgataagcctaatggcattaatatcaatgatggtgtaggttcgactcatccagagtctttagttgctaaagtcctttcagaaaaagctgatcttggtattgcttttgatggcgacggtgaccgcgttttaatgtgcgacagtcacggaaacttacgtgacggtgacaaccttctgtatatcattgctaacgacactaaaaagcgtggacgtctgccaggtggtgtagtaggtactttaatgacaaacttaggtcttgagttagctttaaagcgtgaaggtattcctttctctcgtgctaaggttggtgatagatacgttatggagcagttgttagagaaaaactggactctaggcggagagaacagcggtcacatcatcagcttaaaccatgcaaccacaggtgatggtatcgtatcagcactacaggtcctaaaggcttgtatgtatgcaggcaagacagttgaagagttatctgaaggcctgaccatgtacccacaggatcttatcaacgtaagattaacagcaggtcttgatgtaactcgtgacgagaaagttcaggctgttgtagctgaagttgaaaaagagttaggctcaactggtcgtgtgcttttacgcaaatcaggaaccgagcctgtggttcgtgtaatggttgaaggtgagaatgcacaggacgttcatactaaagctcaaagaattgctgatgtgatcatccatcaggcaggctgtgaaaatgcttgaaaaaaagcataataacctgtaatatttgcacagctttgtatacgcaaaataggatgcgtttttattatgtacgaaattggtattgtagttttattactaattgcaattgcaatgattgctttgatccttgttcagcagggtaaaggtgctggcatgggcgcttcatttggtgctggtgcatcaaatacagtattcggttcagtaggatctggtaacttcctgactagatcaacttggactttaattattctgttcttcggtgtttgcttattcttaggttacttacagaagtcagctcacgaagagaagtcaagtttcagcaatatttctgagactcctgcaacagagcaggttgaagagaagactgttgttaacactgatgctcctgtagttgatacagatgcacctgcagtttcagacacaacagatgctcctaagactgacgctccagagactaagtaataaaagtttctactaaaaaagacccgccgtacggtgggttttttattggcgattttagataaattgattagaagacgtagtgcttggtaggagttatgacttcatgcaaaggcatatcccaatgctcaataggtacagcatctaaaagttggaagtcataagctacacctattaaaagacattgagcagagagcttctttaacattctgtcgtaatagcctccacccatacctaatctgttgcctttattatcaaatccaactaaaggcacaatcaaagcttcaaatttatcaggagttaccagattctctggtaaattctcaggctctagaatgtggaagcggttttcaattaacctgtcacctttcttataggaataaaagtccatatgaccttttacgtgaacatccataaaaggtagagctaattcatggtgttctagaagatactcgttgataggctctgttgataactcaccgcctaagcttaaatatgatcccaccatctttttttgcaggaagtgtttatggtgacttaagatttttacaatctcaacgccagcctcataggcttttacaggtgttacctgtcttctttgttctaagatctgctgacgcagcgatttacgtaaaactttgttatcaaaaaaatcagtcattgttagctctttgaagagaagttttcatcttggtgattagttttaaagcttcattttcaaatggagttttatcgtttaaaaatcccagtaaggtactctctgagtcaagcgcaattaagatagctgcctgtgtaggagttaaattaggattctctcgcatcatatttgatgctttagtttgcaaagaagctatcgctctttgcaatttttctttttgttcttttgcgcatcttaagttaaagctctcaccaaatagtgcacattgaacaaaatcctgagtgttctggtctgacatatgtatttccttctgctaagtctattgtaaagtcatttacttaattgtccaaaacttaatagaaatgagctgaaaacgtgctaataaaaaatgatttataaaatcataattacttttaaaatcaataaaatattaaatatgtatataaaaaatgaatttacaaataaatgatatatataaaaaatataatatgatataattaaacaaagattacataggagaacaaaatgagttcagtttcaaacaagctagattctaaagattgggacaagatcattaaagagataaatgcatcaattgcatcaggtgagttctacaaagatgatgaaatgacagatgaagagtacattgaagaggctgctgaattcggttactttcaagaagatgaagattttgatgatgagttctttgattaataaccagactgagaaaaatgaaaagatggttaaagtcagctgaaattaaatttttaagatcaaacaaaaagccctcacctaagtgagggcgggttcggtaatctttcgaaaaccttattgtaacaacgttgaaatcccttacagtgtcacaatgcttaaattgtacataagtagaatgataagatcaatttcttaattaaataattgaaaaaatctgtgataattatcgcaatcacaaatttatataaatagaaaataatttttatatattagaataaaaataatattatattgatagtatataggtgaaaatatgtcttatgtgcttggccttgatttaggtatcgcttccgttggttggtcaattgttgaacctggcaaaagaataattgatctaggtgttagagtatttaaaaaggcagaaactgacaaggaaggtgagcctttaaatcttatcagacgagaaagtaggttaagtagaagacgtttatatcgaagagcacatcgtctcaacagacttcttaattttttgatatcttcagggcttatacattctaaagatgaagtattgaagaatgtgtataacgaaaacccttgggcattgcgtacattaggtttgaactctgtccttacaaataatcagttggcaagagtaatttatcatatatgcaaacaccgaggattttactgggcttcatctgctgatgacggcgaggctgataagggaaaaataaaaaatagcctatcttctaaccaaaagttaatgaaagaaaaatgttacaaaactgttggtcagatgatcttttctgagtatccaaactgtcaaagaaataagtctggtgaatattctaaatcacttccaagaacagacttggacatagaattaagagaaatttttaaggcacagcaatcattttcaaatccaattgtcacaaaagattttatcagtgcaattttgggtagcggagacagaaaaacaggattcctttgggagcaaagaccagcattgcaaggagcagacctcctaaaaatggtaggtcactgccgttttgaaaaagatgaattgagagcaccagcagctaatttttatgcagaacagcttgtttggcttactagaattaataatcttcgagtatatgatgaagacagccaagaacgacctttaacaagagaagaacgtgacttaatcctcaatatgcctttggaaatgaaaagtgatattaaatattcttctttaacttcagcttttgagaaggcaaatttatggaaggctggacaatttaaatacaaatctgtcgattatgaacagaaaacacaaaaaaagaaaaaatcagcagaaccttctgacatcacaaagtcttcaaaaaagaatcctgaggataaagttttttataaaagttctcatcttcataaaattagaaaagcattaggcagtagcctatctgaagaatgggaaaagataagaacagaagttctctcaggcaaatatgaacgttacaacagaatagcctatgtattaacagtttacaaggaagattctgatgtgatagaacaattatcaccttatgaatcaagaacacttatagaagcattgctacctgtaagatttagcggttttgttgcattatccgaaaagtctctaaaaaaaataatcccacacatgtttttagggaaaaggtacgatgaggcttgctctgaagctcattacaagcaaaatcaatctgaaggtaaaaaatcaaaatatttgccccatcttttttcaggaagagaacctaacggaactttaatttttaatgaagaaattggtgacatacctagaaatcctgtagttttaagagtgattaaccaaacaagaaaagttgtaaatgctattgtaaagaaatatggttctcctgaatctgtccatattgagttggctcgtgatttagcaaaatcaagagcagagcgaaatgaaattaaaaaaagaaatgaagaagctgcttcaagacgtattaaggagcgtgaagaatttgaaaaacattatggcgcagaaaaaccaaatggaacaaatttactgaagtacagactatataaagaacaagactgtaagtctatgtattccggcaaagaaatcgaccataaaagattatttgaaaaaggttacgttcaaattgatcacattcttccttattcaagatcatatgatgattctcaatccaataaggtcctcgtattaacaaatgagaatcaggaataaggggaatcgaattcatttgaatattttgaaacaaaacaacagggcttttcttggtatgaatttgaacagtgggttaaatcctgcaagaatataaaccaaaagaaaaaaagaaatctgttaagacgcacattatcaaatgatgctaaaaaagatttcttagaaagaaacttaaatgatacccgttatgcttgcaggtttgtgaagaattatattgatagattcctttgcctatctgaaaattctgataactctggatgtgttgtagttgcaggtcagcttacggcttacttaagaaattgttggggattaaacaaagttagagaagaaaatgacagacatcatgcattagatgcaactgttattgcttgttgcactagaaaaattgttcaaaaagttggtgtttggtcgaagtcaagagagatgaattcatataattcttcttatgttgatcctgatttaccagtagatgaagatgaaatgcttcttcaaaaattatatgtaaataaaagaaaacctgatttcccaaaaccttggaattgttttagaaatgaagtagagtcaagggtttttgaaagtgatcttgaaaaactaaaagaagagttgaaacagcaatgttcttatacagaaagtgatctgaaaaatgttagaactctttttgtttctcgtgcatgcgaaaaaattggtaaaggcgcattgcatggtgataccgtttatcgtcaaacttcagaaatgagaaaagaaaatgttgcagtaaaaaaggtttctctaaaaaaactgaaatatgcaaggataggagctatcgtagatgcagatactcgtaataaaaatctatgtgatgccttgaaaaaaagatatgaagagtacagtagtatcacaggtaaggatgtaagtaagattgataaaaaagacctttcaaagatcttttcagatgataaaccgatgcatatgcctaacagtgaaggtcaagaagatccatgtaatccgatagtta

SEQ ID NO: 610 - DNA, 13832 bp, synthetic construct
  misc_feature 1..13832: note = Synthetic
  source 1..13832: mol_type = other DNA
cccactaccgccagccaaaataatacctttacgagaattagaattattagttttgctcaattgatttactagtaaattaaacttctggaattaatatattaccactttccatataagactttatgccccctaagtctcttatgcttggaggtttcttctattccgtcaggtaaaacaacttactaatacctagatgttttgcgtattcgtttgctaaagcttgctcaaatccttgaactttagatttattgtttccatatgtatactgagaaccaattaactggcatgaaatctcctgagaaaaaaccgcagggatttggcaaataaacaaagactttgagatagcagaaagcagaatcgaaaaactttttgtattatacttcttaattatttctttagttttaacttaaatatgtctaataattcaatttggggttttgatttaggtaaaaagtctattggggcttgttcgcggaatggtgaaaatattgaatttttgcaatcttatacttttgatttggaatatgctgacccaaaagaatggagaccctctcgcaaaaccgccaaaagaacaaggtgttcacataagaagagagaagaaaatttaaataaattctggacagaattaggttggaaaattccaaatattcaaaatcaaactttattgattggtttaaatgccaggttacagattttgcataataatattgtttcaactgatcaattgtatttagccttgtattcggttattcaacatcgtggttatgatgataatttgccttggttaagaaaaaaaacgaaaaagaaaaatcaagaaatactcgaacaagaagaaacaaaacaaaacgaaaataaaatcgagaaaaaagaattaacagaagctgaaaaagacgaactagagaataaaaagaaattacaaacttttgaaaaattattttcagatttaaatttaaacttgcatgaaaattatatttctgaatttgaagctttaaaacttggtatttgggaggggcaaaataaaaaagtattaattccggataaatttgtaagtaaaattcgtggcttagtcgtttatccccgccaaatgataattaaagaagctcaaacaattttagaaaaagcctctcttaaatttacagaactgaaagataaaataaattatattctgtggggaaactctctggaagcttacaaaaacaaacctcatcatttagagggaatattggggcaaaaaataccaagatttaataatcgaataatgtcaagatgccgcttatttgaacgttttaatacttgtcaagccaaagacaaattagccattgaaacaaaacttttattaattctgaaaaatttgcgttatcaaaaaaatataaatgaagagccactgctattgaactttgatgaatttacaatactttttgaaaaatgccggaaaaaattagaaaataaatctgaaaataatcaaaaaattacaattactgaactttatgaaattttagttaatgaaaaaatttggtttgaaagacctcttggtaagcaagaaaagagtaaagaaaaactaaaagcattatttaatttggctcgcattgataaagatggcgacctgaaaattaaaaccgaaggcagattttctttgtgcagaaccgcttgtagattactaaaagattatttgcttggtggtttaaataaaactgaatttgtcgaaaaccgcttaaataatgaaaactggaagaaaaactttgatacaaacttaaccgaaagcgaaataattaatgccataaatcgttttgggaatagttgggaaagctttagtattagtgatgaaagagaagaattattaaacttaggaaccaagcaagaaagacatcaatttattgaaaaacttttaggcaaaattaataattatgtggttaaaaaccgtttgcaaattttttataatttaattcgctttatggaaaataagcttggagagccaaaagaagttttaattgaatttgttaaaaatgctgattcttcatttttgcctcaaaaagacgctaaaagctgggaaaaatttagaaatgaaaatcaaaaagaaaataatattgctctcaaacatttaagagaggctggaattccaaaacctagttttaaagatattgtggcttataaattattgaaagaacaacatgaaaaatgtttgtattcgggtgaaggaattgaaattgctgattggaaagatggacatttggaaattgatcatataattcctcgtagttttagtcattgtgatgctttttataatttggttttagttaaaaaaagttgtaattctgataaaggaaataaaactccttttgaatacctgaatttctcttctagtggaggaaaattaagctgggaagaatatcgaaatttaattagtaataataaaaaaattaaaaacaaaaaacgcaaattactactttctcaaaacaaagaaggtttaagtttaattgaaaattggaatggtctagcagaaaccgctcatattgctaaaatttgccagaaaatcctttgtatttattttagttggggaatgcaagttaaagatcaagaccgaaaagtttttactactagcggctctcaaacggcacaattacgtaattggtattctcttaatgaatttttgcacgaagaaaaaaccgaaaaacctgaagctgaaaaggaagcagaaagcaaaaccgaagaaaatactgaaaataagaaaaaaacaaatacaaaaaatcgtggaaatgataaacatcacgctttagacgctttctgcttgactttagctagattaaaaaatatacaatttgaagatgagaggggtttattccgtgaaaaatcttataaagatggttttccaattgactcaaccagaaagctaatcaagcaatatttagataatttaattcctttaacgctcaaaaccaataaagccaaacaattccccgaagaaacaatttattctgccagattatcaaaaaataataaaaaacccgaaattccattctatgacattgtagtaaagaaaaatcttaaagaatttttattaggacaaatcaaagaagagacagaaaataataagaagagaaaacaagacgaagaccaagaacaggaagaagaaaataaaacaaaattgcccaaaatttcagaagctgaattaaaaaaacgaattgaaaaaatttatcatcaagacataaaaattattttgtacgaggaattaagacaaaacggactggaagcttttattcaaaaagtattaaatcaagaaattatacataatcgctttaaatcaccaattaaaaaggttttgactgtaacttctaaagaaaatactttaaaaatcagaaccgacaataataataaaaaacgaattactttgggagaatttgccgattattccaaagagccagaaatactagaagtagaaaataaaaaacctaaaaatattcaattatttaaaacaaaagctcataaaggacaactggtttatttagaacccaagaaaaatgaacttgtggcaagaatcagaccaatttatggctttgaaagtttgaatgagatcaaagaagaattgcaagcaaaaggctatgaactttattctgatcgaatttttaatactggctgttatttaaaaatagaaaatgactttgcggttggggataaaaaatttaaagctggcatttataaactaagaactatgacaacttcaggaacagttaaattagaaaatttaaatgggactgaattagaaacaacaataaatactttagtgaaagctggttttaaaagattagaactttgcggttttgaattgaaagtttaataaaaatgtctcatcatgttttaaccatcaatacagcgggtgtctttctgagagtgtctcgtggatttattgtttgtcaagaaaaaaataatttagacaaaaaaatcccaattagcgacgtaaaaacagtaataatttctactccgcaagttagcttttctaatcagtgtattagccgtatgttagaaaataatattgtgattttacactgtgccgaaaattatcagccaattggctggacagtggggctagaaaaagttgttagaagagaggctttttttaatcaaattcaggcaaccggagagttttcggataaattgtggaatcaaattgctttctgtaaaattcataatcaacttgatttattaaatgatttgggctttgaattaaatatacaattatcaaataatgcggatattgaagaggcaagagtagccagatattattgggaaagatattttggaactattagccgtgttttgaaccgtgaaagaaagaatgcctcaaagtttgaaaataaggctctcaactatggttatgcagttattaaaaccttgatttaccgaacgattttaattcatggtttattaccagctttggggattaaacataaaagccgttttcacgctcatcctttagtttatgacttaattgaaccttttagagcttttgtagatttgctgctggcacattatattattcaaaataaaaaacaaattgataatttaattgccactgaattaatagatgaggacgaagtaatttttgcggattggataaaatttttcatgagtggactagttgaatataagctgaaagacaataatttaaattataaaatactagattttgtggatatgtttgttttgagtattatgaaagcttatgaaaatttagattcaaactctctgaggctgcctattttaaaaacttatagcaaaagttaaaaaatcagaaccaaagtttagaggtttttacttattaaaattttgggtaattataaaatattatgtcatgggcttacacattgggacaaatatttgtcatgttcgacttgccaaccctcgaaaagcacgaaataaaggcagcgaacgattttagaaaaaccttactagacttcggcttctttatgatgcaagaaagcgtttatgtaagaaattgcgttactatcgataaatcagattattggctgaaaaaagtaagaaataattctccaactacgggcggaaatgtcgttgcgttttttattacggccaaacaatggaataaagccgaaataattagctgtgttgaaactcatcataagtatcgtaaaaaagctggtgaagcctttccagagcaaattacattttggtaaaaaactttagccttaattaaaaggtatgaacaaagcaaggtgtgacccgacggtaacccattgaagggctagagcgatcaaaaggtacaccttaatcagttatgatcaagccctgatttattgaatgagaatatttataataacattaaagggatttcttgaaaacgtattgctattgtaacacgctcaataaatcagggggatcaaaacgcccctatcttgcttggagtaacagccgttattgtaacacgctcaataaatcagggggatcaaaacactaggcagcactggccataaaaattttgaattgtaacacgctcaataaatcagggggatcaaaacagcataattaattactgataagagctttcaattgtaacacgctcaataaatcagggggatcaaaacacggaaaaaagacggtacaatctttctctcattgtaacacgctcaataaatcagggggatcaaaactaattagcttgatagtagaacatattaaaaattgtaatttattaattattttttcttaaaagcatttaatattttggccttaaaactttgaggttgattcagctgatttaaattggccggattactaagaatttgttgttgcatacggctttgcaagacttctctttcttttaataattcattttcttttttcatttgctttaatctttgtttttccacccgggctttttttctttcttctctttttagcttttggtcggtaaaagtcggtaatttattatcattttctggtttttgccaaaatttccaatctcttttctgtatattattatttggcggattataagtttgagccggttgttgtaggggttgttgctgataatcgtaattttgcgtcggctgtgatggctgcgagtacgtatatggttgtggagaatttgtaggtggtgattgataaacttgattattatatgaattataggaatctgccaaaacagtttggtgggatagcaaaatcaaaaacaagcttaataaaattttagatataaacatcagcttttcaaattctttagttagctttcattataatcaaaataaataataattttaaagttttaattttctaaagttgtctttatagctgccgaaactaattcctttttttgatcgccattaattttttttaaaagctttttttcttgataaaaattaattaaaggtaaagtttcttgattgtaagtttgtaatctcgaagccactaattcttgcttgtcatcatctctttgataaagtattgagccacataagtcacaaatattatcttttttaggcaccgaaaattctaaatgataaacagcattacaatctttatttgtgcagattcggcgtccagttattctttttaataatttactttgatccatttccaaacataaaacaaaatctaaagataaatcattgctttttaaaatttcctctaatccatcagcttgcactaaattacgtggaaaaccatccagtaaaaaatcttgctttttattttgtatttgcttcagctcattaataatcaaagccaaaactaagttatcaggtattaatttgccctctgccacaaataattttgcttcttgacccaattcattattttctttaatagcttgtctaatcagcgtcccagtatctatgcgagccaaattaaatttattagctaaataaagagcttgtgttcctttcccagcacccggtggcccaattaataaagtatttttagacatatttatttaataatttatgaacttaataatgatctgactttgtattggtggccttgtaaataagcgatcatttgattattaagatctagagctacaccaaccataataattaaagaagtgcctccaattgaacctaaagtggttacttgacaaaacttttcaacgtgaattggcaaaatggtaattaaagctatacaagtcgctccgataaatataatacgacttaaaactttattaatatattctgccgtcggcttgcctggttttacaccttgaattgcattgccacccttttgtaagttttcagcaatttcacgcggattaagctgtatggaagagtaaaagaaagcaaataaaacgattaaactaaaatataaaaccgaatgttccaatgaataataatcaaataaacggtcaaagaaagctccgcaaaaattaaaaaagttttttagccaagttatgtctaataaaggtttgactaaaggtttaaaaaacttaccttccataaatattttttggaaactagctgacattcccaggtctggtcggccagtgaaaaaacttaaaatttgaaggggtacatataaagtggcactcgcaaaaataattggcataacacccgacggattaattttgaaaggtaaaaaatgagaattggccgaacctctagcttgaccagtgacacttttagcattgacaattaaaagcttacgaataccatcttgcacataaataatggccaaaattgataataagaaaaaagctaaaagcgtaataattccccagaccggagtaatacccgttttaaccgcttcactagtctgagcaatcattttgggtaatctggctgcaattcctgcaaatattaacaaggaagctccattcccaatcccaaactcagaaatcaattccccaatccacataacaaaaacacaacccgtcgttaaactaataactgatttaaggaagaacataagtggcaaatctgtcactaagcccgaactaactaaccattttgttaaagcaaaagattgaacaatagccactaaaacggataaacgtctaatccactgctgatattcccgacgacccgattctcccctttcttgctgcaaggcctttaactgaggaaaaacttcacttaataattgcatcataattgatgaagtgatataaggcccaattcctaaggcaaaaatcgataaactgcttaaagctccacccgcaaataaatcgactaagcctaatacattactatttaaaaaactagaacctttttccataaaggcctgatggtcgatcccagacaaaggaatttgcactccgaaacggtaaaatgctaataaagcaatcgtaagtaaaatacgtttcaataaacctgtttcaattaaaacttcccaggaaggaaattgaaaaccaatattctgggctttttgattactgcgagataaaggactggacacgataaaaattagagtttagtgaataataaaagatttaactagcagttttttccataactttttcaacaattttctcaattgatccgccggctttttcaattttctctctagcaccttccgaaaaagcatgagcctttattttaaaagctttgtttaattctccattacctaaaactttgagtccagatttttgcattcttttaactattttattttcagccaaaaattcaagattgatttcgctaccagcaggtaaatccaacgattcaagcaaatcaaggtttataattgtataaattttacgattaggcaaagaaatatattgacgcttcggcaatctacggaataaaggagtttgtccaccttcaaattgtttacgaattccaccacccgctctggattgttgtccattatgacctctaccagctgttttaccaccataaccagctcttccacgggcttctcttttctttttatgccttgaaccttcagccggttttaaatctgttaaatccattatattttcccttttaaattatgcctttatattttaagcagcttgagactgcacttctgttggtagaactggcggttgattatgattatttcctcttagttgtcgaatttgagttttggtcttcaaatttgcaactgcatctttcaatgccccaagcacattaattggattagttgatccaacaattttacaaacaacattatgcaaacctgctgcttccatagccattttcaaagaccagcaagcaattaaaccagtacctttgggtgccctaaataagtacaattttgttgaaccgaaatgtccaattacttggtgaggaatagaaccttggtcaaaaggaattctaattaaatttttcttagcactttcaatcgattttctgatagcatcaaccacttcagctgctttgcccaaaccaactccaatatttccttttaaatcacccacaacaaccaaagccgaaaagctcatattttttccgccctttacaaccttggttacacggcgaacctgcacaactttttcttgccattcattgtctttttcattcttttgagagttgccaaaagaattatctctttgtcttctagggtttttatcatcggaaggcttattaggatcattattatttcctccgccgcctcttatatttctgttattaccgccagctccagtaccaccgcctggtttgttaaaagttttggcacctttttgaaaagtcattttttctcctaaataattaaaaatctaaaccgtgttcacgtgcagcctcagccaaagccttaattcgtccatgatacaaatatccaccacggtcaaaaactacttgctttatctcttttgcaatcgcttttttagcaattgattctccaaccgaagaagcagcttcgcaattaccaccatgttttaagctcgttcctttttccaaagaagaagcaaaagctaaggtttctccactttcatcattaatgatttgagcataaatatgcttaccactacgatgtactgccagtctgggtctttctgcttgacctttgacttttttgcgaactcggcgatgagctctatttaaaatttcttttttagttaaatggggcattattttttaccagttttacctgcttttagcttaacgacttgaccaagattgcgaatacctttacctttgtaaggctctactttccttaaactttttatataagctgcaaattggcctaatttgtctttgtaaatgctccgcagaacaatagtagtctgatctggacattctactttaatataatcgggagcctcaacatctactgggtggctatagcccaaagcaaagactaattttttgccttgtaattgaactttataaccaacaccaaccaaaaccaaagttatactaaattctttcgttacaccaattacggcatttctaattaaagctccgtaaaggccataaagtgccgcggatttactttttttatcttcgttggttggttttaactgtaaattattatcttcaatagatatttgaaatccagcacctattggcagagtaatttgacctttaggccctttgacagccactatatttccttcttgcttgacatcaactcctgagtcgagagaaatacttctttttcctattcttgacatatttttttacctaattaccaaaccgtacatactacttcgccgcctactttctcagtaaaagcatctctttgagacataacgcctttactggttgaaattatagataagctatgttgtgggcagccaccaattctttctgtaaagccaatatatttggggcagctactacgactttgtcttttaatgcctaaaattgaagattcgccattgacatattttaatttaacaataatttctttggaaaaatcattaatagtttcgactgaatagctaattaaaaaaccgctacgtacaagaacttttaaaatttcttctttgaatttggaataaggtatactgacaaaacgcttctttaccattaaagcatttctaattctagtcagcatatcagcaactgggtctgagtgattcactttatatttctcgtgatgagtaaggggacagggacataatttttaccaacttgattttttaacaccaggaatttgaccatcgtgagccatttcccggaaacaaatacgacaaattccaaagtctctgataaaacctctgggtctgccacatcgccagcaacggttgcgtaatttaatagcggacaattggcctttagcaaccaacttctgctttttcttttctctttctataacggattttttagccatattttaagaatgcaataaaaataataaagagtaaatgattatataccagccaagcaaaaaataccaatacgctttttaaattttgtttaaatcaattagaaattcagacaaaaaccttagaaatgatttttgatgatgaaaatattttaagacctattaattattatagattaggcagctattggcttttttttagggggagagatcatccaacacataaattcagacaaaatgctcaatgcaaactgggcttatcaattagccaagaaatttcgtttagacaatcttcagaaaatattgataaattgataattgaaatagataattaagcaaataaatatgaaaataggcgtcccgaaagagatattagactcagaatttagagtcggtttaattcccaattcggcattatctttagttaaaaaaggccatcaagtttttattgaaagtgaagctggcttaggaagtggttactcaaaccaagaatatgaaaaatcaggagccaaaattattgaaaaagccagtcatttatttgagcaatccgatttaattgttaaagttaaacaacccttagaggaggatttacagtttttaacaaaaaggcatattttattcacttatttgcatttggctgccaataaggccttagcaagcaaattatgtgagctaggcctttccgcttatgcctatgaaaccattgaattaccaaataaaattttacctttacttctcccgatgagtgaaatagctggcagaatgtcaattcaaattggggcaaacttattagagaaagctcagggaggaaaaggtattttattaagcggtgcaccaggggttcctaggggcaaaatagtaatattaggtggtggcatagccggaactcaagcagccagacaggcaatgggaatgggagctgaggtaattctttttgaaaaaaatcctttaagaattagagaattagacgaaaaatttggtaagtctgccttaatactttattcagaagaaaatttaattgatgaagctgtccagaaagctgatttggtagttggagccgttttaatacccggaagaaagccgcccattttagttaccgaagaaagcgtcaaaaaaatgcaagctggttcagttttaattgatattgctatcgatcaaggtggctgcatcgagaccataaaaccaaccaagcattcagagccaacctttataaaacacggaatattacattatggagtaacaaatatgccgggagcggtacccagaacttctacgcaagctttaaataatgctactttaaaatatatacttgaattagcaagcaccggagctgaaaatcagaatttatacgggggacttaatatacaaaatggtgatatcgtgcatcctgaagtcagagaagctttaattgaagcctaaaagtttgaaaaaccaaatggacaatttacagagattaacctgatttcacagatattttatttatagttttgccgttctctgaatcaggattttcaggattaaaagataaacaggattcacgcttgaaaagttaaataatttaaaaaatacaccaatttgaatatttgggtaattgattatgaactaaagcaaagtacaaatcttttaatttggttgtaattgatccaacttctccgttaccaattttataataatctaccgaagtaattgggctaatttgcgctccagttccacagaaaaacatttcatccgcaatatataattcagttcggtcaattgttctttcttcggtttcaaggcctaattcttctttggctaattgaataattgtgcttcgggtaatgccttctaggatattatcggttacggggctagtaattaatttgccattgcgtaccaaaatcaaattcatggcacttccctcagcgacatgccctctttcatccaaaacaatagcatccgcaaaattacttaaaagtgcatccgttttagccaaggctgtgtttacataactacccgcaattttagctctggccggaatagcattatcttctactcttctccagctagataccgttaccgaaatgcctttagttgtatcaatataatcacccattggaagagcaaaaaggcaaaattcatctttattatttaaaagagctggtccaatccgcaaatccgctttgtaagcaattggcctaatataagcatcttcttttggttcatttaacttaattaattctttggttaattcaactaattcttcggctgaatgcttgatttcgatacgcagaattttggcactttgtttcaatctttgataatgctctaaaggccgaaaaatataagacttgctttctttcgcattccagtaagctctaattccttcaaaaactgaggttccatataaaaaagcatgtgtgcaaatactaattttggctttttcggcacttacaaattttccttcaaaataaacatttggaaataagctcacggacaattaccttgctaaacaaaattttttaatagcttaacatcgttcttaatctttttttaccttttttcgctttaactcttaaaaattaaaaaattatcaaagagagctaagtttcaaaataataaaattacaactt

SEQ ID NO: 611 - DNA, 24524 bp, synthetic construct
  source 1..24524: mol_type = other DNA
  misc_feature 1..24524: note = Synthetic
gtaaaggattagaaattctttctaccaacaatgctgagtttcctcttattatgctcgattttacatcaggcgataccgaattgtgtgctctttacttgctttctgcatcttgggaacgtgtaactacaccacaaataagcgaagtttacaaactattaatagcaaatggattccttgatagaggaacaaataccgatacacactgttggcaaatgtataatccaacatctaaaactcttgctacttgtggacttatgattgtgcaaggctgtggatattgctatgtaagtctttcgtatttggcagacgatcctaatccaactgcaataaaaaacacgctacttgaacaaccaaaaataagttggaattttgcaaatggtgtgctaaatatacaggcagaacaatatgttggcgagccactttccatctattctatatctggtaagtgcctacaaaaaacaacaatacagcctggtaacaatataatttcctccttaacacatcaacctttctttattcgtgtaggcaataatgcagctattaaagtgttgccttaaccattttggcattgtgtgtgtggtaaaaaatagtttcaaccattctgtggcaatatagttttatgggtccgtatatacaatgaattggcttttgtaatgctaatataagttagaaataatgagttaaacacattagaaaagccaattcgttgttcttaatttctacgataagatacatagaacttagaataaagtgcagaaatataataaaaatagcgaatgttgcgttgtatacaatgaatctaacaattacgaaatagagaaatagtggtatgataaacagccataatgcaatatttagcgtgtatattccgctgcttatgacggtgattttaagtggtatgacttatttccattggcagtataaactaaagtatttatacttgtcgggcatattctttttattggtatatgccattctttctatgatactccttagttatacagtagacgaaaagtcgttttctgcaattgtaaacaatctatcgcctatgcaatttcccgttagtattcttagtattacactattttttgtatcagttggattctttgttgcacaagaaaacagcttcagtttattttttaaaatagtttcgagcattggcatattgctttttatgctgttcggattctattcgtttttctttattatggctggtcttgcatcgctaaaaagtggataagcatttgtttgtcttacctttataatggtgcaaaatatggtttgtgcaaacaataaaagtaagatatatttctacaaaactatgtaaaactgtctttttataaacgtttttctgtaactttgcagctattatgagtaaaggaaagttacagaaatttgcagagttagaaacatttaagaatgtctttcaatatccacatagtgttataagcgaaataccattcgaaatgaaaggacattggactgaacagtattttcataataacaacccaatagttttagagttaggttgtggaaaaggagaatatactgtgggcttggcgcgactttatccgaatataaattttataggagtagacataaaaggtgcacgaatttatacaggagcaaagcaagcgttagaagaaaatttgcctaatgtagccttcttacgaacaggaatagagattatagatcgtttctttggtgctgaagaagtaaaagaaatatggctaactttctctgatccacagatgaagaatgcacgaaaacgcctatcgtctacttattttttaaaacgctatcgtaactttttggaaaacgaaggagtagtgcatcttaaaaccgactctaactttctttttacttataccacttatgttgttgaaaaaaacaatttgcctttgctttttcgtaccgaagatttgtatggcaatgaaacaaatggtgcacaagcggacgatattgatggagaaacaaaagaaatacttggaatacacacttattacgaaaatcaatggatagaacgtggactaaacattaagtatatgaagtttagattgccacataaaggtgctcttgttgaaccagaaatagaaatagaacttgatgactaccgttcgtttaaacgcacaaaaagaagcgaaaaagaaacagcacgatagtattcggttgcaataaatggtgtgatataacggaaataaatagtttttaatttcactgttacgcagtttcgtccttttatagaaccatatttaatatgcttgtttccaccagttttcattgtgaggcttagtagaaagagtgaaaaatgctttgaaaaagaaggtaatagcaaaagaaagccatgcaaatagatagattcaaatatttcacttttacatatctcgatacatctttagagcaaataaagaagtatattctggaaaagtggggaagtaatgataagtacagaataatagattctccatttcagtttaatctctaccacttatgtccacctacaggcggtgcacattttgcaaagctgtatttttttaccccgaagttgtgtaaaaacaaatgtataatgttctcaaactattctgatggtttaagatcgttgattcatgtacttacaaacgacttaaaattaaaagcatatagttttagaataagcgcaaacaatattcccgaagcattaaatgaatttagctgtatagaaaatggagaaacgttacgaactgtttatgcgatgaaagatcctaaatggaaattttattgtgaaggagaaatacaaccttttgaggaaaaagagttttatgaaagaaaaataataaaacaacgattaaataaagaaattcttatttcctattgtgttaaattaggaattgacatacgtgaagactctttttggaaaagccaacaatctttattcgtagaacgaatttcgtggtagtaattttataatccgcagaaagggtttaactatcatacgttctttaaatactgccattttattattgttcctatatagtctactttacgctttcacagccgtaataatgttccaactaaattgtaattataaaacaaaaatttataattataatttttctattttataattatatttctcccattttttattatatttgcactggtgataaacagcaccttttgcaaatgtatttgtttgcagaacaaagcgaaacaataaagaaattatcagtttggagaaaaaaggaaaaaataaatatggcaatgtttacgagataaagttgcctaacggaaaatatacttatatttgttggataaaacaattcagctttggagtattcaattaccattcagaaaaaccagtagacaacttagatagtcttttatctgttggttttaaaatatacatatcgggcaaagaaaccgcaattagaaaaaaaatatggcagctaattgggcatatcgatttggaaaaagaaaatatagaatttcccgatttggcaatatttatgtcaaatgacaaagaacattttatagagcaatcgagaataatgagaaatggaaattcttattatgctcccacagattactatattagtcttttaaaaaaaggatatattgcaggtttctttgataaaccaaatatttttgaattatggcttacaaagaatttagataattatcctgccaatgaagaaatttttcctttaccagaaaaatatagttagaaaaaaatactcgccatttttccctattactgtgaaactataatagggagaaatggcagtttttgctttaatccgaacttattctctgttgtatatattctcacgcgaagttacttctccagtttctgcatctataacaatatattctgaaccaaaaatagttttacgatgtataaaccatttggcattttggttattacgagacataaagttaatgtggaaaggaccatcagaaacacttgtttgttgtccttttcctgttgttaaatctatccaaccttctttttctaaccaaagaagcaactctttgggttttatttttaggttttcaaatttctggtcttcgtctttttcttttatcagtttaccctttttatcgtactcatgccaaataccaattctaatatttgagcaataaaaccaatcaccttcggtgtctaaaaagccatttttataatacattttggcgtttttcttaaaggttaatggctttatcgtaacaatccaattaacgtctttttcaaaactaacacaaacaatggttccatcttcctctgtatattctttataacttgtattcggagaaagtttacttttataatatttgtaattaaacttctctggttttttcatattgtttaaattttgtgcagtacacggaaatatgaatgttataactaaaaaaagaataatgtatcttttcatcttatttgttaaatttaaacggctataaaatatgttttcttttaataatctatcgcaacaaagataggaattgttttgcagaaaatgggaaaaaatactatttttgtgctcgcttaacaaacattatgcgtatgaacattaaacgtaattctatgattttgcctcgcttatattagttttactaactgtaggttgtaacgatagtaaggctataacacccgaagtttacagttttgcagaggtttataaatggttagcaatgaatagcgaaatgaaaacaatttcgatgttgatgaaatagagcgttgaaacaaacgataatgcagtttgcttaaactaaaatattgaacgaaaatagaaaataaacttatataaaaccatatttatgttgtcggagaaagtaaaaaactacttgattgaaaatggaatgtacgatgatacagaagacgaaacctatcaaaaagtaatgtcagacttagggattaaccttgaaactccctttgctcagtttaatctttatacaaatcaaacaacattttctggcaatcgtgcagagttatataacgtttgttggtttgcaataaactcaatttattacgaacaaatggagagtatgaggtctgttttcaacttgccagaagagtatattccactcgatagttttgaaggagagggaggatttttctataataggcaaacaggcgaagtattagaacttacacttggaaaggtttacaacgactttcagcagggaaaattaaagccacaatggcacaatttcaacacttttcttgaatggtttttcgacctatcataactttttgtgaaagaaatgtgtggaaaatagttacttttgctttcaactaaccaaggaagcaattttcagaatgtttggaatgtcataatcattattgtattatacatctcttttatacaacacatttaacagataatacaaaatttaaatacacttaatttcactatccgtaaacctaaccttgttttgtttcttagagtttctactatatctctaaaattgctattttcctaacgtttagtttcttaaattttagcaatacaatttaacttctgcattatacatatacatccatttaataatccttcactatatagtggcaatgaggatagttgctacaaccccaaaaattcctatatctaccttgacaaagaacgagtttacctccacaacgtgggcaaataccattgttaattatcgagttgtactgactaatcctgttttttacttggattatatgttcttttgcggtatcacttgtctcaaaacttgaatatgccaacctattgatagcccattttaatttgtcatctggtaataaaacactaatatgatattttataatagtgtccagtaattcattttcatacactacattatgattgggatagtcccctttgatagttacatcgccaataaagacgactattggaataaaatattggtaaggaaagcctaatagagattctaaagctttgacgtgtccataattctgaaacaaaggattataaaactcatatttattaccatatatgtttttagtccaaaaacttgctcgttcatctccatatatccaccctttatattgcttagtctcaataacaaagatgccatatggcgaaaatactacatgatctatttgggtacttttcccattttcttcgatatatacatcattaaagatagtatattcatcaggcaaagaattaagaatagtagcaacacgtttttcaccatacctcccttttctcttattccggctaaaatgtatcaatagaattactacgactattattgctaatatagtaacctccataactccttacctaattttactaaattgttttaaactcttactaacgattatctattactatacgttatttaaccttagaatccaactgaattcccatatcctccatacaattcagaagaatggtactgatgtaatttcctttattcctactaatacaagcagttgcaaaggtcattggtgctacatatgtctcacctatataagattcatcagtaagaacaggcatactgtaataggcatttttcttattttttaagtcaataaaccatttgccgccaatatgttttcggaaagtttctcctatataaatggttagatagtctaacaattcttttttcgctattaactcgttatagtgtttgaaattagaaagaatccatttttctaaatcatctaacgacttaatactataattgagtgtcagattgtgctcttttgcaaattcgccagtaaaatattccatcttatcagagatgaagaatatccattcttgaaagttctcttgtgtatatgccatttttatgttgttaaactatagtaagtagctgcaaatatagttatttttatttgaaatcttatatagcctaagtgtaaattataatgttgtttgaaaaacataattataaaaccataaaaacataattataaattttaaatttgtaattatatttttgaaagaatttaattatcttttttattatcataaaatatgtttcttgttttgcttttatttctttatgctttatgcataactacttaaaagatagataatccagcaacgtgcaatataaaactgattttataaaaataagatgatgatatttcagccaaactaactatatttgcagttgtaaacttttggttttacaatgtacaagcaaggtgaatataaataataaaaataagaatgaatctatttacagatagtaagttagtttatgaaggtagaaaatctcaactttctgcattggatattaggcagttattggagattactggtgataaaataaatagctttattcaattttatcaaacttacgatggtgtcttttttccaaagcaagctatgatgtttagacacttattttattctgttgaaaaagctgattgggataaaatagaaataggtttctttttaaaaatcgaagatataattactaatagaaagattctattggaagaagataaggagttagaatgttttgtaaaaactcatattccttttgctgatgatggctgcggtaatgatgtttggatagaaatttcaacaggaataattaaggctttttaccatgagtattccattgaagaaggattaatagaaatagctcctaattttaatgatttttgttcttcgttagagaattggacacttaaataaatcttgctatttaatgaaataaaacgctatttacatttgcaaataacaactacttttttggggggcattcttacacgtcattaataaaatatttatggactatataacaaaattaaaacaaaatgaagagtttgaatattggttaggggctgataacgaacaaatttttaatgttgaaaacgaactaaatattaaacttcccaagcaatacaaaatgtttttatctcaatgtggaatgtgcaattttggagatgtaaatatattgggtatagcaaaagatgaaaatagtgttagttattcggttgtggaagttacgaagcaaatgagaaatgaactaaatctttcaaacaattttattgtacttaattacgaagtgggcgaatatcttactttatacaaggtttctgaaaaagaagaattagacgatagcactatttatggagtaaacgttgcatataatgatacagaaaaaatgattcttggaaaaccagaaaagcttttttcgtcgttcgaagattattttgaagactttatcgaattaggttcttaaaattaagccattctaatcaaggcagttttttcctattctctttattggtaataatagaaacggaaaatggcacaaacgaaaaataataaataggttatgggtaaaaataaatatggcaatgtttatgaaatagcattatccaatgggaaatatgtttatgtatgctggatagaacaatttagttttggaatattcgattatatcgctgaaaagcctattacagatataaatgatttgttatgtgttggatttaaaacatataaagcatgtaaagaaacagcggttagaaaaaagatatggaaattgataggatatattgatttagaaaaagagaatatcagttttcctaatttggctgtatttctatcctataataaagaactttttataaaacagtcgcaagctatgcgacatggcaacttaataaaaataccaaccgatgaatatttagctctattaaagaaaggatatatttatggtttcttcgacaactatcagacttttgaattatggctatctggcaatatagaaaactatcccgaaaatgaagaaatatttcctttaccagaaaaatatagttgatacgaatatgctgaaaatagtgcgtaattctacttttatatcgccttataatagtgttaaaaccgaacgaaagacaatttattgttgcttttcatcttcctattaagaaggcaaaattcagcatatcacacacaaaatacacccatataaagccatataaacaggcgtaaatatcacaattttgtagcaaatagagttctgctttctatggtaattctcttttaacgaaacattattttggcaactctattagtttaaaagcactgtgtaaaaacgataaaacattgttgtttacatctaatttataattaaagctattactttctgtgtctattttgatacaatcgtcgcataatgatatttctcttataacttcttttataaactgtggtttgttttttacaacaaagtattgtatctcttcgttaaatatccttatggaatcaataacgttataatttttcaccttacttatataaagatgttcaaacttgttgccagtaaaaaataagtctattttatcaaggtcgttattacttttaatatttttccatttatccattacaactttaaaccccaacatattaatatggaaatatgtatttatggtagctggaacagattttttgccgatactacatatcaaatgttttttattggtatctaaattaacaaaatcaacagttgtaagttcagattcaccatttggatttaagtctaccttaaattcatcattatttctttttataaattttaaaccagatgaaattataagttcctcaatattcggattataataaaatagaaaatcttttgcttcaatttgtttcataatttatttgcagcatcttttttaacttcccacgaaatagtagtattatgtaaccccatcatttctaagtgtaattgtaaacgaaacgtacacagctacggaatattgtattaattgtttatagaaaacggaaaagattcccccaaaatataacattgcttataattttcccatatttttttgctgcttctaaaaaatagtttatagtagttgtaaatctataaaattattattaactttgaggcaactaacaacacacaaaaatgggcgagtacactaaagtgtcccgccccatttgatatcacaacggaataatccttattgtgatttgcttagaatgtaggtgcaaatttaggcattttataattaaaaaccaaattaaaacaatataaaatgaaaacaattcttggattagacttaggccccaatagcataggttgggctaaagtagaagtagacgataaaggaaactacttacgaaatattaaacttggcagtcgtattatcccgatggatcaaggtatacttggtaaatttgatagtggagtaacggaatctcaaacagcaattcgtacaaattttcgaggagttagacgattaagagaacgccatttacaacgtcgtgaacgattgcacagggtgctacatgcattaaagtttctacctaaacattatgaagatgccatagggtgggatagaaatgaacctgctatctatggtaaattcattaataatagtgaaccaaaattagcttgggagagacaagaagatggttctatgcattttctttttatggaatctttctatgaaatgatggccgatttcgctaaaatgcaaccatcattagtatcaggagaaaagaaaattccacttgattggaccatttattatctgcgaaagaaagcattgacacagcaaataaagaaagaagaattagcttggattctgcttaatttcaatcagaagcgtggctattaccagttgagaggcgaggaagaagaagataatccaacgaaacgtaaagagtattataagttgaaagttattggagttgaagccgatggagcaccaaaagcaggaaaaatctggtataatatacacttagaaaacggttggacagctcgttgtcagagtaaagtaccattagataattgggttgggaatataaaagaatacgtagtaaccacagaatatgaagccgatggggaaacacctaaatatgataaggaaggcaaaattaagcgttcgttcaaatctcctgaaaaaggcgattggcaacttataaagacccgaacggagaaatttatagaaagctctaataaaactgtaggaacttttatatacgatcatcttttaaaagaaccattcgataaaattcgtggaaaatatattcgcacaatagaacgcaagtattataagaatgaattatacaaaattttgtgcgagcaagctaagtatcataaagaattagatagcttggatacattgaatgcttgtgctaaagaactgtataagaataatcaacagcatcaagagtatttgttgaagaaagatatgaaatatcttcttcttgatgacttaatattctatcaacgaccattgaagagcaagaagtcgttgatagccgattgcccgtatgaagtatataagtacaattataagcagacaggtaaaaaggaacagaagaaaataaaatgtatagctaagtctaatccttattaccaagagttcaggttgtggcaatttatatccaatattcatcttttcaacgtaacagatggtaaagatgttacatcggaatatcttaaaacgaaagaagattatgtccgtttgtttacttatttgaatgaccggaaagagataaaacaagaaacattattgaaaggtttcttaaagttgaagaaagaaactataggttcagagaagatatatcccattcgttggaattatatagaagatgctaataaaagctatccgtgtaatactactcgacatgagttacttcttgcatttgatagagctggcatacagcgtgaattgttagatgtggaggggagagaatacagactttggcatctgttatattcaatagaatcgaaagacaaaacagaaagtgcattacgtagattgaaatcaaataaagcattcagcgaccttaacatagatgatgctttcgttaattcgttcttaaaaataaaaccttttaaaaaagagtatggagcatattctgaaaaggcaataaagaagctgttagctgttatgcgtagaggcagtttatggaaagaagctgatatttgtgaggcaacaaagcagaatatagccaaaatactgcaaaacgatattgatgagaagctaaaaaagaaaatagaagcggctgtttcttcatttaataaactgtcagatttccaaggtttgcctacatggcttgcttgttatgtagtgtatggtcggcactctgaggctgcgcaaatacaatgttggcagtctccagaagatttaaaaacctatataaacaagtttaaacaacactcgcttcgtaacccaatagtagaacaatgtttactcgaaacacttcgtacggtgtacgatatatggaaagatgcaggacaaatcgatgaaatccatatagagttaggacgaaacatgaagagtacagcagagcaacgagcacgcaaaacaaatgaatttctgcgtaatgagaatacgaatttacgtataaaaaatctgttgatggaactgaaaaacgatgataagatagagaacgtacgtccttactctccctcacaacaggaaatattacgtatttacgaggaaggtgccttgcaagagttgtcgaaagaagacgagatgtatgaggatatttcaaagatatcgaagatggcacagccttcgccaacggaactttcacgatataaactgtggctcgaacagaaatatcgttcaccttatacaggcagagtaattcctctttcgaagttgtttaccacagcttatcagatagagcatattattccacaaagccgttattttgacgattctttcaataataaagttatttgtgaatcggaagtaaatagtttgaaggataatatgttgggctatgagtttattaaggaatgtggcggacagaaagtacattgcacattgttggacggtaatgtggaaatatttactgaagaggagtataaaacttttgtaaccaaacattatgttggtaatccacgaaaaaaagataatttattgttggaagatattccgcaagagttctcagctcgccaactgaatgatagcagatatataagtaaaatggtacagactgtgctttctaatattgtcagaactaaagacgaacaagaagcaatatctaaatttgttgtatcatgcaatggtatgataaccgacagactaaaaaaagattggggactaaacgatgtttggaatactatagtgtgtccacgcttcaagcgactcaacgaaataacaaaaacaaacgcattcggtcattgggaagataaagccggtaaacatgtctttcaaaccatagttccattagaattgcagcgtgggtttagcaagaaacgtatcgatcatcggcaccatgctatggatgcgcttgttattgcgtgtgcttcgcgcaatattgttaattatctgaacaacgaatcggcaaatagtcctgagaagcgtgaagacctgcgtaaaaagctttgcgatgagaaacgcaagattagaaaaccatggaagacctttacgcaagatactcgtgaagctttaagtgatgtagtggttagctttaaaaattatgtgcgtgttattaataaagctaccaattactacgaacattatagttcatctggcaataaagttatgatctcgcaaaaaggaaatgatatgtgggcaattaggaagccactacacaaagaatctttcttcggtcatgtgaatctccgcagaaaggctactgttagcctgaaaaaagctttagaaaatatacctgctatttgcgataaaactcttcgcgattatattaatgctttggttgagaagcattttaatacacgacaattgttagcacacttcaaaagtattaactatcgtttaaaccgaaagcgggtagataaagtagaagtttggcagttcagcgatgaaaaaatagagatggtggcaagaagaaaaccactcgacacatcattcgatgccaaacaaatatcgtttattaccgatactggtatccagaaaatcttattaaattatcttcaatcgaaagaaggtaatgcggaaatagccttcacacccgaaggtattgaagagatgaataagaatatctctatatataatgatggtaaagcacaccagccgatactgaatgtgagagtggcaacaccaaaaggaatgaaatatcctgtgggacaaacaggcaataaagccactaaatttgtagtagcagaaaagggaacgaacctttattttgccatctatgaaaatgaattaggggaacgtagttacgatactattccattagatatagtgataaagcgactaaaagaaggtcaaagtccagtaccacaaatcaataaagtaggaattccacttaaattttatttatcacctaacgatttggtgtatgtcccaaccaaagaaaatgaagatgaattatgtagagatagaatttataaattcgtagattcaagtggtacaactgccaatttcgtccctcacacatcggctaatactatttataatgtagataaagaatatgcaaaaaaatactgtaatggtgctgttattctgaatgagtatggacttggtagcccgcagtcaaagaaccaaaaagatttggatggagaaatgattaaggaaatttgctggaaacttaaggtagatcgcttggggaatatcatcaaagttatcaagtaatgatgtttctatattatacgttattattctcttatgttagaaaattatcgtttcaatgaatatcgtgttatgtggattctcgtgtttttcgatttaccgactgaaactaagaaagataaaaaggcttacactaactttcgccaatttttagtgaaagatggctttactatgtttcaattctctatttatgtacgccattgtgcgagtatggagaatgccgaagttcacataaaacgtattcgagctcatcttcctcgttatggagaagtaggtatattgtatattaccgacaagcaatttgctaatattcaattattttctggtgaaaaacctaagccaccaaatgcacccggacaacaattagaactgttctaagttagtttatatagaagtaaaaatcccactcttactgagtgggatttccttttgtggcttcatttttattttctttcaataactctatatatctctgaatatcaagcatatattgataatcagttgttattgaaccacaaagatacaattttctaagcaaatcacaacgaaaagttatcagcctattcaaaggatgcggttgttattgaaccacaaagatacaattttctaagcaaatcacaacgaatgatgtatatttcggcagtagaacagtgttgttattgaaccacaaagatacaattttctaagcaaatcacaactctgatggacgtacaggcgagccacttggagttgttattgaaccacaaagatacaattttctaagcaaatcacaacggacaaggcggagaacaccaagacggagttgttgttattgaaccacaaagatacaattttctaagcaaatcacaactattggctatatatataataatggctgtaggttgttattgaaccacaaagatacaattttctaagcaaatcacgactaatcggcgttatattacatttatgtatagttgttattgacccacaaagatacaattttctagcaaatcacaactgtattgtgttaaacaaaatggatgacaatgttggaaattaaagagcgaacagcaaaaagtacattgcgtatatataagaataacatattttcttggagtaggagagtagcttacactgtaggaacccccaattatgaggtctgaaactggtttaaatgttttaaatgtaatttcaccaatctcgttaataatcgtatttggacgataggcttcggcatatttacactcatataaggtaacattttcattccaaagaaaacgatatacacgagcgttaaaggtttttccgatactgctaccgaatatattttttctaaaaaaataacagcttgggaataatgtaaaactacttttctaacattaatagcaattcttcttttgaactgttataaggcggtttccatactttttcttcttgttctattatttcatcgtattcttcgtttgataattgtttttccattgcaatctgaagaatatatcttatatgtgctaattggtctagagttttattctctctaaaacccaataacagtgctaaagctgtctcttctttaccatagaaaccagatccaattttatctatatagcctattgttgtatcaagaatagacaatatctctttatattcttgtttgtttaatactaagttactcatttgcttataatgttttacaatactttgttgttgctaaaatttaattcaacgttgttatattaaagttgtattgttcgtcttcacgcggatcgttataacttgtaaactcatcagtatgttcaaagttaaaaccataaccataaatggtgctattgtcgggcattattctttttttataaccagatatagccacacgatatttgcctttttcgagttttattctgaatcctttatataatgtttcaccatctaaagtctgataagataaattttctaatgttggattcttaaactggcttattttaaaatttgctaagctccctaaagaaccaatccaaatgttattatcttcaacatttaggttaaaagcatcataggtaaaaactttattccaatggtcttttataatttcatcactacctatcagaatttcataatctattgaattgatgggcacaataggaatccatacccctttctttaatgattctatatataattcagaattatcctgaaagactttcaagatatttttgctctttatttgtttacttgtaagaaacctctttaaagtttctatacaaacaacataaataccataactttcgactgatagtgttcttttttccataatttattttttgtagaataattatattacttataattaaatactacagacttctattaaatccttttctattattagtttgtgttcaattagcttttctgttatttcttgggaagcaaataaacaatagtcttgttcaaaatcaaatccgaactctaaattgcttctataaaaagtatttggtttcagtttttgaaacacatctgcatcaatatacagaggaacactaccataaatacccatatacgaaccgcattcattgcatttattttcaaattcaatgggacgttttacctcgttaagcataatttgttgagaacattctatcagataaaagcctttacttttaggtatagaatagaatataagcccttgccaatttgatatttcatacaaatctttaaatttttgcgataccattttaaatccatcataacttcctgataaatgatatttctttctttttatcttatatgtaggcaaatgttcttctataagacttcttttattcaaaatcatcttgcaagtagggcaggttatatacttgtgtctgtctactttgctaacatttaacaaataactgtcattatcataaaattgcagctcaaagtatttcataattaacattctgtattttttaattcaggatctgtattttttatctatatgccctgccaattccatatttttcaaaatctgtttagaaaattctcacatatatttagggtcagaatgatgtacatacgtagcacttaattcgaatatataaacctccatatttaaatttttaacgaaagtatatagttatacgctgtaaaacagaaatgtacaactgcaaatgtagttatttactctgattcttcgttattttattatcaaaatttctttattttgaatattttttatcctcttaccatatttatatttctttggttgtaaaattatttaacgataagtgaaacctttactctcacccattattcaatagccttttctatttcagagctacaaaaattctacagtcttggattgcaaaaaaagcggaattacctacataaaaacaattctgcaaagatttatatgcgaatttagttttaccagatagctacaactaagaaatttattattaaaaaataaaaaattataattataaattttatttttataataacaaactcgggtgtttattattaatttttttctaacccataatttccatttcaaaactatatgttttcttattggtataagacccccatactatattgtttcttctctcaaacagtgtctctgtaaaaaatatattatcaggcatatatatggcaaacatttacatttgcagatgtaaggaaagatagaacgatattacatattgaggcgtaatggacatttggtaggctgaaacctcacggaacgcttttatttactacctttgcagcatttggaatgatcagcctaccaaatgtccattactaaaacacgtgaggttttcagcctaccaaatgtccattacgcccatattgatgaaaaatgtaattaagctaaatcattatttctgtttctctgaacaagaatgtgtatttagagtaaggggagaaaattaagaagataagagaaacaataaagcaaaattcaattaacaaaagaatttttaataatgaaagaatgaaatatgagaaataaataactacttttgcagttgtacgcttttgttgtcagctcctttaaattatgaaggttgggctggaagcaaaaaaagatgaaacgttaactaataaggagatgctattaagacagcaaattattgacatttaattgtttgacagatggaaattagtgtaagttctgtaataggcgggcaattaaagcctgaagttgaaatggagaaaaacctgcatcaaataataattgaaatgaggaaaaatctaaaaaagcagtttttaaatatttcctttgaaggacttgccaaaataaaaatcaatttatacataagtggcgatgtttcagaatatagttccaaatcgggaataacaaaatgtagatactttcagaaaaagaatgagttagtttccgaattttgcattgatagatattattggacttctgaaccaatgctcgatacgaaaaagaaatttctattatttttagagagttcgtttataaatttagggattttgattaaggaaaaactaaaatctaaaggatataaatttgatagtgagatgtttaaagaaatagctttaaaaagtttaatggcactatagaatggacaacgacaatgaatattacaacaaaagtgcataaaacccaaaaaataaacaaaaaacggaagtcaagaaatggaattagataaaacaattagagaaaatttagatggggattatttaacaatccacgtggaacattttaaagaaggtgtggaatatgctgctcaaaaaaagttacaacaaatacatttaataggtggtagggcaaaaaatgttattgttgactttaaggaacttaacaaattgtctgaaacgttgcaagatatatctttcattcaagatattggaaacgtgattaattttgaatctatttacaatctcaaagaaatgagaaagatatatattcatgataaacagaagtttacattcgatgtctcgcgatttacaaagctccaacatttaggtggtgattattggaatggattaattaatttagaaaaggcttattctttaacatctttggtaatttgtaagtatccttttccaaacttaatacaattttctgcattgcgaaacctcgaagttctacatatttatggttcaaaaatccagaatttagatggcgtggagaaactttcaattagagaactttctcttgcgaggaataataaacttgacgacatacataaaattaatgaagtttccagtttagaaaatttggagattgaatgttgtaagaaacttttagatttctcatttcttaaagataactcctatattgaggatttatttattgacaaactggactctattgattttgtagaatctatgcctaatctaaagaaaataaacttttggaattgtaaggacggaaatatgactccattattaaagtcgcagtcgttagaagatgtgaacttttatcccaataagagacattatacacatactcttaaagaaatagaagaaataaggcaaaagaaagataaataatgtggggttagttcttttatgaggcattggaaaatgccacacaacaattaataaaaccattagtatgctaagtaaagccataattaattatttaaaagaaaataatttttatctagaaaaagaagaaaaaaactatacaaaagctcttttagatttgggaataaacctaaactctgatttggcatatttctgtttacatacaacggaaatgagttttaaagggaggattggtagtattgataatatttgttggtatttaatatactcaacgtatgctcaaagaatagaatctttgcaatgctttttaggtttaccaaaagagtatattccattagatagctttgaaacagagggcggttttttctacaatcgggaaacaggagaagttttggaacttgaacttggacagaaattaattgattttcaaaatggaaaactccaaccacagtggcaaagttttaattctttcttggaatggtttttcgaattatgaggcttttagcatggcttacttagactttagcaaacaccttttggttgttaagtagcgatattcagaaaaatttttaaacaaatgtttgtcagtattatataaaaacaagaagttacaccctaagaatataccctaaaaactatatattatgtttaaattagaatttaaagcaaaaactattgtagcaacaaagaatagcaaagacaactattatatggttggttttgcagatgataaatataattataagaattatatattgtttcaaagaccaattatgttagataatgatgacgatccagaggctgacttaaacggattatatgctgaatgtaatggtgatatatgttataatgcttgtaagtctgtgcgaataacaaataaaagttgcgtatttatagttcaagatagtactattatcgtagatatagaaaatataaaaataaataaacgttttatagaatatagcaagtgtatctttaaagacttgttggttcttgatatttaacccattttgtttctattattaagtgcaatatttttgtgtttagaggaacgtaaggagagaaaaatggtagagtaggggcataaactgcctttaaatcgggaaaaagataaacgttataaaccaaataaaggcggtcattaataatatggaataattatggatgataaaattaaagtgttgctaaagattgagattcctcgactaaacgaggatgttgatatagcttctatacggaaaatattaaatgaatatgtaaaatctcttattcctcggatcaatattcaagatttagaggattggagtcttttaatatgggtagcttgccggtctacaaatggaatcggcgtttttaaacgagcaaaacgttacccttcagataaagaatttgaaatttcgatttctgttactatcccagatgataatcaggcttcgtatggtctttccaaagtaaaagaagcattctatacaccactgagtgataaaagtttttatagcttagaatttaactttgaaaactacaacagtttatacgaatacattcttgacagttctaaacatgcaatagatttggcctttataaaaggtattacatgtaatggcaaaaagattaagtttcaaaaataagggggtatgacgtagttgcaaccaatggaaataaaatgaattcaaaacaatttagtaattaacattagaattaaaattatggatacatctattgaagatactattaaagagagatttgtctcattctataaggctatgaattattggtacctttattgtaataatttggaagatgacgaaactctcaccgatttagagataacaaataaacaaaaagaggagattaaggctatttttgataaatattgcacaaaaaaggaaagaaaaaatggacttccaaatgttatatcgtttgaggttttttcttctgaagatgactttcctaagatgacaattaccagtataaatattgatatggaaaaaagaattgctattcttgaagtggaaatagaagatgcccttaattcgaaatatcaatatattttaaaaaaatgtagagaagagtggttaattgactctcgaaagagatatagtaactggaaaaagaagtggataatagagggattataaagttgtttatcaaaaatataatatgcaagtcataaagagactttttgaaacaagaaaaagtaatgattaagagaacacagttgaaaaatatgatgaagagtatatatgaaaacatatataccaataaacaattgaatgagatatcaaatatggtgtttcgttcaaatttatctgaggaaataccaataatagacaggtatgaaaggataaatgttttacaagagagtattgcacgtgaagatttttcagtgtgtctgcttaattgttccttattcttactatacaatctgaaacttcacttaaaacatactttaaataatatagaggcagacaacttatttttatgtattacagtggtaaatcctgtagacgagataaacgatgttggattttctgtaccaaatattcttattagcacaaaacttgtggcaaattgtttgacacaagataaagctattaatctaaaagaggagaaatatttaggtggaatgtatagaacaatagttgatgaaaatatgtttgcatgttacaaagttattactccagataagcatggagatattattagatattatattgttcccaaactatggtaaactttacaactgtaaaggcttctttaactttatatctttccgctgccagttaggaaagtatgaagacattgtaaaagaaattggtaactattaactatagactttattatgttttttaagaaactatcgaaatatgaagtattagaaaagatgaaacagagaaagatagaacttcgaaaaatagacaaactaccatctttattagacaagttctatctgtctttcgtttcaaaatacgaaggtatagagattacgccagatattgaagtgtttggatacgagaaagctttatgcgagaaccgctatttggcagctaattatgacaatataagtaagaaagtttggataattggcacttctggacaaggcgatgaatggtttataaacagagaaaacaacttaattttattctacgatcataatcaaggagaatattctaatattagccaattcaaatgtttaaacatttcgttttgtagttttctacaaatggcttttttatatcaagacttagaaaagttgttaaacaaacaaaactctattgataaaccattgatagatgattttattaatgaagttaattccattcacccctatttatatacaacttacccttataagtatttctgataataataaggtatggaagcagaaacttaatatctttggtagaagaataggggcaacaataattctttcttcattccgtttaccatttaaggtcagtacattatggggttaaattaaatggaaagcctcatactgaatataatgctctaatgaaacaaaagttagatgatttacttcaacggtacaaatatagaagaatgaatgcctgaacggacaagaaaagaattattaattctcgaacataatacgagaatgggattgaacaatgcaagaaatagtcgtcattaaattgtgtttttatgtggtattttttaacaacagtagtaaataaaaaagatacacttatagagctgaatggttcttatgacaagatggcaaaatactttttctctgatattgaggataagaggtattttgaaaatgtaaaattcagtggaatagctcaaaaaggattcacacataaactactttctcaaacagattatttaataaatgcccgttttggtggtattcctgtgttttcagaaagatttatagagagaacaaggctatatctgtccgataaaattagtttttacccatgtcagatactactgaacaataaatcttataacttttttctatgcagaataaagcaaattatgcctgtgattgattatgaaaaatctggttatagaattctatcagatggaaataaaatagtagatgaacctattattattaaagaaaatgttgatgaagagttgttaatagtacgagattctacatataaatctaaaattatagtaagcaatttgtttaaaaagattgttgaaaaagaacaattgaatgttggtttttataatacctcccagtcattttggtaatatcttattctatagctgaataaaattagaaatatttgcaatacctctctaaataaaaaatgggctggagttaatacaaaacggaatagatttaaacaattgcaaaaggaattttgttagtacagaccaaagctggtactaaagaaaagataattcgcattattagaatataaatacttcaacataacaaaatggaaaagagcacaatagaaaaaatcaacgatttcttcgcaaataatatgattgcaaaaggaacaccatctaatttagatgaaatagcccatgc

SEQ ID NO: 612 - DNA, 24518 bp, synthetic construct
  source 1..24518: mol_type = other DNA
  misc_feature 1..24518: note = Synthetic
  variation 15923..17663: note = n is a, c, g, or t
aacagcaacctgcgaatagtctccgaccgcggacgctgctatgagctgaccgaccgcgtggagtagttggatgaaaagggcgtaatagctgccctgccgggcccggattacgcaaataccaaggtcccgaagaagtccggccggtggaaatcgggcttgccgacggcaatgggattccacgacaggaagtgcggtcggctcagcttgtcgccgcacttgtagaagttggcccgcatggtgaggccgtcgaaagccgtgatgctgtgcctgaagtaggtggcagcaggaacaacgagtgccagctcccattccacttctcctatgcgttcggcgaacggccggcggcctaacgacgaccagcgcagcaccctctcgagcaccggctgcggcgcatgctcgcgcccctcgcgcccggtgccggccgcaacaagcagcgttccggcgcagttacactccatattgtaatagtaaccgtcggcagcagggacggagaagaactcgcagcaggagtcttcccatacgcggccgcagtcgtgaggggccacagcagccacgctgtattccctgacacggtagtggataagcagcagcgggcccgtgtgagccatgcggaaagccacccgaggggcgtagggataggcctcgggccagttcacgcagtctatgggttgccactccacgccatcgcggtcgagcagggcaggcacctcggcagcctctttcggggccgctgctattttgcgaacggataacgtcttcatgtcttcaagctcttacttgcagctctcgatgaactctgccatttccttctcgtacgagcaaacgcgctcaaagaggcggtactggttgcgggttctgacgagattatgctccggatacttaatcttgtaataggtgtcgccgttgatgtagtcggccaggaagcgcacgcactgcatgaaggggaacagctcggcggcataaggcaggttctcggtctccacgggcgtgaggaatgcacgtgccgactccatgtacccgcgggcaaaagcacggaagatgtccatgcggaagtccacgcgctctgtatccgggtcgtcttccggaagggtgcttccggccgtgcggaggaagtcgccgaagtcggagaaaacaaagctcggcatggttgtatcgaggtcgatgacgcagagggcggtgccgtcttcgtcgtacatcaggttgtttactttcgtatcgcagtggcagatgcgcttgggaagcgtgccttcgcggaacatgcgttcggccttgcacatgcgctcggcgtggcgttcaatgccgtcgatgtactcctgcacctcggccgcccggcccaaggggtcggctgccacggcctctctgagctggcgcatgcgcagctccatgttgtggaagtcgggtattgtttcgcccagcttgtcgggaatgtcgacgagcatagcctcgaactggccgaatgccttgcccgcatcgtaggaatactgcgggtttacggtctcgtaggtgtgggccctcgggatgaacaccgacagccgccagtaggtgccgtcggcatccttgaagtaggttttgccctcgcccgtgggcacaaagcgcagcacgcggcggtctatgtcggccgttccggcagcctccaacttgcggcgaatgtggcttgtaacggcctcgatgttgtgctgcagcaggtcaacatcggtaaagatggcgttgttgatgcgctgcaggacatagtcgggcgcgtcgggctcggtagttgtcacgcggtaggtgtcgttgatgagtccgtttcctaacggctccacgctttccactgtcccctctgtgaggaaacgggagacgatgttgttgaacttttcttgttgcatgtcttcatgaatttgatgtggcaaaagtaatcaattttattgattcaacaaaagcacagttaattaattgataattgataatggataattgagaattatgattagtccgaattgagaattgataatggacaatggataattatgattggtccgaatggacatttgatgattgataacaggcaattttaatccgtatgaataaaggaagaaaacagggcgtagcgcagcgcgaaatcaggcagaagagcctgtccacaaaacgaatcataattctcaattgtccattctcaattctcaattacccagttctccattctcaattacccagttctccattctcaattaagactaatcataattatcaattatccattataaattatcaattagagcaaagcagctactgtcctcctaaccttttaaagtacgtgatgacctcttcccaggtcttgaactcatcgctcccgaaggcgatagttgtggccatggcgtcgtcatcgggtgcagtatcgacgagataatcgccgtagagcagcgccttgcggttggtgtagataacgcggtcgtaagccggcgtgctgagatactgctccacccaggcctgcacagcagccatttgcgccggctcgttggcaggagcaggggccacgacgtacacctggtagcgctcgcagagcatggcgtaggccttggccatgctggagcgcggcttcatgtatccatcgtgcagggtgctgaagtcgatgtacacgatgggccgttcgcgcctttgctggcggtcgtcaatccatctcactacgggcagcacgccgtgcatgaaggagcggtcgtccagccggtggcctccgtggaagcgtatggcctgcgtgtagtgtgcccggaagaggtcgaaagtgttcaccacgtcgtcctcatcgccaaaaagaccgtagcagcgggtctgctcttcggccgtcacaccgccgaagcactgttccgtaatggccttgtactcctttacgagcggcttgtctacgaagaactcctgtactccgtcctgccgcgggttctggtatgtttggcgccccatcatgtcgtggctgtgcatggtttcgcccatttcaaaggccgggttcacgcagatacggtcgtagccgtacatcatctcggcgtacataccgcccatcgaggtgcccaggatgaggtcgggctgccgttcgctgcacacccggcgcagcagcgccagggcctcttcgggatgcaggggcaggtcgtaggccatgacatcggccgagggcagcaccgtttgaatgagctttacggtgcccgactgggccgaggagccgaagccgtggatgtagagtatcttcttgccctgcatgaggtcagggtattgcttgaggtaaggattttgcatgctcgttatcagttgttcatgcaaagatagcgcttttagccgaaacggcatgcagccggcagcattatttctctccgccgtgtcatcaaatcatcccctcctccgcctcccctttccaaggggaggataccggtttgacctttctccaagcgttgtttatctttttctatgaagcagcaaacctgcaacagccgaaagattactctgttactctgtctttagatgcaagcagctacggttcctccccttagaaaggggaggttaggaggggatgattttgcaagcagcaagctcctaattcacaattcataattcacaattcacaatgaaagaggggatgatttcttaagcagcatcgctatttcatgccatcaagtcatcccctcctccgcctcccctttctaaggggaggataccggtttgacctttctccaagcgttgtttacctttttctatgaagcagcaaacctgcagcagccgaaagattactctgttactctgtctttaaacgcacacagcagcggttcctccccttagaaaggggaggttaggaggggatgattgcagcaacggtttccttgcttttgcaccatcagagtggctttccggaggcttgtcgaacccgttttagtcactccctttcagcccagcaggcccgccattacatccctctcattatcagatacttacataacagctttaccgaagctgcctttcaagccccttgaccgataccttcaagcccattgaacgtatccttcaagggcctcgaaccatagctccgtgcggagcgctgtttacagcgggtggggctgcaaagggcgacggagccaaatgaacccaccaagcagcccccacattcctgacaaccagggttgttacagcacaatttttaaggtgaattttggccaaactacaaactaaaagttagccaaactgctaaacgaaagttggccaaattgctaaatagatggctgataatttgcgttgataaggttattttgttatctttgctgcatattcttttattctgagaaaacatggaaaaggtatataggaaacgcattgcagaccgattgcttatggacaagttggatgcaatgggagcggttctgatagaaggacccaaaggatgtggcaagacaaccacggcagaacaacaggcaaagagtgtgctctacatggacgacccggaacgttctgaacaatatctgcaaatggcacaaaccaatattcgtttccttttgcagggcacaacacccagactgatagacgagtggcaggtagtacccaggttctgggatgccatcaggttcgaggttgaccatcgcaacgaagtcggtcagtatattttgacaggttcggccgttccacctgaaacgaaagacatacaccacaccggcaccggtcgctacgggtggctgaccatgcggccaatgagtctgtgggaaacgggcgactccaacggcggcatcagcctgtcggaagtcttcaggtcgccagaacagataggcagttctgccaacctcacgatggaacgtttggcgttcctggtgtgcagaggaggatggcctaactcgctgtgggcaaagaccgaaaaggctgctcttacgcaggcagcagaatactatgaagcaattacccggtccgacatatcaagggtggatgatgttcggcgtgatgaagaacgcgccaaacgcctgatgcgctcctatgccaggcaccaggggacgcaagccagcatgcagacaatactggatgacatagtagttaatgacacggaggaaatgagttctgccacacttgcttcttatctgaatgccctgaagaagatttttgtcattgaagacatgccggcgtggaacccgaacctgcggagcaagacggctatcaggacttcggacacccgttacttcgttgactcgtctgttgcatgtgcggccttgggccttggtcctgatgacctgataaacgatttgaatacctttgggctgtttttcgagaccatgtgcattcgcgatctccgtgtctacgcagacgctttagacggaagagtttaccatttcagagacaaaaacggattggagtgtgatgccgttatccatctgcgcaacgggtcttatggcttgatagaaattaagttgggcggcgataaactgattgacgaaggagcaaagaacctgattgcattaagcgagaagattgatactacaagaatgaaagcacccgcctttatgatggttctcacaggagtgggcgcttatgcctacaggcgtacggatggtgtatatgtagtgccgataggttgcctgaaagactaaagcccgcaaatcgagccccggcgtatcgtaatacagccgtttcagcgggcttgagcatccggagaggatgtgccgggggtagcagctgccgttgttgaaaccggcattcgtttttcctgctcctttgtattgcgagtgtgagattattttgtatatttgccaaagtaataccaaacacatgcgatgatggataaacggagaaagacggcttgcgcactcgcgctgcttgccacgtgctttttattgttcgccggctgccatgacaacgtgctgaagagccgcccgcagatgaacgacagtaccataatgatggttgacagcatcaggcaggattccaccttctatcttaccagaggcgtgggcatggccggcacggagaagccacagtgggagtggtgcaaccggttgggccgacatgccggcaccgaggtgctctactggctcgccggcaccgacagctcgctcgttgtacggctgtgtgcgtatcgccaactgcggcgtaagtcgggccaaaaggccgtgcacttctaccaagaacacatcaacgacagcgtcaaagtcacactccagtcgggctgcatcgtgtacgatgccccgtttgtagaggccattgaggccgttaactcaatggaccatgaccagcctcccttagctgcggtgtggcagaaccagttggacagcctgcagttcttttccaatcggcaggccgacctcttgcaaaatccctggtttctcggcacactccggccccgtaaagtttattattccaagctgcggacggaggtggcaaaggggaactatgcccccgtggcagcccttgccaaattccaccgcacggcggatataccgcttatagagcgggtgctgaaaaccatgcgggcggagagttacgacaaaacgatagccgggttggcagctgttgagaactggccccataagtcgttcgcatggtttgtacaggagcaatgccgcgaagccattgatggagagccttcagcgctgtcggacacgtatcttattccggtgctgctggcctatcccgagccgtggagctaccgcatgttgcagcacttgatgggtcaaaacatgccgaaggaagacctcctgacctttggtattgaactgaaagacgcctatgaaaagcatccgcagccgtacttcaagcccctttacgataagtattgcgcgcacatcaaactacgaccggtaagcgaaggcgtgcaggaaatcattacggaatagccttctcgcggcgccggggcttgtcggcaggccgacggggcggtgtcagcaagatgtcagtaaaatgtcagttggcttttaggtagtgtctttatgcttttgcgtattttcgcttcaaaaacgaaggaagatgcaaaaacagatgatgatggcggcctgcctgtggctcatagccctgcccctgcaggcccaaacggaaaaggaagtgcagctggacagcgtaacggttgaggccgcccgcgtggtaaacaagcccgatggcaagctgctcataccttcggaggcgcagaaacgggcctcgaccaatggctacagcttgctggccaagctgcagttgcccggcttgagggtagatgaggtgatgcgttccgtggtggtgctggacggcagaggcgaactccagctgcggctcaacggagccatagcctccagggaagaccttcttgcgctcgatgcaggcacggtcaggagcgttgagtttatagacaatccgggcgtgaggtacggacagggagtggcctatgtggtcaacatccgcacacagcgggccgtaagcggcagcgtagtgggcgtggatgcaagcaacgccgttaccacccggtatggcgacaacgccgtgtacgggcgcctgaaccgcggagatgcggagatagccttcaattacgacttcggctacagcgacttcaggggcagccggtacgaggaactggccagctacctgctgaccgacggcagtaggtacgacatctcgcggcgcgacgaggccgcacgctcgcgcagctacaggcattcggccgagctgaaattcagcctcgccgactctgcctccaacgtgcttcaggcctcgttgtacggttcgttcaatcagatgcccggcgactggcagcagcgcaggatagcagacggctcggccgggagcaccgcattcatccgctcgcatggccgcaatttctcgcccgttgccgacctctacgcattccgtcacatcggcagagggcgaacggtaacggtgaacatcgtgggtacagccatcggcacacgcagccaccggctcaatacggagggctcgccctatgcctacgacgtgcagggtcgcacgtggtcgctgctcaccgaggctatttacgaacaccgcttgcggcccctcacgctctcgttcggtgcccgccacaagtggaaatatacccgcaacgcctatacaggcagcgtggagtcgctcaactgcatgcacaacagctcgctgtacctcttcggcgaggtcaagggtaactggcacaagtgggcctacgtggccggtctgggggccacgaacgagcgctaccgccagggcggttacagttataaccgctggctcttcatgccccggctcacgctaacgtatgagtttgcgccctcgctctcggtgcgttacatggctggtgtggagagtcggctgtcgcaggtggccatggtaagcgacacgcgcatcaggcagaacagcatggaatggacggtgggcaatccctacctgaagcctacaagtcgcctggagcacagcctgcgcatagcctggaacgtgccccggctgtctaactccatcaacattgtgcagcgactcaaccgccatcccaacatggcaagctacacccggacggacaacaacgagtttctctacacgcaaaagaaccagcgcagcatcgatatgttttacgtatcggacgacgtgcgttgggacatcgtgccccggaagctgacttttcaggcctcggccggcatctaccgcttcttcaaccgcggcgacgactaccgccattatctcacggcctacaacgtgcagggcagcatgcaggcctatctgggacggtggacactgacggcctatgccgacaacggctggcgctttatggagggtgagacgcgtagccggcagggggcggcaacctacgtgggctgctcctaccgggcaggtaatctcacgctgtcggcctattggcagcatccgctggagaagaaccccatgatgatgaaggacgaagtggtgaatcgctacgtgtggaagcagattatgatgcgcggaaccgactatggcaacgcgcttatgctgaacgtggcgtggcgcctgagccgtggacggaagttccgcgaagtgcagagacagctcaaaaacgaggacaggcaaacgggcatcatgtaggcgtatgaggaagttgttggtgctgttggcagttctggtgtttgccgtcatcgtggccgaatacaccatcccggtgggcgatgagcgtccgttcgaggaagtgttccaggaaggcatgaactttgtgtacttcaacacctacaccgatacggctctggactacagcttcagctatccttccttcttccaacaggaaacctttgccggcgatggggcgggccgtgtgcagttcggctaccatgcccacggcatgaatatggtcatggagtgcagggttgaacctgccgggaagtaccgcttccgcacagccgatgtggtggactccggctccgtggcatctgtagagggctaccgctactgctcccactacatcctgcgcagcggccgctggtatgtcctcaccctctgctatcctgcctcctatcagcaagctgccgccctcctgctgttcaaggttaaaaggtggcgggcgcagccgtccaatgctcgcttgggaaaatttaagccagaagagtaacggaaagggcaagaaggattgaaggaagacatacacgctttgataggagcacccaataaaccagcaatagagcgagaatttaagcccttatatttaataaattgatgccgtttgtgcgctttgtcgtatattatttgctatatttgcaaataatctacaatacctatggaaaagctaaccagcagaataaaagaagttctcactgaaagagacatggggcagatgaggtctactgaaaatctctgcaagattttcacaattgtgaacccatgcgtttgtaatcgctgccaatccagtctggaactccatctacggacagtcgggatattacaagcaaatgctaaggatttcggaaaaaaagaaaaaggcgagttgccccgccttgtttgttttcacaacggaataatccttattgtgatttgcttgaaaattctgttgcaaatataataacttaattattaataaccaaataaatctatcaaaaagatgaaaacaatcttaggattagacttgggaaccaatagtattggttgggctaaagtctctattgacgacgatggtaattacttgcatgacatcaaacttggaagccgcattattccgatgagccaggatgcactgggtaacttcgacaaaggagtaacagagtcgcagacagccattcggacgggttttcggggtgtgcggagaattcgggaacgttccctgcagcgtcgcgagcggttgcacagagtgctgcatgtgatgggtttcctgcctcctcactacgactcggccatcggatggaacagagaggaggcgatcacatacggcaagttcctcaatcatggcgaaccgaagctggcttgggaacggcaggcagacggctcaatgcggttcctcttcatggattcgtttcatgagatgatggctgatttcgaacgttatcagccagccctggttgctgacggaaggaagataccactggactggacactctattacctgcggaaaaaggcccttacgcaagccatccggaaagaggaactggcgtggatactgctcaacttcaaccagaagcgtggctactatcagttgcgtggagaagaggaagaagaggatccgacgaagcgtgaggaattctatgagctgaaagtgaccggtgtggaagcaacagatgagcggaaaggtgatgaagtgtggtataatgtcaggttggaaaacggatggatttatcgtcgcagcagcaagatttctcttgatgactgggtgggcaagaccaggcagtttatcgttacgactgaatatgaaaaggatggcacaacaccgaagaaagacaaagccggagaggtgaaacggtcgttccgggccccaaaagaagacgattgggggttgcggaagaaacgtacggagagtcaactggaagcatcgggcaaaactgtaggaacgttcatctacgatcatctgctggctgaacctgctgacaaaattcgcggaaacttcatccgtaccatcgaacgcaaatactataaggcagaactggaagccattctgcgtgagcaatgcaaatatcatgaggaactgcggagtaaggaaatacttgctgcttgtgccagggaactttatcagaacaatcagcctcaccgggatagtctgttgaagaaggatatggtctatctgctcttgactgaccttatcttctatcagagaccgctgaagagcaagaagtcgctgattgcagattgtccatacgaacattatcaatatgtagacaaggagacaggagaaatcaggcagcagggtatcaagtgtattgcgaagtcaaacccgtattatcaggagttccggttgtggcagttcatcctcaatcttcggctctatgacagaacggacgacaaggaagttactgcggagtacctgcagtcacgggaagattatgcacggttgtttgtttatctgaacgaccgcaaggaaatcaatcaggagacattactgaaagatttctttggtctgaaaaaagtaaaggcaccgggtgcagagaaagagtttcccatccgttggaattacatagaggataaagagaagaaatatccatgcaatgagacgcgatatgaactgcttatggcactcgatcgtgcaagtttggaacacagttggctggatgacggtgaacgacaatatcgcctttggcatttgctctactctgtagaaaccaaggatgaggtagaaagagcgttgcagaaactgtgtgcagatacaaataaaaaagagaaaggaaaagagatagaggcagcaaaacgggttgttgtcaatgatgagaatgttttcgttagtgctttcctaaaagtaaagccgtttaagaaagattacggtgcctactctgagaaagccgtgaaaaagctgttggctgtcatgcgtatgggtagcttgtggcacgaggcaaacatctgtgaagagacgagaggtaggatagtgagtattctgcaaggagatatggatgaaaagataaaagaaagaatgagccatgcagcctattctttcggtcagctctctgactttcagggactgcccgaatggttggcatgctatgttgtgtatgggcgtcattctgaagcaacggagattcaacgttgggagactccggaaagcttgatggcatatataaatggtttcaagcagcactcgcttcgcaatcccatcgtagagcaatgtgttctcgaaactcttcggacagttcacgacatatggaaagagtctggacgaatagacgaaattcatgttgaattaggacgaagcatgaagagtacagcggatcagcgcgcccgcatgacgcagaatattcagaagaacgaaaataccaatctgcgcatcaagagtctactgatggaactgaagaatgatgcggatatcaaggatgtacgtccttactcgcccatgcagcaggagatattgcgtatttatgaggaaggagccttacaggaactgaccaaggatgataaggactttaccgagatttctaaaatctcaaaaatggcgcagccttcggcaagcgaactgttaaggtataagctctggctggaacagaaatatcgttcgccttataccgggaagcccatttcgctgtcgaagctcttcacttcggcatatcagatagaacatgttattccacagagccgttactttgacgattcttttaataataaagtgatttgtgaggccgaggtaaacaccaagaagagcaatatgctgggctacgagtttatcaaaaatcatggtggagagatagtccactgcacgatgttaggtgatgtcaaaatcctaagcgagaacgagtacaaggcattcgtattggaccattacgctaacaatcgggcaaagaaagataagttactgatggaagacatacctcaggagttcctgaaccgacagatgaacgacagccgatatataagtaaggtggtaatggctttgctttcaaatatcgtgcggacggaggaggaaatggaaaccacttcaaagtttgtcatcccttgtacgggtggcataactgacagactgaagaaagactggggactgaatgatgtatggaatcatatcgtttacccacgttttgaacggctcaatgatcttacacagtctgaagttttcggccattgggaaaacaaggaaggcaaaagggtcttccagacatctctcccgctgaagttgcaggttggatttagtaagaaacgcatcgatcaccgtcaccatgccatggacgcattggtgatagcatgtgcctcccgcaacatcatcaactaccttaacaatgagtctgccaacagtctggataaacgggaagacctgcggcggcagctttgtgacaagaaccgaattatccgtaagccgtgggacactttcacgcaggatgcctgtgctgcactggaaaatgtgatagtcagcttcaagagctatgtccgtgttatcaacaaagccaccaattattatgagcggtatgatgcagaaggtaagaagattatggcggaacagcagagtaaggaaatgtgggcagtaagaaagccaatgcacaaggaaacggtgtttggtcatgtcaatcttcggcggaaagaaacggtcaagcttaaagatgctttggagaatatcccgtctatttgcaacaaggatttgcgtgactacatcaacagcttggttgagaaacatttcaataccaaacagttgcttgcccatttcaagagcatcggttatcattggaacaagcagcatgtggataaagtggaggtttggcaattcagtgatgagaaagaaaagatggtggcaacgaggaaaacacttgatatatcatttgatgccaagcgcattgcttctatcacagatacaggcatccagaaaatactccttacctaccttgagacgaaaggaggaaaccctaccgtagcctttacgccagagggaattactgagttaaatcagcatatagctgactataacggcggtaagaagcatcaaccaatcttgaaggtcagagtgtctgaaccaatgggtgcgaagtatccggtaggacaaataggcaacaaggctgataagtttgttgaagctcaaaaaggcactaacctttactttgccatctacgaagatgaagaaggaaaaagaacatacaaaacaatgccattgaacgaggtgatagaacggctgaaacaagaactgcctccagtgccagagaagaatgaggagggggtgccgttgaagttctatatctcgcctaatgatctggtctatgtaccatcagaggatgaaatgattacgaaggaatgcagattgaataaggaaaggatttataaaatggtaagctctacagggaatcaatgtcatttcttaccatgttatatagctaaacctatttacgataagtttgaatttgaagcaatgaataaaataggtagagctttatctggcgaaatgataaagactgtctgctggaaaatggaagtagatcgtctgggaaatattcttagaataattaaataaaatttcttttcctatgattaagaaaacattatgtttcagcaaccccatctacttgagtctgcgtaatgcccagttagtattacatttgcccgaagtggaggacaacggcacattgcctgaaacgatgaagaaagaagctgagcgcaccatcccgatagaagatatcggggtggttatacttgataatcggcgcataacggtaacttcgggtgtactggaagcactgttggagaacaactgtgccgttatcacttgcgaccaaaaaagtatgcctgttggtctgcttctccctttatgtggtaacaatacacagaacgagcggtttcgttcacagttggatgcctcgctgccattgcggaaacagctttggcaacagactgtgaagcagaaaattctcaatcaggagcatatcctacgaaccaacacagacaaagaaaccaactgcatgcgtgtatgggcaaacgacgtgcgcagcggagaccccggaaaccttgaagcaagagcagcagtctattactggcgaaatatcttcgcagattatcccggctttgttcgcgaccgcgaaggtataccaccaaacaatcttctcaactatggctatgccatcttgcgagcagtcattgcccggtcgttagtgggtagtggcttgcttccaactctgggcattcatcatcacaaccgttacaacgcttactgtttggctgacgacataatggaaccctatcgaccgtatgtagaccagcttgttatcgacatcattaaccataacgacgacgtttcggtaattaccaaagaactgaaaatgcagcttctgggtattccgatgttagatgtcgtggtgaatagcaagcgcagtccgctgatgattgccactcaacagacaaccgcttcccttgcaaaatgttttgccggcgagactcgtcacatcagttttccagaaatgtagattcatatgaccagcttcgaccgcttcagtgaatatcgaattatgtggattcttgtattctttgacctgccaacggaaaccaagagggagaagaaagcctatattgattttcgcaaatctctgatgaaagatggctttacaatgttccagttttccatctacgtacgtcattgtgcaagtatggagaatgccgaggttcacatgaagcgtgtccgttcattattgcccaaagtgggaaaagtcggtatcttgtgcatcacagataagcagtttgctaacatccaactcttctatggtgagaaacaaaagcctcctaatactcctggtcaacaattggaactattctaatctcgcatccaatagaaaacgaaaatcccactcttatcgaatgggattttgttttgcggtatcattttataattctctaaataaccttttatctatttaaaaatcagttannnnnnnnnnnnnnnnnnnnnnnnnnnnnnnnnnnnnnnnnnnnnnnnnnnnnnnnnnnnnnnnnnnnnnnnnnnnnnnnnnnnnnnnnnnnnnnnnnnnnnnnnnnnnnnnnnnnnnnnnnnnnnnnnnnnnnnnnnnnnnnnnnnnnnnnnnnnnnnnnnnnnnnnnnnnnnnnnnnnnnnnnnnnnnnnnnnnnnnnnnnnnnnnnnnnnnnnnnnnnnnnnnnnnnnnnnnnnnnnnnnnnnnnnnnnnnnnnnnnnnnnnnnnnnnnnnnnnnnnnnnnnnnnnnnnnnnnnnnnnnnnnnnnnnnnnnnnnnnnnnnnnnnnnnnnnnnnnnnnnnnnnnnnnnnnnnnnnnnnnnnnnnnnnnnnnnnnnnnnnnnnnnnnnnnnnnnnnnnnnnnnnnnnnnnnnnnnnnnnnnnnnnnnnnnnnnnnnnnnnnnnnnnnnnnnnnnnnnnnnnnnnnnnnnnnnnnnnnnnnnnnnnnnnnnnnnnnnnnnnnnnnnnnnnnnnnnnnnnnnnnnnnnnnnnnnnnnnnnnnnnnnnnnnnnnnnnnnnnnnnnnnnnnnnnnnnnnnnnnnnnnnnnnnnnnnnnnnnnnnnnnnnnnnnnnnnnnnnnnnnnnnnnnnnnnnnnnnnnnnnnnnnnnnnnnnnnnnnnnnnnnnnnnnnnnnnnnnnnnnnnnnnnnnnnnnnnnnnnnnnnnnnnnnnnnnnnnnnnnnnnnnnnnnnnnnnnnnnnnnnnnnnnnnnnnnnnnnnnnnnnnnnnnnnnnnnnnnnnnnnnnnnnnnnnnnnnnnnnnnnnnnnnnnnnnnnnnnnnnnnnnnnnnnnnnnnnnnnnnnnnnnnnnnnnnnnnnnnnnnnnnnnnnnnnnnnnnnnnnnnnnnnnnnnnnnnnnnnnnnnnnnnnnnnnnnnnnnnnnnnnnnnnnnnnnnnnnnnnnnnnnnnnnnnnnnnnnnnnnnnnnnnnnnnnnnnnnnnnnnnnnnnnnnnnnnnnnnnnnnnnnnnnnnnnnnnnnnnnnnnnnnnnnnnnnnnnnnnnnnnnnnnnnnnnnnnnnnnnnnnnnnnnnnnnnnnnnnnnnnnnnnnnnnnnnnnnnnnnnnnnnnnnnnnnnnnnnnnnnnnnnnnnnnnnnnnnnnnnnnnnnnnnnnnnnnnnnnnnnnnnnnnnnnnnnnnnnnnnnnnnnnnnnnnnnnnnnnnnnnnnnnnnnnnnnnnnnnnnnnnnnnnnnnnnnnnnnnnnnnnnnnnnnnnnnnnnnnnnnnnnnnnnnnnnnnnnnnnnnnnnnnnnnnnnnnnnnnnnnnnnnnnnnnnnnnnnnnnnnnnnnnnnnnnnnnnnnnnnnnnnnnnnnnnnnnnnnnnnnnnnnnnnnnnnnnnnnnnnnnnnnnnnnnnnnnnnnnnnnnnnnnnnnnnnnnnnnnnnnnnnnnnnnnnnnnnnnnnnnnnnnnnnnnnnnnnnnnnnnnnnnnnnnnnnnnnnnnnnnnnnnnnnnnnnnnnnnnnnnnnnnnnnnnnnnnnnnnnnnnnnnnnnnnnnnnnnnnnnnnnnnnnnnnnnnnnnnnnnnnnnnnnnnnnnnnnnnnnnnnnnnnnnnnnnnnnnnnnnnnnnnnnnnnnnnnnnnnnnnnnnnnnnnnnnnnnnnnnnnnnnnnnnnnnnnnnnnnnnnnnnnnnnnnnnnnnnnnnnnnnnnnnnnnnnnnnnnnnnnnnnnnnnnnnnnnnnnnnnnnnnnnnnnnnnnnnnnnnnnntgttgttattgctaccgcaaagatacaaattttcaagcaaatcgtttcttaataaataacactagtgataataattatctttatcaagatagtcgtttaatagactctcaaccgtctttgaataattaaagctaatgatgtcggcgttgatctcactttttgaagcaattttctcaaaattgattttctgtaaatctgtatggagataattttcaggatacatcaaatcgttccaaaactttttcttgtcttcttctgaaatggaggcactttgctgctcaacaacagaaagatactttcccaaagcaagattaatgtctcgataaaattctttgtatgcttctatatctgacacttctttagtaaatagccccaaagctatctctaaatccttccactgtatttcgcctttgtttattttttctttgactttggcaagaaataatctttctgttgagtctacactatctatatcggaggatagtttttcataatattttatgaaatcaggatatccagtaggcatccccattctcaaatcaaagccatttcccaaaataaagacgcaattagacatatagcctgtgtgttaaatagcaatcgcagtaatttttgaaaattactgcgattatttaaatagaatatatttatttacttcacctcctctaatctaatcatatttgagtatcaattagttgtgaatacttggtacaaatatgatgtatatattctactgaaaaccatcttgaatgttatcgcttagacacttataaatgtaactctttatgagcaatccactgatgacttcctggtttaaggactaatatatcgattggtccaccaacagatttttcacgcttctggaactttaaagtgtctattgttaccttaatcgcatattgagcaaaatcgatagcatcttggagtgtaaaaaagttccacattatttctacaggctcaccatctatgtattttccttcaactttgtacgctatattttgcattagtcggcttaaaatatccgtgataccatcccatatagctccttgtcttccgacttcattccgaggattcaccatttcttctgccgtaaaaacttggtaaacgcgttgctcaaatgtagagtcttcattttgaatataccctgcaactataaaatgtgtattcaaatgtgaatctattgcgtgaaaataatcgccaattgaatgggctattttatcaacatcatcttcattatgcagtcgtatgtaattttctataaactgcactattggtattcctaaaaccgatgcgtctccacatgttaggattccaacatggctgtttgtgacgaaaactttataagttgtgtctgaaacatgtatcgaatggtgatgaacttctttttctgggtgtccgtcttttccgatggttttatatgctgcattgaatgaactccggctatctccagccaaaacgatgccttcaccaacgtaaacgcttattactaatgacattttcttctatttttgattattgtatttcacttaactatatgatattctcatcaatcttgatgtagtggtcgccggacctgtgcttcagcttcttggcaagagtttctgttgtggtgttccagaaccaggcagggaaggtgtactgtgcaaactgtgctgccagtttgtttgggaggttgtactggttggcaatgttccaactgaggtttgccaagtcatgctgtgtgagttgctccttcttgccagtcttctcaatcttgattggaagcgtgggcacgacaacgccgtggataactaatgaaacaacacactcgctcacttggaacagttcttcgtcagtgaagtcgaaaggcatcaaggtttggcgcacatacgcctgaacctttgctaacttttcttcatctgccttttcttttatagcaacgaactgtttacgttctcttttacaagtctccatgaatctgcgtaggcgttcttcttgattgaggatttggttatgctcagccatttcttcaatgggagatttttgaactggcttttcaaccggatgctcggcgatgtatttctgtatcgcctccacctctatatgaggacggacatgcttttggtatgcctcaacataggaaagagctatctttgcacccgcccagaagcacaatcgaaggaatccatagaagcaaccaaacaataatattgctatggcggcacacgggatatatccccagtgatgcttaccgcatatcaggatggaaaatccgatagccaataatgcaagcaatacggaaatcgttatatgaaaccactttggcatattattctttcttgttaatgattacccatttgccctccttacgaccaccttcacgagcaaggatgcccttctttttaagttgtgccaagtcgttttcaatggtcctgtctgaaacagtaaacttttccgaagtcttttccgatgtcttttccgaagtcttttccgaaatcttttccgaaatagtctttgcggataagaatgggtcggcagaaatcatttcaataataactttctgacgttcagacaattcttttacgacatccttgttcagaacgaactgttcttttatgaaatccgggtggcacggaatgtcaatcagaaagtatgtacgttcttcatccgtctcaatggttgcctgtggagatccattggcctgtagttcatcctgaatagtaggaatgccagtagctcggccttccgttaggtctaattctttcaggaactctcccaacctacggttgcgataacgacgtgaacgtaacgatatacctttttggacagcctccatcgggatggtgtggtttgggccagaaaaactcagaatcgaaatacgctccggctcaacggtgatttcaactggttcccgaatcgtccaatctctatgatacagactattgacaacagcttcttccagagcctgataggggtagttgaagaatgttatggattgcgctctgtccttgggcttaataatctgtttcttgatgatgttagtgttcagatagcttaatgtcttctcaatcatctgtggcacactgcccctgatgggttctacctctatcaagttattgggattcttttctctaccttcagggaaaagaacaatttctatctgcgcttgacggaagaaacggtcaggccgttctgagaacatcattgctgcaacattcttgatgcgccatccttccggcacagcctctaataagtccatctgttccagcacatcttccatgtggtcggtcaatgagatgtcagccagactactcttgacctttaccagatagtcatgtaggagcaacggcgaaatgtcagtcaacttgatgtcatcgtttccacggtcatcaaagggcatccgattggcaaggtttatcagttcgcgctcgtattcgtctttcggaacgatactgctactattgtagcggatgtagtagttatacgccttttgcttagcaattatctggtcaggaaccttgtatggtctgcgctcaccaggagaaaccttgataacaagaatcgtctttccgtcaacctcttctatatacaatcggggttgatagtacgggcgcatcaggttattgtatccaaccatatccttctcgataggctctatctggttagggtctataccaataacaggtcttatggcatggccgttctcttcttgaactcccaccacaatatagccgccacctgtttcgtcaaagtcattggcgaatgcacagatggtacggtagatagcatcagggttccatcccgtcttgtattcgatgcggtcaccttctacagctcgtccgcttagaagttcttctatgttgattggtagtctcatattttcagctgtttgtttatcgctctttggttgaccaaagcaaatccttcacatccacattaagacttctggcgatttcaaccaaagtctctaagctgggttgtgaagcattggtgcaccacttgctcaccgaagcaggatctttccctaactgctcagccagccacttattcgtcctcttttgctctgccaaaaccaccttcagccgattgatgtcctgtgccattatacctatttatttctatttaaggcacaaaggtactgcttttctttgaaataaccacatatttttatggtattctatttttttatttgcgttttaagcaaatttaggagcgtattactcatattactgatattactcgtcttgatattattagccaaacataccacactatcaaagacgatgtggagcgattgaaaggttaatcggacaaacaaatgattcgtatcgtatgaaacttacaaaaatctttcttaacaatatactacacatacatttccccacgacatgggtaaatgggaacatttggggtataacaaacctactgactgtcggcttttgtcgtcaataatcagtaggtctgttttattgtcaatcttttaagatgaattttaatcctatatgagaacgaatctgtctaaagttgctttaattcaaaaaggatgaaaaatataggggaaaagaaagtcataagaaaagggaaccaagcaaacttggttccctttgatatagagtttaggtgttggacttacctgatgaacaacagttcgcggtacttgggcagtggccagaggccgtcgtcaacgatgagttcgagcttgtctatctggtagcgaatcttgtcgaacatcggggcgatggtgtcgtggtaggcgatggctttctgatgctcgtcggctatcttgttggcgaccttgcgggcctcgacaagctcctccacctgtgtttcgatggtggctgtgcgctctgctatctcctcgatgagcttgaggttgcgggcattcagttggctggccttctccttcgggaatacgcccgacatgcgctcaacgttcctcaagagctggctctgatagctggtggcgacaggaattatgtggttcatggagaggtcgccaagcacacgagcttcaatctgaatcttcttggtgtaggtttcccacttcacttcgttgcgagcctccagttccttctttgtcatcacaccgaggctctcgaacatacggatgctgtcctcgtcgagataacgctcgaagatgacggggcaggaagtttctgtgtccagtccacgcttggcggcttctgccttccacgcgtcgctgtagccgttgccatcgaagcggatgggcttgcacaccttgatgtcctcgcggaggatgtcgatgatggcgtggtaggtggcgttgtggcctgaatgctcaaaatcctttgctgtctcttttatgcgggcatctacgcgcttcttgaacgaaacaagtgcctcggctactgcactgttgagcgtaatcatggcgctggcacagttagcttcgctgcccacggcacggaactcgaaacggttgccggtgaaggcaaacggactggtgcggttgcggtcggtgttgtcaatgagcagttctggaatctctggaatatcaagcttcatgccctgcttaccatccatggagaagaggtcttccttgtcggccttctcgatatggtcgagcagttcggagagttgcttcccgaggaacgagctgatgatggctggcggcgcttcgtttgccccgagacgatgggcattggtggccgacatgatgctggccttcagcagtccgttgtgcctgtagacgcccatcagcgtctccacgatgaaggtggcgaaacgaaggttctgttccgccgtcttgcctggtgcatggagcaaaacgcctgtatctgtcgagaggctccagttgttgtgcttgcccgagccgttgatgccagcaaagggtttttcatgcagcagagcacggaaaccatgcttgcgggccacacgcttcatgagcgacatgagcagcatgttgtggtcaacggccagattcgtgtcctcgaagataggagccacctcaaactggttgggagcgacctcgttgtgacgtgtcttcacagggatgccgagcatcagggcttgtatctcgaggtctcgcatgaaggctgccacacgctcgggaatggaaccgaagtagtggtcgtccatctgctggttctttgcagagtcgtgccccatgagcgtgcggcctgtcagcagcaggtcgggacgtgcggcatagagtccttcgtccacgaggaagtactcctgctcccagccgagattgcttgtcaccttcttcacagccgggtcgaagtaatggcagacctcagttgcagccatgttgacggctttcaaggcacgcaggaggggcgccttgtagtcgagcgactcgccgctataactgatgaacactgtggggatgatgagtgtgtcgtcgatgatgaagacggggcttgtggggtcccatgccgagtagccacgagcctcaaaggtgctccttatgcctcctgaagggaacgaggaggcgtcaggttcctgctgaacgaggagcttgccgctgaattcctcaatcatgccgcctttgccgtcgtgctcgatgaacgagtcgtgcttctcggccgtgccttccgtgaggggctggaaccaatgcgtatagtgcgtcacgccgttctccttggcccacgccatcatgccggcagccacagcatcggccacttggcggtcgaggcgagcgccattgtcgatgacatctaccatcttattataaacgtccttcggcaggtacttgtacatcttctcgcggttgaagacgtgcttgccaaagtactcgcaaggtctttcacttggtgcttttacgtcaagaggcttcttcttgaacgcctcgccgacaacctgaaatctcaaatcgtttgccataattgtgttttgttaaagggtgaatga

SEQ ID NO: 613 - DNA, 24494 bp, synthetic construct
  misc_feature 1..24494: note = Synthetic
  source 1..24494: mol_type = other DNA
cgttcagccgcttgtagttttcgagattgtcggtgggatccaccttggaatccagatagccgaggtctacgttcagcacccgtgcgtcgccactgccgagcgcaacgcctttccccaaagagaacaacttgctgtagccgtcggccttgaagcgggccgagagcggcattttgcggcgtatcttcctgatgttcacaatgccgctggtcaagttgccgtattccaccgatggtattccccgtatcacttccacgcgctcgatgtcgtcggtgcctatcgtgcgcatgtcaacgcccttgttggtgatgttgcgatagttttcggccccgctgcccgaggtgacgtgttgcgtgtccgaaagcggggaaaactgaaggttggcgtcggtgttgatgggcgttccgtccacgacgaactgcgttccgagcgacgagatggcaaaggcgttgttgtgcgacaaggccccgccggaagtcatgttgcccgtttcgcgcagacttatcgtgttggccacgcccatgttcgggtctttggagtagccgccgggcagcagttccatcaggtcggccagactgttgggttgcagctggttcatcgcgtcgcgcccgatgatcgacctggtgacgaggccctgcgcctccttggccgtgaccgtcacttcgctgaggcggaggttggctttcaggctcacgttcaacgtcgtgttcttggaaaacgtcacggtgcgccggtaaggctcgtagcccacatagctcaccttcatcacatagctttcgcccgccaccaggttgatggagaagcggccgtcggcattggccagcgtggccttggggtgcttgccttgaaacgaaactgtggccatggcaagcgcagtcttgtcggtggcgtcggccacgacaccactcacattgacatgttgctgacccgcgcaatgcagcgaaagccagcagcacaacataatgaaaataaatcttgaacccatcgggaaagtatacaaatgacgaaaccggttcttatggttgcaaaagtaaatcgattcaaaaccatcaacaatacctaaaaatgactattttctgttgttggcaatcatcaaatggagaggcgcagcgtgattcttcacgctcctacggcccacgccattcgcagagacggaaaattggggctcggaagacgtcaaaacaaaacatttgtaaaattccgaggctcggaagacgtcaaaacaaaacatttgtaaaattccgcggctcgggaaacgccaaaacataacgtttgttaaattccgcggcccgggaaacgtcaaaacaaacggcggcggactttccgctgcccgggaaacgccaaaacaaacggtgggacggaaaaacggaggcggtttttgaccattccatcacatgaaaggcaatttggcacggcgaaagagaacaaatcggtgcggacaggccatattcgcctgcccgctctggccaacgacgcccattcccgctacatgtacatgaaggacgtgctgtcgggaatcccctgcccgtcgtggaacccgcaaattgacctgcattaataattcaaggggaaatggatcataaggttgtcgttggtggggcatgagagaatttctttgtaattttgtggcggaaaatttcttttcaattcatatcggcatgattattacgatagcacggcagtgcggttgcggtgccttggaggtgggcaagctcctggccgcacgttacgacatccctttttacactcggaagagtctcatgcagatggccaaggacaacggtgtcctgggcaagatgcacgacttcttcgaggagcggcccgtcgacgaactgatgtatgccatctcggcgttcgagaacgaggagggcaacgacgagaccaaccatcattcgatgcgcctcttggccaatctgataggccggcgtgactgcgtgatcatcggccgttgcggcaactacatcttcagaaacagggccgacctggtgtcggtgttcctgaaagggaactttgaggagcgtgtgaaggcgatggcgcgctgcgacaacatgagtctggcggaggcggaagagttcgtgcgcgagaccgacgacagccgcgtgcgctaccacaaatactacacgggactgacctggggcaatgccgacgactacgacatctgcttcgacagcctgcggctgggcacggagaagacggcgttgctcatcggggagtatgtcaaggatgttggattgtaaacagttgaatatgaaattcgtaaagcaattcttgctcatccttcttttttcctttctcggtgaacttcttcattacgtgattccgctgccctttccggccagtatctacggcattgtgttgcttttcgctgcgctgtcggccaaggtcgtgaaggtgaaggacgtgcgcgaggtgagcgttttcctcatcgccgtcatgccggtgatgttcattccggcggcagtggggctgatcgacgcgtgggacgacatccgctccaacctgttgcagtatgttgtcgtgacggtggtcagcacgttcgtggtgatggcagcggccggttgggtgacgcaatacgttgttaaaggcagaaagggaaaagagtaaaagggcctttggaaaagtaagaaagtaaaaaggaaagacgatgatgaaagagttgttggaggggtcggtttatttcggcgtgttgattagtttgggttcctacgccatcggcatgtatctgcgccgaaggacgggttgttcgttcgtgaatccgttgcttgtctccatcctgttggtgatattggtgctgttgttcgcaggcgtcagctatgaagattacaacgcccaggcctcgtggctgggctatctgctcacgcccgccaccatctgcctggccgtcccgctgtatcagcaggtggaactcttgaagaagaactaccgcgccatcctctccggcattgccgccggtgccctttcgagcatgctttcggtgttgttgctggccctcttgttccgcttcgaccatgcggcctatgccacattcctgcccaagtccatcacgacggccatcggcatgggcgtgtccgaagagctgggaggctatgtctccgtcaccgtcgtggccatcatcgtcaccggtgtgctgggcaatatcttcgccgaacgcttcctgaaactgatcaaggtggacgaacccatcgccaagggtatcgccatcggttcgtcgtcgcatgccatcggaacctccaaggccatggagatgggctccgtcgagggagccacgagtggcctctccatcgtcgtgagcggtattctgaccgttgtcggcgcctcgcttttcggtctgattctgtgaaaaacggctgatttgcacgtgacggatggcttatggcatgtcgtttgcatagacaagtatcaaaccctttaacacttttataatggcattaggaaaatggataggcgaatttctcggtttcatttcgggcggcggagaagaaattccaggccatcaacgaagccaaggaacgcatcttcaaggcccgcggcatggcgtaagggctattttagcagccaatataaaagggtgaaaaggtgaaagggtgaaagggtgaaagggtgaaagggtgaaaaggtgaaaaagtaaaaagaagacatgaaacgatagggaaaaccctatcccatggtaggggaattgcgttggcgattccctgttttcgttctacttttgcaagtggataaaacgtttatatgatgaacaaaggtatcattgcagtcatgggcgcagccctcttgttgagcggttgtggcacttatacggcagaaggagcctataccggttccacacttggttcgatattgggcagtgccatcggtggtttgtccgatggtccgaggggctcggacgtgggaaccatcgtaggaatggtgggtggagcggtcgtgggagcggctatcggcaatgcagctgaccgtcaggctgaggccgaaatgatagaacatagggaagccgtgaagcaacggcgggccgaccgcgaccgctatgattacgaccgccggctgcctcagaccagctcttctgccgacccgtatgacagcggctacgaccccaacaacggtggcgacgaccgcatctacgatttcgacagtcccgattataccggcgactacagcgcgcagaagcctgtcgaggtctatccgaaccgctcgaacatagacaaaaaggccgacacctatcgttatacgcctaacatcgaaatacgcaacgcccgcatcgtggacgacaatcaggacaacgtgatttcgcgcggcgaactttgcaaggtgattttcgaggtgttcaaccgcggcaatacgaccctctacgaccttcaacccatggtggttgaggccaagggcaaccgccatctctacatctcgccgagcgttcatgtcgagaaactgcagccgggcaaggccatacgctacaccgccatggtgaaagccgacaatcgtctgcgtgacggaatggccaagatttgcgtttcggtgctgcaaggcaccaaatcaatatctaaggtttgtgagttcaatgttcctacgagaaaataggaactgcggtggaaaaacaaaattctctcaattatatttctcgctcatgaggcctgtgacctatggttgcaggccttttcaatagttgtccaaggctttcttgatacgttctttccgtgtcggtttgtggtggtcgacgagcaacttgtccacgccccacacaataagtccgagcaggttggggcctcccctcatcggtcgcgacagggcaatctcttcttttgtcatgggcttgaagagttcgccgcgacgctggtggcctatgacctccacgtcggacaacgtatgtatcttgggtatcagcatgatggtgtcctgcttgaagtcctcccggtccatccgtcgtgggtaatacttgccgtgactgatggtgatgcggttgaaattgcggctgctgaggatgaactcgccccgccagttggtcttcaccgactggttgccgtcggtgtagatgttcacgtcgcgcaagggagtgtgggtgatggcgtcggcaatgacgaaagtatgctcgccgctttgggacgcaggttgttgagcctgtgccgtagaggcgaggatcgaaaaagcggttgtcagcaatgtttgggcatttctccacatggttgtgacggcttgaagatggattccgccgacaaagatagaggaaaaacgggaaagcgtcacgttaacgacaaccaaatagatataatgtcgtttaacgtccgcagcatgtcaaaccatgttcttttgcaggttggccaggatcacaccggccaatatcatgcccgaaccgatgtaggcgatggtcgtcatgggctcgtcgaggaagatggcgctggccacgatggtggtcagtggattaaggtaggtgtagttcgttgtcttgagtgcgccgagcttgtcgatgacccaactccacagcgcaaagcacaggaaggaggccacaatgcccaggaacaaagcgttgacatagatttccggtttcaggaaatcgcgcagggggaactgccatgggtcgacggcgaacaccggcaacatggtgaccaggccgtagaagaacaccttgcgggtgaggaaggcggcattgtagttcttgctgacctttcggatgagcaggctgtagacggcccagctgaccgaagaagccagggccagcaggtcgcccacggggttcaggcgcagcacaacctggccgttgaagatgacgaggcccacgcccgccagcgccaggatggagcccgcgatgagctgccagcccgccttgaactccctgtagatggccagggcgaagagcgtcgtgatgaggggagccgtcgaaacgatgaacgagacgttgttgacataggtcagtcccacggccatgttctcactgacgaagtagagcgagccacccgttatgccgagccccatcatccggagttcgtctttccagttgtgacagaacagccgtttgggtgatatgaaccagatacagatgtaggccagcaggaatctgaccacgaaaatctccgatggactcatgccgtggagaatcaaaatcttgctgttgatgaacgtctcgccccaaatcagtgccacgatcagcgcgatgagatgaaaccaaaagtgtttgttgttctgcataattatcgcaaaaatataaacaatcggccatatatcaaacctttattcgttattttttcaactttgcggttattttttcccgttcatgtggtcggctcttcaagcgggtaggttgtcgatggtgggcgtcggcgagtattcggcggtgaatggaatggcataaacgtattttatactacataatggatgaatcctgacttttatttatacctttgcatcccagtatgcttcatatttgtaaaagttatacggatattcttaggataagtatgaaaaaaactgcaaactattttttgtcccaaaaaggggagcggcggctgaccatgctcacggcctacgactaccatacggcatgcgcgattgacgaggccggtatcgacatgattctggtcggcgactcgttgggcaacgtcatgttgggctacgagaacacgctggccgtgaccgtcgacgacatgatacaccatgggaaggccgtctgtcggggcgcccgcaacgcgttcgtggtggtggacatgcctttcatgtcttaccagacatccatttatgacgcggtgaagaacgccggacgcatcatgaaggaaaccaactgtcaggccgtgaagctggaaggaggggcaggttatgccgaccgcgtgcgtgccattgtggaagccggcatacctgtagtgggacatgtcggccttaccccgcagtcgttcaatacgctggggggctacaaggtgcagggcaagactgcccaggccgcccagcagctgctggacgacgcccgtgcgctggaagcggccggggctttcgccgtcacattggagtgtgtgcccgaggccttggcgcggaaaatcacggagcaggtgtcggccctgaccatcggtatcggggccgggaaatactgtgacgcgcaggtgttggtgtatcaggacatgttgggctatgccgacggcttcacgccgaagtttgtaaagaagtacgccaatcttcatgacaccatgctcgaagcgttccaccgctataaggacgaatgtgagtcgggggctttccccgccaaggaacatacgttcagcattgacgaggatgtgttggaaaaattatattgaacattgttttacgaaacgccgtcttgccgttgcggggcgacacagattaacgataggataaaatgcaaatagtaaagacgatagaagaagtccgtgccatcgtttgtgcgtggcgtgaggccgggctctgtgtagggctggtgccgacgatgggcttcctgcacgaaggtcatcagagtttgatcgcctgttcggtcgccgacaacgaccgcacggtggtgtcggtgtttgtcaaccccattcagtttggcccgacggaagacttggaggcctatccgcgagacatagaacgtgacaaagccttggtcgaagccaccggtggcgacttgattttcaaccctgaaccagtggagatgtaccctccccacttcacgacatttgtcgataccaccgagacgacggagctgttgtgtggcgctcgacgcgccggacacttccgtggcgtgtgtaccgtcgtgagcaaactgttcaacatcgtaggccccgaccgtgcctatttcgggcagaaggacgcccagcagctggccacggtgcgcagattcgtgcgtgacttgaatttcaatattgagattgttgcgtgtcccatcgtgcgcgaggaggacggattggccaagtcgagccgcaacacttatctttcgaccgaggagagaaaggccgcgcttgtcttgtcgagaagccttcggcaagcccaggctgccgtggaaaacggggagcggagggccaaggtcgttgtggacatcattgccgactgcctgaagcaagagccgttggcacgcgtggattacattgaagtggtggatttggacaacgtgcaacgtgtggaaaagatagaagaaaacacgttggtcgccatcgccgtatatataggaaagaccagacttatcgataatttcatatggaagtgacactgctgaaagcaaagatacaccgtgccgtcgtgacgcaggccgacctggactacgtgggtagcatcaccatcgacagcaaactgatggctgccgcaggcattgtggaatacgaaagagtggagattgccgacgtgaacaacggcaaccgtttcgcgacatacgtcatcgcgggctatccaggctcgggcattatctgtgtcaatggcgcggcagcccattgcgtggaggtgggcgacaagctgatcatcatggcttatgcgtccatgacgccggccgaagccgctacccatcatcccagagtggtgtttgttgatggtgataactatattactcgtcaggcaagctatgagcggcacggactcctcagcgaacaggaatgaagaagagaatatgatgttgaaagggaagaacgttgtgttgggcgtgtcgggcagcattgccgcttacaaggctgccggtctggcttcgacgcttgtcaagttgggggcggaggtcgacgtggtcatgacggcgaacgcgtgccggttcatatcgccgttgacgtttgaatcgctgacgtcgagaaagtgtataattgacacattcgaccgcaatttctcttttgacgtgcgccatgtgtcgttggcccgcaaggccgacgtgctgatggtggcgccggccacggccaacgtaatcggaaagtttgccaatggcatttgcgacgacatgctttcgaccaccttcatggcttgccgctgtcccaaaatcgtcgcgccggccatgaataccaacatgtggaccaatgaggtgttgcaagacaatctgcgaaagctcgtgcattacggcacgtcgatcgtgcagcctgccgagggacggctggcctgtggcgacgtgggaagtggcaaactggcttcggaagaagaactgctacagcacatcctgctacagataggtttgccgcacggcatgcagggcaagcgtgtgctggtctctgctgggccgacgcaggagtccatcgaccccgtgagatacatcaccaatcattccaccggcaagatggggtttgccttggcgaagatggctcggatgagaggggccgaagtgacgcttgtcacagggccggtcagcttgtcgccgttccatggggtggagacggtggcggtgacgacggcgcaggaaatgtacgacgcggtgacgagcaggagcgacaacttcgacgtggtggtgatgtgtgccgccgtggccgactatacgccccacaatcatgcgccgcagaagatgaagaaaggcgaaggggatttgacgattcgcttgacgcgcacccgtgacatactggcgcatttgggacataacaagcgcgacggacaaatcatcgtcggcttttcgatggaaacggagaatctgttggacaactcccgcgcaaagctggtcaagaagcaggtggacatgatttgcgccaatacagtcgcgtcgcgggacaccggctttgcggtcgataccaaccaagtgacacttgtcacggatgacggcgttagggaactgccgttgtgcagcaaggacgagacggccaacctcatccttgatgctattatggaacgcttgcggcacatcgcgtgaatccgcccttccgatttccaatgaaactttgattggttgaacgttcattggaaatctcatggagagcctcaagcctgtgtagatgatggttttggggtgatatcataaagaaaggcgagttgccccgccttgtttgttttcacaacggaataatccttattgtgacttgcttgaaaacagccgcaaatataaacaattaataactaagaaccaaataaaaacagtagaaaaatgaaaacaattcttggattagacttgggaaccaatagtattggttgggctaaagtctctgttgacgaccatggaaattacttgcatgacattaaattgggtagccgcatcattccgatgagtcaggacatcttaggcaactttgacaagggagtgacggaatcgcagacggctattcgtactggttttcgaagcgttcggaggataagggagcgttcgttgctgcggcgggagcgcttgcacagagtgttgcacgtgatgggatttctgccccctcactacgattccgcaatagggtggaatagggaagaagcctccacttatggcaaattcctcaatcatggcgagcccaagttggcctgggaacgtcttgaggatggctccatgcgtttccttttcatggactccttccacgaaatgatggccaatttcgcccgtcatcagcctgcattggtggctgacggaaggaagatcccgttggactggacactctatttcctgcggaaaaaggccctctcgcaagctgtcggcaaagaggagttggcgtggatactgcttaacttcaatcagaaacgaggatattatcagctgcgcggggaggaggaagaagaaaatccaacgaagcgcgaggaatactatgagctgaaagtagtcagcatagaagtcgcagaagaaggaaaagggggcaatacctggtatcgtgttcagttggaaaacggatggatatacccctgtcccagcaagatagccttggatgattgggtaggaaagatcaagcagttcattgtaaccaccgagtatgagaaggacggaacgactctcaagaaagataaggacggtgaagtcaagcggtcgttccgtgcaccggatgaaaacgattgggggcttcggaagaaacgtaccgagtcgcagttggaagactcgggcaagaccgtcggtgcctttatctacgaccatttgctggcagaacctgtcgataagattcgtggaaacttcatccgtactattgaacgcaaatattataaacaggaactggaagctatcttgcgtgagcaaagcaagcatcacgaggaactgcaaagcagggaaatgctggcaaagtgtgcggaagaattgtatcaaagcaatcaaccccatcgggacagcttgatgaagaaagacatggtttacctgcttctgaccgaccttatcttctatcagcgtccgttgaaaagcaagaaatcgctgattgccgagtgtccttacgagtattataaatataaggataaagagaaaggaaagaaaaaacggcaaggaatcaagtgtgtcgcgaagtcgaatccctattatcaggagttccgcctgtggcagtttatcgtcaatctaaggctctttgacaggactgacgacaaggaggtgactgccgaatatctccgttcgagggaagattacgcccgtttgtttgcttatttgaacgaccggaaggaaatcaatcaggagacattgctgaaggatttctttggattgaagaaggtaaagataggtgccgaaaaagagtttgccatccgttggaactatatagaagacaaggagaagaagtatccctgtaatgagacgaggcacgaactgcttcttgcgctcgacagagcaggcatggatcgtagctggctcgacgattcggaacttcaatacaggctttggcacttgctctattcggtggaagccagagacgaagccgaaggtgcgctgcacaagctaagggatgatgacgagtttgccggtgccttcctgaaggtgaaacccttcaagaaagattatggagcctactcggagaaagccgtgaagaagctgttggctgtcatgcgtatgggcagttggtggcacgaggaggatatctgcaagcagacaagagatagaatagaacgtattgtgcagggagatatagaggagaaaatacgagagcggatgggtcatgcggcttattctttcagccatcttgccgatttccaaggtctgcccgaatggctggcgtgttatgtcgtgtatggtcggcattcagaggcaacgcatatactgcgttgggactctccggataaactgctgtcatacattaaaggcttcagacagcattcgcttcgcaatcctatcgtagagcagtgtatcctcgaaacactccgaacggttcacgatatatggaaagaagcaggacacatagatgagattcatgtagaacttggacgcagaatgaagagtacggccgagcagcgtgcgcacatgacgaagaatatattgagaaatgaaaacaccaatttgcgcatcaaatgcctgttgatggaacttaaaaatgatgctgacgtcaaggatgtacgcccttactcgccaatgcaacaggagatattgcgtatctacgaagaaggagctttgcagcagttgaccaaagatgataccgagtatgcagagatttccaagatatcgaagatggcacaaccttcggcgaaagaacttttaaggtataaactgtggttggaacagaagtatcggtcgccctatacaggaaagtccatctctctgtccaagctctttacttcggcctatcagatagaacatgtcattccgcaaagccgttacttcgatgattcttttaacaacaaggtgatttgcgagtcggaagtgaatacgctgaagagcaatatgctgggctatgagtttatcaaaaatcatggtggcgagattgtccactgcacgatgctgggcgatgtaaaggttttcagcgagagtgaatacaagactttcgttaccgaacattattccaataacaagtataagaaggagaaacttctgctggaagatattccgcaggagttcctgaaccgccagatgaacgacagtagatacataagtaaggtggtgaaggggttgctttcgaatgtcgtccgtactgaagatgaattggaagcaacgtctaagtttgtcgtttcctgcacaggtgggattaccgacaggctgaagaaagactggggactgaatgatgtttggaacagcattgtttattctcgttttgagcgactcaataggttgacaaagtcagaaaactttggacattgggagaataaggaagggaaacgggtgttccagacctctgttccgatggaattgctgcctggtttcaacaagaagcgtatcgatcaccgccatcatgctatggatgcgctggtgatagcatgtgcctcgcgcaatatcatcaactacctgaacaacgagtttgctaaaagtccaaagcagcgggaagacttgcgtcagttgctttgcgagaagaatcgtatcatccgcaagccgtgggaaacattcacgcaagatgcgcgtgcggcattggaggatgtggttgtcagcttcaagaattatgttcgtgtcatcaacaaagctaccaattactatgaacggtacgatgcagacagcaagaagacgatggtgccgcagaaaggcaacgagatgtgggcggtgagaaagccaatgcacaaggagactgtcttcggacatgtcaaccttcgccggaaagctgttgtcaagctaaaggaggctttggaaaacatctcttctatttgtaataaggagctgcgcgactatattaatgtcttggtggataagcaattcaataccaaacagttgcttgctcatttcaagagcacggattaccgttggaacaagcagtatatagataaggtggaagtgtggcgattcagtgatgaaaaagagcctatggtggcaacgcgaaagttgctcgacacctcattcgataaaaagcgcattgacgcaatcaccgatacaggcattcagaagattcttcttaactatcttgaagctaaaggcggagaccctgccattacctttacaccagagggaattgccgagatgaaccagaacattgcagtttataatgatggtaaaaagcatcaacctattctaaaggttagagttgcagagactatgggggaaaagtatcaagtaggagaaactggtaataaggctgataaatatgttgaggctcagaagggaaccaatctttattttgctatctacgaggatgaggaaggtaagcgaagctacgataccattccgttgaatgaggtaacagaacggctgaagcagggcctgtctcctgtgccggagaagaacgaaaaggaggttcctttgaagtgctatctgtcgcccaacgacttggtgtatgtgccaagggaagaaaatggtaatgaattggacaaggaaagaatctataaatttgtagattctagcggtacaactgcgaattttattcctcacaggtcggcggggcttatttataatgtggataagaagatagcggagtctttctgtaatggtactattattcaaaacgaatatggagtaggtagtccacaatcaaagaatcaaaagtctttgacaggtgaaatgataaaggccgtgtgctggaaacttgatgtagaccggttaggaaatatcctcagagtcataaagtaaggctgtcttgttatgataaagaaaactctttgcttcaccaatcctatctatctgagtctacgcaatgcccagttggtgttgcatttgcctgaagtagaaggtaacgatacactgcccgaaacgctgaaaaaagaggccgagcgcaccatcccgatagaagacattggggtggtcgtgctcgataatcggcgcattacagtaacctccggagtacttgaggcactgttggcaaataattgtgcggtcattacttgtgaccaaaaaggtatgcccgtgggtttgcttcttccgttatgtggcaacaatacgcaaaacgagcggttccgtatgcagttggaagcttctctgccattacgtaaacaactctggcagcaaactgtaaagcaaaagattctcaaccaggagcatgtactacgaactaatactgacaaagagaccaactgtatgcgagtatgggcaaacgatgttcgtagtggtgattcggagaatctggaagcaagggctgccgcctactactggcgtaatctttttacggactatcctgattttgttcgtgggcgggagggtgcaccgcccaacaatcttttgaattatggttatgccatcttgcgtgcagtgatagcccgatcgctggtagggagtggcctactgcccactttgggaattcatcatcacaaccggtacaacgcttattgcttggcagatgacatcatggaaccctatcgtccgtttatagaccaacttgtcattgacatgattcgttgcaatggcgaagtttcggaaattacgaaagaacagaaaatgcagctcttggcgattccgatgttggatgttgtggtgaatggcaagcgaagtccactgatgatagctgcgcaacagacgacagcgtctcttgcaaaatgctttgctggggaagcccggcacatcagttatccggaaatgtaactgtttatgtccagtttcaatcgcctcagcgaatatcggattatgtggattctcgtatttttcgatttgccgacggagaccaagaaggaaaagaaagcctatgttgattttcgtaaatccctgcagaaggacgggttcactatgttccagttctccatttatgtgcgacattgcgcaagtatggagaatgcggaagttcatataaagcgtgtccgtgcgtttctaccaaagcttggaaaggttgggattttgtgtattaccgataagcagtttgccaacatccagcttttctatggtgaaaaaccgaagccccctaatgctcccggtcagcagctggaactgttctaatcttcaattgatagaaaacgaaaatcccacccttggcaagtgggattttgttttgtagtatcacttttttatttttgcaatatctatatattgtattggtaatcaatattatatagataatcagttgttgctgatactgcaaaggtagttgttttcaagcaaatcacaacatttcggcaagttgggattcaagggcggcggttgttgctgatactgcaaaggtagttgttttcaagcaaatcacaactgaaccttgtgtgcctcctgagagcaatggttgttgctgatactgcaaaggtagttgttttcaagcaaatcacaacggaactacaaggattccagaggttaccaagttgttgctgatactgcaaaggtagttgttttcaagcaaatcacaacggctggggaacttggctacgtactgccggagttgttgctgatactgcaaaggtagttgttttcaagcaaatcacaacatgtcgggaatggtattgtgcagagcatggttgttgctgatactgcaaaggtagttgttttcaagcaaatcacaactggtcatagaactggccattcgcagttgctgttgttgccgatactgcaaaggtagttgttttcaagcaaatcacaacatgtcgggaatggtattgtgcagagcatggttgttgctgatactgcaaaggtagttgttttcaagcaaatcacaactggtcatagaactggccattcgcagttgctgttgttgccgatactgcaaaggtagttgttttcaagcaaatcacaaccagtccgttggcagccgaagccgaccttgcgttgttgctgatactgcaaaggtcgttgttttcacgcaaatcacaactgatgtgcgggtttactttcatgaagatgatttgtcaaacgtcgtcggtatcttgattgtcttttagtagcatgagtgcaaactgatgaatctttggtaaaaaaaagttcggtgcaaagccgcgaaagtacgggcgtcgccctccgccaactttcttaattctttctgattaaagttcatgctttcctttctactcttttaataagtcggtttctcatgacaaaaatacctaaaattagattggcagccaaacacacacactttcgtccagatttccgatgaaataagcatatagtgggaaggcacagtatctccgtcttgtcaagtagattcgtcagaagaccatacatcggctgtctgataaatgtgtactttgttcatgactctattgatttgtaatcgccttttgagtatggtaatacaatattgcaaccctccaagaaaagaaacagaccatactttcccaaagaaaatggaaaatgtccattcagttggcacctgacccaaaagttttatatatttttgcattgaacttgtggtatgattcaaatatccatagtttccaacctaatcaatcccgcatattatgcccacaaagatcgttgcactcgacatcaaggagagacatcctaagttgcttgattccaaaaccgatttcatatatgcacgttttggaaaccagctcctgaccattctccgccagcaactccctgacaacacgatagaagacaacatcgacattgccctcacgctctatatggaagacatcattgccgagagcggattgtggcacggctttgtgatgaggcacaaggagctttacgggaagtatcttcctttttatcccattgatgaagacgaatatttcctcaacgattccaacgtcgaagacatccagtttctcatctgaaactatttgtccctcaatgaagggaaactcattcatcccataagcccatttattctctgtgcgccacaagtagtattcaatttctgtctgaacagcttcgagacgttgcctgtcaatgaagcgctgcacgactatttccaccgctgcgcgttcatggacgacttcgtcacgatgcgcttcacactggagtggctgcttttcgacagctatctcactttcaccccgcaactcgctgccaaatatcagaatttacatcaacatctatacgaaaccctctatgcggaaacggacaacataaggcagtccatgtacatggcaaacagcctgagcgttttcttgtttagggttggtcttttggcgctttatcccagcgaatggctggaaaacatcctaagagccaactgacaagacaagtatgccgcacgtctctcaagcattttctttgataatatcaacatctataaagtcatagaagaacaggacgatggcatactcttcgaattgagtgacggcaaggaacggtttgtggaatacgcggctttgaacctcaagcgcggcgtgatcggaaagtcaaagaagatcatcatgtctcttgtcttttatatggacagatgggagttgaacggtgtcatgagcatgttgtccgatgatgacgacaagccgctggcggaatcgaccgaagacacggacgccccatccaccataggcattcccaactacaagaagctgatgaagctgtcgggcaacagtccgctcttctattttaaagatgaaaaagaataccttgacttcctgaggaaggacatgggactgaaaaacgtcgatgcgcaaatcggcatgttccaaggtgacggtgaaaacatcgtagcgttcatccccagtccgtcaacaggctttgagacgtgttccaacgctgcgcaatgtatctgtgatgaacgaaatccatactacgttgccactaccggcatagacgagcaatggaacctattcgtctcactttccacccatgaaatgctccaatatcttttcgagcgtgacatgctgcctcagctccgcttcccttgtccgccgggattggaagcagaaagccacaagatagtcgtagagaactgggattttctggaacggaatttcaagcgtataaactattagaaatcatgaccaaaaccaaactgagaaagaaacttgaggcacttccgaaagaaaacgtcatcaatgtcgtgatggcactctatgacgccagcagggaagccaggatgtatttggacttttacaccacacccaacagtctggaagagggcaaacgcttcaaaaaaatcatccgccgcgagttcttccccgagcggggattttccgaacgaccttcatttgccacatgcagaaaagccatctccgatttcaagaagatgaagcctcagcctctatatctcgccgacctcatgatttattacatagaaaacggctgcgaatacacgatgaccttcggcgacatgtgggagcaatactacaccactcttgaaaccaactttgaaaaagccatgaaatatattattgagcacggactgctggccgacttcaaagaacgcgtcgaacgcatgctcaacgcgacggattgcggctggggcttttcggacacgttgagggatatctacgcggagtatagcaggtgatattgccgtaacatggggccactttgccatactcgtatataacaggcggatttacaatgcggtgaaagccgccatcaaaccaaagatgatacctggcgtgttcgcaatggcgagaggccaatccctcttctctttgaacagcccgtagcccacccacagcgtacagtttactgctgccataaacggttggatgaaagtccccttttgtccggacaagttgttttcgatttgcggaatatagaacacatacatcaatacagatgttaccattccaatccatcccagtgttgtgaaaaatcgttcctttgtcatcattgtcaaatttcaagtaggtagataccatgaatgtccactccctttttctatctaaaattcgccgctttcgtcgcatgaagatgctacacatttggcgtaacaaggtggagtttcatgattttggaatgcaaaactaagacttcggatagagatatgcaaattttaaaatgcttttttcacatctctttgcggactacaagaccctcggctttcgcttcagtttgggagaacgcatggaataagatggcgtcccatatctcggaggttgggaaatcagcttcgcaatctcgtccttttgtacttcttgtttcatgagttgctcaagcatgtcggcgtagagctggtgtatgctgccgtctttgcggtcgggccaattataagcaaggtagcgggcgtactccaagcacttcatgttccatgcgtgcggactttccttcaacgcatgacgcgctctgccaacgaggaacttcaaccggttcattatttccgttttgttctgaacggtgtctgctagtagagagtcgatgtgtgcggcagcttcgtcaaacttcatccgattcatgtcgttttctatgcgaatgaatgccagattgaactgtttgccttcaaagtcgcacaatctttctatctcgctcggcttgccatatttggtctcggcaaagagtttggcgtccaccgacttttttgaatacagacgacagtagtcctcgtagtttcgggaaacgtcctgaagatatggcgtcaggccagagatggcaacgacaaatgctttccacaccatactgtcgcgcaacgtgtggcctgtttcaatgagctgattaaatgcccgacccacggcctctctgtcgtgaacagcgtgcttatagtgtatgtaattcaacagaaagtccttgtcgcgcttgcctttttgataggcttccgtcaaataagtggaatgcttttcgggaaccaacgcgcccttgcccgtctctatgaacgtttcaggagtttgcgtactcgaactcacatgcaccgcttgctccgaatcgggattgatgaagcaatacgtaggatagaggcgtacatgatacttggacgcaagggcgactccctcgccgtgctccgcatctatctgcacacaaatgaaatggtcgttgtagaaggctcccacctcgggcagcgagaatacgttttcgaccatattgaggcaggggccgcaccattgggtgtagaagtctgcaaagacaagcttatgctgcgacttggccatttgcagtatctcgtgccatccgcgtcgttcgaagtgaatgccaccgttgcctccatgggctggaatgcaaagctgttgcaggaaaaaagcaaccaacaatgggaatgttctcaatcgtttcatgtctcaatccactaaatattcatcgttacgtccaaatgtcctatacttataaatgaccaacggcttgacgccacagacgcctgtatacttgttcaacactttaggcttcgctccttcgagactcacctcgacgatatcgcctttgagttcgtcacccttcccttgcgtgtcgtcgccatatcgggaaacggctatcaccatctttttctcattccggtgcaggcaaatatcagagataacggcttccttggaataacccaattcttccaaagagataattctatccgacgtattaggtgctattccggaagctacattgaggatgttgtacttatagattcctttggtcgtgttgaaatatacgtatggcgaattgcgcagcatgaagaatctggaggatggcgacgcttccgttgcatcaacagaggctatatggttttggctctccgtgttgaaagtggcaaagcgcaccttcccttccttctccatggcggcaaagcagaatcccatctgatacgtgtcttcaccatagaaagccttgtagccggggaaggatacgtcgggatccacggcggtcagttcaccggaagagaacgtataaaagacgccttggttctcatcgaacacacattccatatcggttgtcgtccagcctgcgttcaggttcttgcccttgttgggcgtgggtttcctgcccgtgacaaacatcatcggtgagaacttgcatttctgtccttctccccctgcatagttggagtagaaaacttccggcttcttggctcgttcgtatgaaatgacatagattcctccgccggctatcacgtagagatattcatcgttcatgatactgccgtatggggtccttctccattgaaagacgatgttgttcatgtattcgggcgtataggaagaatagtcgggaataggatagagttcgccgtaactgagaaagaagttcttgtctatctttcccatgtagtccagcgtgacattgctcagctgcacgagtccttcgtcgcaaatgagttttatgccgtagccgccgtatctcctgacataggcgaaggccccgtccacaaaggtctggtgcaactgtcgcgggtgggttcctaatgattcgtcatggttcttgttgtagaacatcgtcatgaacttggcattgggaatgtccagcctcaaataagacaagtccgctttgccgtcttttgaactcacgacgagaatgccatcggaagaagtcgagtagttgacgatgagcttcgtcgtgacaaacgtcttcaccttggtgtccttttccgtaattgtaaacagcagcgtgtagcttccctgcgcgacgcccacttcataatccaagtccttccgcgtggaaatgactttatcggctatcttccattcataggtatatttggaagtgtcgttgccaaagatggatccgctgatgtcgggattgatctccaacttggagaatctgtcaatctcgacgctttcgggtattcccttgaccgcgacctcatctatctcatgatagtcgtagtttcccttgtcctcatagcatgccgacaacgtcgccagcagcaacaggcccaatagatatttgattgttttcataagttttctcctttttctattcaccatccatgtctatcaagttgtcgaagcccactcgtttccccgtttcctggtctatgacgacattgtctttcagatagcctttcagcgcgttgatgtaacggtctgcgtcattgagaatattcaccttgctgtaaaattcttccgtattgaacatcagaagtattctgtatttctgcggatgataatagcccaacgcgtagacgttccaccatttgggctgggccacgtaattgttcatggatatcttgacctcatgcccctcgcgtatgccgggcttcagttcctccgtctccaccaatcgcaggatgagcgacttctgttgtttcagcgtgaaggaaggactcaggtgcgaacgcaacaacacgaccctcaacgtatccgtccaagtgttggcatgaaaggtgtaggtttccggcaaagacatgtagtcttcattcaccttggcggtcgtcgtgcctttcacaaccgttcctttctcgaccgcttccacccgataatgcttgtcggccaacaacgggttgcccaatatcaggactggaatcttcacctcgaaacttttcacctcgtcgggcagcaaccccatggaaacctccaacgagtcgcgcacaatcaatcgtttggccgcgtaattggggtcttgatacagatattcgaaatagattctgtcgccttccgaatagggcacgtcaatgtccttggaacaagccatggtcaagacgcatgcgggaatcatccatagttttagccaaatatttttcatttttcctcctttttcaatgataaatgccatattccttttcatcttccggcaatggaaagaccaacacggaattggacggttcgatgttgaccaatatattcaggataggactgttcagccgtttgtattcatagaacatcttcccctctcctataaactcgcggcgcatctccgcaatcagcacatcctggttgatgaccggcttgtcggctgcagccgagttggaaatgcgtgaacgccgaagcgtgttcaatgtctccaacgcatccgactcgtccagtcgcattttgcattccgccgcaatcagatacatttccgagagcttgatgagcacctgcttgggatagaacttcttgatatcttctttggtgtatttcacaagatacttgctttgcggtttcacccaagtcgacaacctcacatcgttgttgttgttctcaaactggtcgttgatgtcggtggccaagggcagggcggcaccgctcacggacgtctgtgtgacgataccgagatgcaatttctgggcattggtcagaatggacttgttcctgagcgagaagatgtgttcgtcgttgaacaagatatccaatgagtcgggctgcacattgatactcttggccacgtccaacagcttgaacttgcccgaccggataacgtcggccgcagcctgtccggcctccttgtagtttccttcatccagcaagacacgcgcacgtaaggcctcgaccgcatagtaattggcacgtgccacgtagcggtcggcttccgtcttgtcggcaaagtcgcaaggcgtcaccttcctgatggcgtcctgttccagttcctgcttggccctattcaggtcccgcttgatgttttcaatcacctgacggacgctcacggctggtgtcgctttcacgccaaacgtctccacatacgggatggcagtggcttgcggctctcttttgacgtcgggagcgaacatccgcaagaggtcgtagtgcagataggcccgcaagaagagacattcccccttgatctgatgttgggttgaagtgggcatgaccttcccgttcttgtcgagccacagcaggatgttgttgatttcggccaccacggcatacatcttgttccatatcgaaccaatctgcgtcctcacctgctcgttgccatactggtaatccttggcataatgatattggtgataaac

SEQ ID NO: 614 - DNA, 24494 bp, synthetic construct
  source 1..24494: mol_type = other DNA
  misc_feature 1..24494: note = Synthetic
tctacattactgataccccaattgctattgggactgatccttctgatgttctttatgcaatgaagaacgaaaaaggaattactcatattaagcataagaaaggtcttcttattggtcttgtgccagatgaggcacattggaaatggatagaaagtcaaggaaagtataacatccgaaagcagaacagatatcttcgaaaaggttcccaagagctgagtagggatttgtttttggtaaatactatcatcctttataggatgaaagacagtgaaccagagtttattggtgagtacgacatgttatcagaagactctataccaacagtctacaagtatgaagatatgaggaagttaggtgatgttggaatggaatatccttatgggaatatagatgaaggtgtaagaaaagaacgtgaatatataatatatgagcttgatatcgagcatgggaaaagcttggtggaagttgataagaaacggtattctgaattgataaaagagaaaggacgtgatgaaaatggtcatataggaataccttttattatataatctatccttattggtataacggtaatatataataattaaggctatggatactctttctgcagagcaacgacatgataatatggcagctatcaaaggcaaaggaactaagccggagatgatagtgaggaagtttctgtggagtagaggattcagatatcgagtgaataatgcaaggctaccgggtcatccagatatagttttaaggaagtatcgcacttgtatcttcgtaaatggctgcttttggcatgggcataaggattgcagatattatgttattcccaagacaaatacagacttttggataaggaaaataacccggaacatagaacgtgataagcaagaacaactacaattagccaggatgggatggcattgtattacggtttgggaatgtgaattgaagagagagaagcgcaatgagacgcttgaatcattggcttatacgcttaatcatatctatctgaaggataggtcacaagtctatcaggtacctgaagagaatggaatgtacattgcggctgagccttctctccacgagtgaatgatactttattactttcatgataataatatacgaacaaaaatagatataagatgaaggaaattgattacaaaacgatgaagtttaatccgttcaatctgttgggaaaggaatggatgttggcatcagcagggaacgaaaaggatggttgtaacactatgactgtcagctggggacacctcggttgtatgtggggacataatgatccaacggctgttatataccttcgtccgtcacgttacacaaagactttcgtggataaagaggattatttcacgctctgtgtcatggataaaagcttcaaaaagcagatggcttacctcggaacagtatctggaagggatgaaaataagatagagaaagcagggttgacaacggtgtttgccgacggaacggtctacttcaaagaggcgaaaatggtgctgatttgtaagaagatgtatgctgccgaactgcaggaaagtggctttttctatcccgaaacactcgatgaaagttatccagagcgtgacctccacaccatgtatgttggtaagattgagaaggtcttggtgcgtgatgacgaatatgttgggtaatatttctacagacgactataaacaaacgatggttattttgtgaacattaggtatatctctcatctgctttcaggatacaacaacgcctgaaaagacagaagaaagatataccttttttattttaaagtatagttgaagtcatcttttatcatgtagaagcacctcctcatttaccaatacagaagtgctggaagatgttgccgagaacctcatgggtggtgatttgaccacccgtgatgtcggcaagttggtcgagacagatacggagatcctcactgataaggtcgccactgagttgcatgttcatgccatcaatgacacgaaggatggactcatcggcacgggtgagggcttcataatggcgggcagaggtgataatcacactgttttcgttgatctctgggatgtcagctgccttataaatagccgtctccaaagcatcaatgttctgcttcagtttggctgatatatatatataaggtgtaacctcgcctgatggttgaggcttttctgtcttgttatccatcttgttgaatatcgcaatcagcttctttccttccgtgagatgttgcatctctgctagctcttctgccgttggttgctggtcaacgacccacagaacgatggctgcttcatccattttctgataagcccgttcgatacctaactgttcaacctggtcggttgtgcgtcgtattccggctgtgtcaatgaagcggaaggtgatgccatggatctcggttgtgtcttcaatgacgtcacgagtggtaccgtggatatcagagacgatggctttctcttcatgaagcaggcagttgagcagggttgacttccccacatttgtcttgccaacgatagctactggtactcctttcttcaatgcattgcctgtttcgaacgactttctgagctctgcgatacgctcatgaatggtctcggcaagtgcttccagttccgaacggtcggcaaactccagctcttcatggtctgaaaagtcgagctcaagttcgagtaatgaggttattttcagcagttgttcgcgcaataaggataactctgagctgaaatgtcctttgagttgactcatcgctacttggtgtgatgcacggttagaggcgctgatgaggtcggcaacagcctctgcctgactgaggtccatcttcccattcagataggcacgttgcgtatattcgcctgggagagcctgtcggcaaccagcgtcgatgagtgctttcacaacctgattgaggatatatgccgagccatgacatgctatctccgtactgttttcacccgtataactatgtggagagaggaacacactcaccaggacatcgtctattgtattgcccgttttgtcatgtatttccccgtaatgcagcgtgttgcccttggcactggtcagttttttcccacttctactatggaagattctgtccgtaatctctattgcctgctgaccacttacccgcacaatgcctattgctccacccggttgtgtagcaagtgcacagatggtttcgcccacagtctggcgtgttgttgaaatgatttgttgtgcctgttgtggggtaagtgtctctttttccattctttttgtttatgatgattgatgtgacggagcgtttatattctgtcaagcaccgtcttaacgagtccgtcaatcgtgttcttatatcctgcatttgccttctttgccagtcggtttgcaatgaccatgcagcatgttacagccctatgtcccatgagcgtagccagtccggcgagtgcagaagactccatttcgaagttcgttatctgtaacccattgtaggagaacttctctattttctcattcagaagtgggtcttgcaatggcaaccgaagctcccttccctgtggaccgaagaatcctccgcaggctatggtgacacctctcaccatgtcgtcctgtgcaatctgctcggtaagttgttcatcagcgcaagccacgtatgggtttccaagttgtgcatcccacttcacttgccgcttgaattctgcttcaaagtcaaggtcggaagccttgtcacgtccggcatagaagttcaacagtccgtcgaaaccaatgctttttaccgatgcaatgtatgttcctgtcggcgtataaggctgcaatccgccacaagtaccaatgcgcacgagggtgagctgccgcagttggtccttctcagtgcgtgtttcgaagtcgatatttgccaacgcatccaactcattgagtacgatatcgatgttgtcacaaccaatgcccgtactcacaaccgtgacgcgtttgcggtgataggttcctgtaattgttcggaactcacggctttccacttcacattctatgtcctcaaagtgggaagctacgagtgctacgcgccccggatcgcccacgagaatcaccttgtctgcaaggttttctggtttcagatgcagatgaaagatacttccgtcctcattgataatcagttctgacggtgcaaaatacttcttctccataggtcttgagatatttgggtaaatgtgttcttatataatgtttaggagacaaagataagaagaaatatgcagatgaccaaatgaagaagaaagaatgattgtaagataaattcactattggttttcaaacggtgctcttttgccttctaaaaggtgcccttttacattgcaaaagggcatcttttgatgttcaaaagggcatcttttacaacgcaaaagggcgtcttttgcaagcctgtttgtaacctcttgatatactatgggttacaaaggcagttttacatggttattgtttgcttttcggtctgcgcctcttatgtttctgtaaagttatttcgttacgcctgattgtctgtgatcaggttccttcacagggctcttcccctctatgcttcttctgcttctgtatcacggaaagcctgaagcggaaagggcagtgggcgagagtcggttggcagttagtgcttggttatttgtctaaatacgtaataacatattttcttataccataatatacatcgttctccatcaactcaatagggcgtcctttatcatcaaatttataagaatcggtattcgttttccccaatttattatcataaaagacgtgccttttggcgacaagatgagcagaacggatgcccgtttgcgttgtccatataccttcattgcggttgaaaatggaaggatacacgcggaagatgtttaagtctgggaaggttctgttgggcacattggtatattcgaaacgaacgaatgtatttccatatgttatctttccttttcctccaacggtggctttgacgaggtcattgttcttccactcaaaggtattctttaagtttatttcatgaatataggatgaagtcaggtgcccgtcagcgtcatatataagactatcctttgtgtgtggcgccgttacaggctcatctgtcagagggtctttataaggagcttcgttgataaacttcgttgctctgccttgtttatctaagtacatagcacctctatggtcctcaagaacgatcctaccggtgatgtatccctttgttgtatacgagtagatggagtccgtataagtcaccgttgccactcgaggagggccatatgtgttgtggaacaggtcgttacaaaacgttagaaggcgcttctgattgtcataagtgaagacatattccccttgcttatagccctggggatagacgtaaacctcaatctttgagatgtaatcgtagccttttttcgcaagagtattagacgaagtatccacctgatcatcgcttgaacaggagaaaaacgcaaaagaaatcgctaagagtagaaagaaatgtttcattaaaacctaattttttatgtattgaggtgcaaaggtaaaaacgatgaaagaaaatacatgacggtgaaagttatagtctgtaattaaaaacaaacacatcgaaagttatatatataaatcctaaaatcaaggtgaaaaacaggagtagatgcctaaaaagtgtaaattgtgaaggaggaaaggacttgctgaaagcgctaatcatacacctattagcaacttacgaagcatggagaaagtaggactgaaaggtggttttgaggaagaaaagcatggggaaagggattagaaagggagaaatcgcatgaagaagatagccttttagcactgattctgtccgatatcggtggatattcagtacataagaaacacaaaaatggcgcagtgcagagttgcactacgccgttttttctgttctaaaagagacgctttactttcgccaaaagcgtgatgttatgtcttcaaacgtaccgtctgcgcatcgccgaagcatccgttgattggtccgaggagagttaagtgcaccgagatgcttgaggtatggacctatttttatgtagtcgaaacgctcctgatggatatgaggtgatacggcagtacgccctgtgtaccatccaatcttcagtctgggatgctgctttcggatatgttctgctaactcatcaaccctctccggggctatatcacctcccataaagcccacgcaagtgatgggatttcctgcttcagagatgagcttgtcgagtgtctctgtggtcagatcgttgccttcatccttccaaagaaaactgctatggcagcccggacaacgacaaggacagccggaaatgttgatggcaagcgtcacttcgtcagggaattcctgaaagactatgtctgtgttgatatagtgtagcatcttaattgatggcgggtaacggtgttcgggagccttgtttcttcctctcctgtcacccgcttgctaatcattatgcctcctgtttgcactctttcgtctgtttcccagcttcggaaggagcagtagtctttatcgtatacttgttctgtccggcatagaaacggcggtgtgcctcatcctgacgtggtgctgagaagttgctaacacgcttcatgtagccaatgacacgtgtgagataatccacgtttgtagagtgacaatgaggacattcgtgcagataacgcttgtcgatatgcccacaatcgttacatacagtgttaggaatattgaacgtaaagtagttacatccctcctgtgctgccgtacgtaagagctgtcgatactgtgcttctgacaggtgttcctcaaggttcatgtgcagtgcagagcctccagtgaggtgctcaatatagggtgcaccatgcaatttgaacttgtcgagaatggtcagagagttatcttctacacgatagaagtagctgttgtaacagtcacgtggtacgaaatagccgtcctcacgatcccattttgcgtgcttcacaccgacgttttcggcaggaatcatctcacaattgaacatggcttccttggtgcggaaggccttgttgtgcttctctatcagtccgagaacaccctgaacgaacttcttgtaatcctcgtttggtgtgatgtcgagtcccatgaactctgcagactcaaccagtccgttgattccaatggtgagatattgacggtcaatgttgatgtatcccgcatcaaagagtggcaacatgtgattgcgcagcagctctttgaggttctcattgtatgccatctgcaccttatgacacagtacgatgacgtgctcaagatattccttataatctaagtcatggttaacagcatactggatacagcggttgaggttgatagtcagcacactctttgaaccagttgacactcctccggcacctaaagtataggagaatccgttgtcttgtatctcattacggagtcggcaacatgaacttagagagtcggcattgtcgctcatgtaggtgaagaaactgtgtccttcagcatacatcttagctgcataatcgccccattccttgtccttgcactctccgttctcagccaacaacgccatcgtttcgactgggaaggtgaggacagtcttgagtctttcctggttaaaccacttcataaaacgcttctgaagccatgagagactctcccagtctggctgtgatccatcagggaaatagaagtttccgaagagtgattcgaagtaaggacgatcgtaataagagatgttccagaacacagcctggtagttacgggcacctgtaggttggttaagtgaatagacaatctgctcgaaatcgtccgtgataaccttatctattgtacgctttctgaggctgaggtcgaccacttcatcagctcgtttccagtagtctttaccgtattctttctgtatgaagtagttcatgtacatcaggaactctggtgttgcacaggctccggcaagcatggatgataccatgaagaccatgttgataaacccaccacagaagctcttgaggttagttggggctgtagagttaccgccaatggatgttgttccaccaatgagccatgggtacatggtgatggaagcacagtagttggcaaggtttgtctcgtcattcttatatataaaatggtgggtgaggaggttgatatattcgtcagccagctccttaccatacatctttttgatacgatctaccagcattcgacgattcaaacggatgaaaccttgcttgggaagttcgccgataagcgttgcgatattcttgttttcaacgttcgcattggcgtcaaacttagaaccagtggcagcattctgcgctacacaatagtctgtgaggaattttattttctcaactgtttctcggtcttctgtgtgctgttggcgatatacaatgaagctctttgccaccttatagaagccctctttcatcaaagcttcctcaacttgattttgtatatcctcaacttttatgtcgttatgtatgttaaggtcagataaaatcttcgataccataccgaggtcggtaggctcattgacactctcgaatgcttttaagatagcattcataatcttgtcgagggagaacttttccttcgaaccgtcacgcttagtgattgtaaagtttttgatttccattgctatattttctatgtctttattgttgttttaaattaaatagctcatagctcatagtcttgatggtcttctgatgccctgatttcaatgctcaaaccacaaggttagtcacgttttagcttgtgcgaagttatccgttttgggaaacttttttctgtttttaatcttcaaagttatccgttttggaaaactttagtggtgcaaagatagataaaaggatccacttcaccaaagataatctggttaaaaaagaactaaattttctgctgtttttcatagtatgttgttataatctcctatcccattgtcatttataaatgactggttttagtgctactttattccctggtttcatccccatttctttccgttttgtctatgacaacctttacctttgtcttctttcccgtttattttcccatagcattacatccttgtatatcatagaaggaacagccagtaccttatgtctgaattcaaatgtgcttaacagtcttcttcagttcagggcagaataacttttttgtgtagctcctctcttccgtacgtctatatatataataaggtgtaagggggtagaaagaaaagtaaagttacctctttaaaggaagctaatatacccttctgcttcactaaatacagagaaatattttatagaatgtggagaaaggtttcactaaatatagagaaatgctttatagaatacggaaaaaggcttcatggaatatggtgaaaagccttactggatacggagagaagtattatagtatacgggaaaatgctttaaagaatacgaaaaaaataaatagaaagaagcctttcttttccgcattttgtggtatatagatcgttaattagttacaaaacgactttgtaagaatgtgtcttttgcattaaacaaaagtatgttttagaagtgcaaacatacccttttaaaaaacaattgaaaaactatcttgtaatataatactcgaacttgcctcttactttatttctaattatccttgccttatccttttttctaattttagactcgtgtatattataaatgatttatagtcctttttagcgaaagtgtcttatctctaatctcccatataattgtttatttacccatagatttgaatgactcttgctttattctcatataaataaggtatgaggaagttgtaaaaaaaggttatggaaggttgtaagtttataaaaataatagtatctttgaagcgataaaaaacaaaagaaggacgagttgccccgccctgtttgttttcacaacggaatgatccttattgtgacttgcttgaaaatatctgagtgcaaatataaagatttaataactaaaaaccaaacaaaacaagaaaaaaatgaaaacaattcttggattagacttgggaaccaatagtattggttgggctaaagtctgtattgatgacaatggtaattacttgagagacattaaacttggtagtcgtattatccccatgagtcaggatgttcttggcaattttgataagggcgtgacggagtctcaaacttcagttcgtacaggttatcgtggaatacgcaggctaagagaacgttctttgttacgccgtgagcgtttacaccgagtactacatgttcttggttacttaccacctcattatgattgttccatagggtggaacaggaatgagccttctacttatggtaaatatctcaatcatagtgaacctaaattagcttgggaacgtcaggaagatggttctatgcgtttcatctttatggattcctttcatgagatgatggcagatttcgcaaaaagacagccatcattagtctctgatgggaagaggataccccttgattggactatttattatcttcgtaagaaagcacttagtcaggctattcgaaaagatgaacttgcatggatactactgaattttaatcaaaagcgtggctattatcagttgcgtggagaagaagatgatacaaattctgcgaaatgtgaagaatattatgagctaaaagttataagtgttgaagctgatgaagaaggtaagggtggtaatacatggtataatgtaaagctggagaatggatggatataccgtcgccagagtaagatttcgttgagcgactgggtaggtaagactagagaatttatagtcacaactgagtatgaaaaagatggcgtgacactcaaacggaataaggatggagaaattaaacgttcatttcgctctccgagtgaagatgattggggacttcggaagaaacggacagaggaaagattagaatcttcaaagatgacagttggagcatttgtatatgaacatcttttgtcagaaccttcagataagatacgtggaaagtttattcgtacgatagaacgcaagtattataaggaagaattgtatgctattctccgtgaacaaagtaagtatcatgaggagttacatagtgaaggggctttaaagaaatgtgccgaagaattatataaaaataaccaacctcatcgtgatagcttattaaagaaagatcttatatatcttctcttagatgaccttattttctatcaaagaccattgaagacaaagaagtcattaatatcggagtgtccgtatgaagcttatagctatgtagataaagaaacaggggagattaaacgtcaaggtattaagtgcattgcaaaatcgaatccatattatcaagaattccgtttgtggcagttcatatccaacctccgcttctttgataaggttgatgataaggatgtcacagctgattatctttctactcgggatgattatgttcgtttgtttgcttatcttaatgaccgaaaggatattaatcaagaaacgttattgaaagacttcttgaagttgaagaaggtgataattaattctgagaaggagttttcagtacgttggaattatattgaagataaagagaagcgctatccatgtaatgaaacacgtcatgaattactccttgctcttgatagggctggtatagatcgttcttggttagatgaagaaggaagagagtatcgactttggcatttgctttattctgttgaatcgaaggaggagacagagggggcgttgcgcaaattaaaaaacgatgatgagtttattaaatccttcttgaaaataaaaccatttaaaaaagaatacggtgcttattcagagaaagcaataaagaaacttctagctgttatgcggatagggagcctttggagtgaggcagatatctgtagagcaacaagggaaaatataacaaaaatattgaagggagatattgatgataaactcaaagaaaagataagctcttgcctttcttcatataatcaagtatcagacttccaaggattgccagtatggttggcctgttatgtggtgtatggacgtcattctgaagctgcagaaattcaacattggagaactcccaaagatctgttggtatacatcaatgggtttaagcaacattcacttcgtaatccaatagtcgaacagtgtattcttgagacgctccgggcagtccatgacatttggaaagaggcaggacatattgatgagattcacgtagaattaggccgtaatatgaaaagtacagctgatcaacgtgcccgtatgtcagggaatattctccgtaatgagaatactaatcttcgtataaaaagccttctgttggagttaaaaaatgatccagatattaaggatatacgcccttattctccaatgcagcaagaaaagttacgtatctatgaggagggagctctgcaagaattgacaaaggatgataaggactttgcggagattatcaagatatcgacaatggctcaaccttcagcaaaggaacttctaaggtataagttgtggcttgaccaaaagtactgttcaccttatactggtagatcaatttctcttgcaaagctctttacatcagcatatcagatagaacatgttattccacaaagtcgttattttgatgattcttttaataacaaggttatttgtgaatcagaggtaaatggtctgaaagataatatgttaggatatgaatttatcaaagaatgtggaggtgaaattgttcactgtacaatgttaggtgatgtaaagatcctcagtgaaaacgaatataaggattttgtaaacgaccattatgcgcataatagacgaaagagggagaatcttctattggaagatataccacaagagttccttaatcgacagatgaatgatagcagatatataagtaaggtggtaaaggctttgctctctaacatcgtacgtgctgaaggtgaagaagaagccacgtcgaagtttgtagtttcttgttcaggtggtattaccgaccgtctgaagaaagattggggcttaaatgatgtttggaataaaattgtatatcctcgttttgagcgtttgaataaacttacgggtacagattcttttggacaatgggagaacaaagaaggcaaaaaggttttccaaacttcagttccgttagagttacaacgtggttttaacaagaaacgtattgatcatagacatcatgctatggatgcccttgtgatagcgtgcacctctcgtagtattgtaaactatttaaataatgaatctgcagataatcctaagaaacgagaagacttgcggcaaaagctatgtgacaagaatcgtattatacgtaagccttgggacactttcactcaggatgctacagcagctttagaagatgtagtcgtaagttttaagaattatgttcgtgttatcaacaaggctacaaattattatgaaaagtatgataagaatggtaagaaaggaatagcagaacagaagggacaggaaatgtgggctataaggaagcctatgcataaggagacggtctttggacatgttaatcttcgccgtaaagttactgttaagttaaaagatgccttagaagatatcccttctatttgtgataagactctaagggattatgtaaatggtttagtaaagaaggacttcaagacaaaacatttgatagcacactttaagagtctcaattaccgattgaataggcagcatatagagaaagtagaggtatggcaatttagtgacaagaaagaacaattggtggcaacaaggaaaccattagacacgtcatttgataataaacatatcgatagtattactgatactggtatccaaaagattttgaaaaactatcttcatgcaaagggtggggatcctaatattgcgtttacacccgaaggtatagtggaactgaatcagaatatttctctttataatgatggaaaactgcatcagccaattctaaaagttagggtctttgagccaaagggtgctaaatattgtgttgggcagaacggtaataaatcagctaagtatgttgaagctcaaaaaggaacaaatctttattttgcaatttatgaagatgaagaaggtaaacgcagttatgaaacaatacctctaaatgaagttgttgaacgtttgaaacaaggccttagccctgtcccagaaaagaataaagcacaagttccacttaagttttatctttctcctaatgatttggtatatgtacctgatacaggcgatgtaaatgaaattaaaaaggaacaaatatataagtttgttgattctagtgggacaacagcaaattttattcctcatagagcatctgatctcatctataatgtggataagaagttcgctacaagtttttgcaatcgcgaagtaattcagaatgaatatggtgtaggtagtccacaatcaaagaatcagaaggcaattactggtgaaatggttaaggctatttgttggaaacttgttgtagatcgcttaggtaatattattaaaattataaagtagtgaactttctagcctatgataaagaaaacgctttgttttagtaacccaatctatttgagtcttcgtaatgctcagttagtattgcatttaccagaggtagaaacaaatgatatgttgccagagatgatgaagaaggaagccgagcgcactatcccaattgaagatattgggatagttgtacttgacaaccgacgtatcacagtcacttctggtgtccttgatgcccttttggagaataattgtgccgtaataacatgtgatcagaagagtatgcccgttggcttacttctccctttgagtggtcataagacacaaaatgaacgtttccgatctcaacttgattcttcagttccgttacgtaaacagttgtggcaacagactgtgaagcaaaagattctaaatcaagaatgtgttttacgaacaaatacagataaggaaacaaattgtatgcgtgtatggtcaaatgacgtgcgtagtggtgaccctgataatcttgaggcaagagctgcagcttattactggcgtaatctttttgctgattatcctgattttgttcgtgatagggaggggggaccgcccaataacctcttaaattatggctatgccattttacgtgctgtaattgctcgcgctttagtaggaagtggtctgttacctactttgggtatacaccatcataatcgttacaacgcttattgtctggctgatgacatcatggagccatatcgaccttatgtagatcaacttgttatagatattcttcataaatcggaggaagtaacttctctatctaaagagttgaaaatggagttattaagtattccgatgattgatgtcgtcgtgaatggaaaacgtagtccattgatggtcgcagctcagcaaaccacagcttcacttgcaaagtgttttgcgggggagatacgtcgcattagttatccagaaatgtaaaatctatcatgtccaacttttaccgtctcagtgaatatcgtattatgtggattctagtattctttgatttaccgacagaaacaaagaaggaaaagaaggcatatcttgatttccgtaaatctttgatgaaggacggttttacaatgttccagttctccatttatgttcggcactgtgcaagcattgaaaatgctgaggttcatatgaagcgtgtgaaggcttgccttcctaaacatggaaaagttggtatattgtgtattacggataagcagtttgctaacattcagctgttttatggtgagaaacctaaagctcctaatgcaccggggcagcaattagaacttttctaattcaaaccttatagaaaacgaaaatcccactcacttagagtgggattttgttttgtggcatctttttaattttcttctaacaacgctatatcatgttgataaccagagtcttgcatgtaatgagttgttgttgctaccacaaaggtacgtattttcaagcaaatcacaacaatgataacgaactattccaggcaacaaaagttgttgttgctaccacaaaggtacgtattttcaagcaaatcacaactggtcttaaaacaaagcgtaatctccttaagttgttgttgctaccacaaaggtacgtattttcaagcaaatcacaactgagcgaatgaacataattaattactttaagttgttgttgctaccacaaaggtacgtattttcaagcaaatcacaactatcctctccaggttaaagaagctacttctgttgttgttgctaccacaaaggtacgtattttcaagcaaatcacaacagattttgctttgctatgtcagcaccatatgttgttgttgctaccacaaaggtacgtattttcaagcaaatcacaacacaagatttattgccaccataataatgtgggttgttgttgctaccacaaaggtacgtattttcaagcaaatcacaactgctgaattgataagattgaacgtctcgcagttgttgttgctaccacaaaggtacgtattttcaagcaaatcacaacatcttggagaaagttatagcattaagtaatgttgttgttgctaccacaaaggtacgtattttcaagcaaatcacaacataccagcacggatgcctgtaaaggtccaggttgttgttgctaccacaaaggtacgtattttcaagcaaatcacaacaggttctttaattccacgtatgacgtggtagttgttgttgctaccacaaaggtacgtattttcaagcaaatcacaacgggtgttacctccatcatttcttttttctggttgttgttgctaccacaaaggtacgtattttcaagcaaatcacaaccagttatgcttgcctctttcttaggcgcagttgttgttgctaccacaaaggtacgtattttcaagcaaatcacaacaatgccacaaagcagtatctaattgatgagttgttgttgctaccacaaaggtacgtattttcaagcaaatcacaacaattaaatgctgatactgctcttcgttattgttgttgttgctaccacaaaggtacgtattttcaagcaaatcacaactactgctattacacgtatcctgacgattttgttgttgttgctaccacaaaggtacgtattttcaagcaaatcacaacaatggtgacggagactggaaggatactatgttgttgttgctaccacaaaggtacgtattttcaagcaaatcacaactcatgtggttgagaggaatctacatgagtagttgttgttgctaccacaaaggtacgtattttcaagcaaatcacaactaatcatcttgccactgtgcgtgagactgagttgttgttgctaccacaaaggtacgtattttcaagcaaatcacaacaagcgctgaaaaatcttcctatcgctactagttgttgttgctaccacaaaggtacgtattttcaagcaaatcacaactacttcttctcgttattgtacttacatcgagttgttgttgctaccacaaaggtacgtattttcaagcaaatcacaactccgtaggagaagtaccttttttgaaaatagttgttgttgctaccacaaaggtacgtattttcaagcaaatcacaacaccagtacacacgtgctgccaaaggtgaagttgttgttgctaccacaaaggtacgtattttcaagcaaatcacaaccgcaagtcactctgattcaagcaattacagttgttgttgctaccacaaaggtacgtattttcaagcaaatcacaaccccatggcaatatcacccaactgcttcatggttgttgttgctaccacaaaggtacgtattttcaagcaaatcacaacaaagaaaaggaacatcatcgtctacacttgttgttgttgctaccacaaaggtacgtattttcaagcaaatcacaaccaggcggcactgctccatataatgttacgagttgttgttgctaccacaaaggtacgtattttcaagcaaatcacaaccagtcaagacgtgtataattctgtattcggttgttgttgctaccacaaaggtacgtattttcaagcaaatcacaacatgaaatctaaattttcttacgttttttatgttgttgttgctaccacaaaggtacgtattttcaagcaaatcacaacatagttgcaataggaagatttttcaacgcagttgttgttgctaccacaaaggtacgtattttcaagcaaatcacaacacgttttttatgcgttattcattttggtaggttgttgttgctaccacaaaggtacgtattttcaagcaaatcacaacaatgctactaagcaatatctcatagatgaggttgttgttgctaccacaaaggtacgtattttcaagcaaatcacaacacgcttacgagtacatggaggacgaggttagttgttgttgctaccacaaaggtacgtattttcaagcaaatcacaaccagtaatgaagcaacttggtgatattgctgttgttgttgctaccacaaaggtacatattttcaagcaaatcacaacaacgcagaaccactatgcaaatgggcagcagttgttgttgctaccacaaaggtacgtattttcaagcaaatcacaactgaatgaagtaataaacaataagcgaatggagttgttgttgctaccacaaaggtacgtattttcaagcaaatcacaacataaaaacgttccctcctttaattctcgtgttgttgttgctaccacaaaggtacgtattttaaagcaaatcacaatgggctttttaatgctaattaactttaaaaagagatttagattttgaagtttaatattaattatatacctttgcaccagatcataagaatatggtttagggacagggtcgaaagatcgtgtaccatcaaggggcgctctaagcgtcccacttttttatgtttttcttatccccctttctttttttacgtagtggtagatttgttctactatatataattattgttgttgctaccacaagggtaggtattttcaagcgaatcacaacgggctttttaacgctagttaactttaaaaagagatttagattttggagtttaatattaattatatacctttgcatcagatcatagtaatatggtttagggacagggtcgaaagatcgtgtaccaccaaggggcgctctaagcgtcccacttttttatgtttttcttatccccctttctttttttacgtagtggtagatttgttctactatatataattattgttattgctactacaagagtacgtgatttcaagcaaatcacaacaattcatccatgctcttttatatgcgcttagttgttgttgctaccaaaaaggtatgattcctggggcagataaataatgctcaaccccctaatagagttttgttttaatttgctgtcacttttaacacttcgtgtaatgggcttatttttaggagtttgtatgcccaaaagcggtgacgggagtgacagcaaatttgttttttgtcccttatattcattttattttttcatttttggcatgctattttccgcatgtaattaacatttttatggtaaaaaaaatgtgttgatagttgtttgctaaaagataaaatactatatttgcggcataaatttctatttaccgagttcgaaaattactatttgagcggtttaatactgccaatctattactaatatctaaacaatgttgacgatgagtccattagactatgtaaagacttttaatgagtttctgtggaacagttttctcatgtatgcgcttttaggagtgggtattttctatactgtctaccttggtttcccacaaattcgccatttgaatttggcgttcaagtatgcctttggtcccgtttttaagaagagaaagccaggtgaaaagaaggttaactctttccaggcattggctactgccgtagcagctcaggtcggaacgggtaatattggtggtgttgccactgccgttgccactggtggtttgggtgctattttctggatgtgggtatcagctttgttgggtatgagtactatcttctccgaggctgtgcttgcccagaagtacaagaaagagtttcatggtgagacggttggcggctcagcttactatctttactatggtcttggcagtaagtggctggcagttttcttctctgttgccattgtcatagcccttggtttcgtgggtaatatggtgcaagccaactctatttctattgctttgacgaatgctttccacatcccatcttatataataggtattattcttgcagctgttgtggcagtggttgtcattggtggacagcgtcgaatcactgctattgcagagcttttagtacctttcatggctgttgtttacattgtcggttcactgattatcatctatatgtttgctgatcagttgccttcagtcatccgtaccatcttccacgatgccttctctctccagtcagcagccggtggtgcagctggtacagtgatgaagtatgccattcgttatggtgttgcccgtggtttgttctctaatgaggcaggtatgggttccaccccacatgcacatgctttggctgatgttaaggatccttcagagcagggtttcgtcgccatggcaggtgtatttgttgacacagtactcatctgtacctcaacagctttcgtcatcatgcttaccggttcttatcataatacagcattgaagtcggttgctattactcagcaaggcttcgagatagcttttggtgaaggtggtatcatcttccttgccatcagtcttatcttctttgctttcactacgattatcggctggtatatgtttgctgagatgaacatcaagttcatgtttggtaagaagggaatccttgtttatcgcgcattggtagtaggattcgttttcttgggctgtcttttcgcagctgatttggtatgggagttggccgacaccttcaatggtttgatggtcattcctaaccttataggtatcatcttccttgctccacaggtgaagaagatatacactaacttcttagcaaaccgtaaaaagaaaagttcttaaggtttttagccattatttttgttattccttgttcattgcaaagcttatagcgatgagtctgaacaatggacttatttaggggggaataatccatggtgagttgcgatagtattgcaactcaccgcttttttgttgttatttcttatgctttataagattattccatgttctctttattgtcatttactaatcattgcacactcatgtgcgatctactgtttaattcacaacaaagtgaaggataatctttgggttatttgtttacaatcatcaaaaaaaagcgatgaccttcacaggcgatcgctttatcttttgataggcattagtcttctaaggtaaaaagattgttttcaggataacgatacaaagatatggtattttttcgttacacacaaactttatttcgtctttttttcgttgttttttttgtgtgcgaacacattgtaactctttgactatctgtcgtgtatgagataaaaatttattgatattttgcgcctattttgttcactttagcttctgctttctagctcttttgtaccttacgaaggtgtagatggagtaatggggtggggcttcctggtatttattctttggtgttttgcctttcacgtttatagtctttgcaatctcagttcggtgtctatacctatttatatttataatctctgctatccctgtgctgtatctttgcctttcatgtttatagtctttgcaatcccagttctgtgtctttgtctttcatgtttatagtctttgccatccttgttcagtgtccttgcctttcacgtttatagtcttatctaatcctgtttagtatctatacctaattatatttataatctctgctatccctgtgctgtatctttgcctttcgtgtttatagtctttgcaatcctagttcagtatctttgcctttcatgtttatagcctttgcaatccttgtgcagcacattgtctgtcacgattccagctctttgtaggaatggcgcatgaagtaatagcatgtaggagtgatgaagatagcgagtaaagccatggcgccagtgaggaagaacgaaccccatagcaggtcaacgttatcaagtatagcgatgagagtgatgtatatgagatttaaaccattggcaaacatgatttccagaaaagccattacagcccagtggtgattgctccaccgccatgtcaacagactgcttacgagatagaaaccagcgatagggctggcgtagaggagcatctctccgtccaccagcgcatgcagatcagcgtttaagaaagcaatgatagcctgattgataataaccaacagagcaaccatcacaaggtttatgcgtatgaaacctttgaatggttgcccccatttaatagttcttttgcccataggcatacgattgtgtaagctcttaacgccagtttacttgtgttattctgttgcccttgatcgtagcagagataacataattgcgtttcgacttaccaccttgacggtcgatatccagcgttgcaggaacctttaccttcagctcttcgtcgttgtcaccttcctttgttacttcagcaggtgagcccagatgccagttaatggtcttcacatcagcctggtaaagcttgtctttcatatacttctgaatatcttttgccgttgcaccacctgctccgaggaagttcagttgtgatgctacagcccctgcaatcttatcactgctcttgctgttcataccctgcaacaactgacgcagcacgctaaccgcctttgatttgtcaccttctgttgccgtatgtacaagcaaaaccttcagtttctcgtctgcttccttgctatgtgcaccatctggatgttgcgctttatagcctaagaaagcgtcttcgctgccctttgccactgctgcagcccagtcaatctcgtcaatcttggcaagtaattccttacgatgaggcgtgttaggatgcttggagagatattcctgataagcctccttagagttacttgtcatcatgcttgtccactcctgcgtgtcattctgtagtgaattcaaccgtgcagagatactgtcacgatgcgttttcggtgcatcaggattgttttccaggtaatcctgtagcacggttggctcattactgccaatcgcctgtgcgtaggcatcctgctctacgttggttctgttcttgttaactccctgattatagaggaacaacagtatgcctgccgtgatgatagcgatgagcagtgagatggcaagcgagctgtgactgcgcttctgttgcttctgtttctcgtcgtcgtcatggttctttacgactctttcagcagctgctatgacctcctcatcggcgttatcgtccatgatgaagtcggcatccaccgtctcttcctcgtcttcattctccttctggggagcctcttcgttgtccgttggttcggtcattacgacctccattggtatctgttcttctgttgaatcagttggttctacgggtttctgcatgggttcttcctttgaagctgaccccatgtcatggtgccctgtctccgtatggtggcagttcggacacatcccttcctccttgagatagagctctccacagttggaacatttgatgagatgtccggcaatctctacgccacagcttgggcatacaggtgccttatcgctcacttgatggccacattcaggacatttaattatcattttctttagagtatcttattcgttagtgtgatggttaaaaaagtctgatgatgccagacggcgtgtcttatcgccgtcgtcggtatcttagttcgcgcatactgtgctttcccatgagtcggctcttgtccacatagccgttcacaccgttgattctgccttttccggtgtactgccatgcaaagatgtctctgccgtcctgcagcacgggttcgcgtgttgtgtactgcgcaatgaatagtttatatccgtccaatgccccactgaggtatcggtcatagaagttcgtgtaagtgtaaacgagcggtcgtacaccgtattcctgcgtcatgagtacgaggaatttctgcagactgtctcgtaagtcctccctgcttagtccgcccgttgtctctatgtcgaccatagggatgaggtcttgatcctgcggacggcactgcatgcggaagttcctaagctgttctgcctgtggctgagcaggccgatagaagtggtatgaacccacgttcatgccgtatcgttgtgctgcctcgatgttatcaaggtaacgttggtcgattcgtgagcctccttctgaagctttcagatatacgtaattaagcttatggttgctgttttgagccacagtctcccaccatacatcaccctgataatgactcatatccagtccgtggatatggctgcaggtgtcttcacattgtatgttgtattgtgcctttgcgttgttgaatgtgagcagacaagttatgataattaatatatatttaatcttcatac

SEQ ID NO: 615 - DNA, 24491 bp, synthetic construct
  misc_feature 1..24491: note = Synthetic
  source 1..24491: mol_type = other DNA
cagcttcctctttctggaaaaccggtttgcgcatacaggcaggctgtcgcccaatggcccagggcaggctgccggcaggaggcggctggaatgatacctgataaaatgggttcttccgttaaatgcgtagattggagaataaaggcttatgcactggcagggtatgactgtccaaaaccagatggccttaaaaaggaggatgaactgaaagataaaatgcaggaaaggcagatagatacgatgcctgaccatcagcctgtctttccgtcttccacagacaaccttattcccatgtcatcggtatttgtaaactgttttcatgcaacccaaactgacacatgcctttctggctcctgaaagatgcctgattgacctgcaacaggtgctctattagcgtgttactaacgcccttttgaagtccaatcaggcaccttttggggacggcttgacaaccaattgattgactgctggttacagacttgctttttgcacgtgtccttttatatctgcagatgatctgtttgaaattatgtaatgacttttcaaaatcttgtctgtatttcaacgtattaaaatgaaaaggcttttgtctcggaggatgataacaggacaggaagttgaccgtctcggccatgtttttgtttcatgaatcatctcggttcttccgttaaagctatgcgaaaagcatccgcacattgaacggaagaagcgataaaatgccgctcaagatttgccaatctgcctttttattagtacttttgcacgtttaagacaaggaaaataacgaatttagaataacggaatgtcatcagttcagataaagagagtagagacgaagaaagacctcaaggatttcatcgagttccattatgatctctacgagggcaatccctacgatgtgcccaatctctacagtgacgagttgaacacgctgtcgaaagacaggaatgcggccttcgacttctgcgaagctgagtattaccttgccctgaaggacggcagagtagcggggcgcgtggctgccatcatcaaccacaaggccaatgagaagtggaagaagaaggacgtgcggttcggctggatcgacttcatcgatgacatggaggtgtcacgtgccctgttccaggccgtcgaagaatacggcagacagaagggcatggaagccgccgtgggaccgctgggctttaccgacatggatccggagggaatgctgacgtggggctttgaccggctcggcacgatggcgaccagttacaactacgcgtattatccgcggcacatggagcagctgggcggctgggtgaaagacaatgactatgtggaatattaccttgaagtgcccgaaaaagctccggagaagtacacgaagattgccgagatggtggagaaacgctacaacctccatgtgcgcaagctgacgaagcgggacatctttgagggaggctacggcaagaaactcttcgacctgatcaacctgacgtatgcggacctgtacggcttctcggaactgagcgaccggcagatagaccagtacatcaggatgtacttccccctggccgacctcagcctcgtcacggctgtcgaggacggcaacaaggacaaccagctggtgggcatcgccatcaccattccctcactgagccgggcactgcagaaatgccgccgcggacggcttctccccttcggatggtggcatctgctgcgcgccatcaagtggcacaagaccgaggccgtagacctgcttctgataggcgtgctgcctgaataccgggcaaagggtgccaacgcccttgtcttcgccgacctcatcccgcgctatgtggagtatggattcaaatggggcgagacgcaggtggagatggagaccaacgagggcgtgcagagccagtggggaccgctggatcccatcaaccacaagaaacgcaggtgttacaggaagagcctgacggactgatagaggaccggaggctgacgatccgcctgcatatcggccgtgaagcgtcggaggcaggcggaagacagctgactccctgccgcacagcgggagacttttgaccatcaggttctctgcatcctgatacgacttgccggacgaggggaagcccggttacggtctgcttgtccggcaccggcggcacaccctgttcatgcacgatgcccccgccattcatccctcctgttcccccgaaagacaaacagtccccgaccactcaccattcattatccattatccgctatatgaacccatcatcatcaaccatcacccccgacgcatcaccggtagaatataccgacgacaacatccggcacctgtcggacatggagcatgtacgtacccggccggggatgtacatcggccggctgggcgacggcaagctgccggaagacggaatctatgtgctcctgaaggaagtaatcgacaactcgatcgatgagttcaagatgaatgccggcgaccggatcgaaatcgacgtggaagacaacctgcgtgtcagtgtccgcgactacggccgcgggattccgcagggcaagctcgtcgaggccgtctcggtgctgaacaccggcggaaaatacgattccaaggctttcaagaagagcgtcggactgaacggtgtaggtgtgaaagccgtcaatgcgctcagttcccatttcgaggtgaagagctaccgggacggcagggtacgtgaactcacgttcgggaaaggcaacatccaaaacgacagaacagcgaagtcttcggatgaaagcgggacatacatctactttgaaccggacaatacgctcttcaagaactacagtttccatgatgacatcgtggaggagatgctccgcaactacacttacctgaatacgggactgaccatcatgtacaacggacggcgtatcctcagccgccatggactgaaggacctcctgacggacaacatgaccgtagacccgctgtatcccatcgtccacatgaaaggagaggacattgaaatagccttcacacataccaaccagtacggagaggaatactattctttcgtgaacgggcagcataccacgcagggcgggacgcaccagacggccttcaaagagcatatcgcgaggacgatcaaggagttcttcggcaaatacgaatacggtgacatccgcaacggactggtggcggctatcgccgtgaacgtcgaagaaccggtcttcgagtcgcagacgaagatcaagctcggttccacccagatggcacccgacggcgaatccatcaacaagtacgtgggtgatttcatcaagacaaacgtcgacaattatctccatatacacaaggaagacttcacggacatacttgaaaacaagatcaaggagaccgaacgggaacgcaaggcgatggcgggcgtgacgaaactggcgcgtgaacgtgccaagaaagccaacctgcacaaccgcaagctgcgcgactgccgtgtgcattactgcgatgtgaagaacaaccggaaagaggaaagttccatcttcattaccgagggggattcggccagcggaagcatcaccaagagccgggatgtaaacacacaggcggtgttctcgctgcgcggaaagcccctcaactccttcggactgacgaagaaggtggtgtatgagaacgaggagttcaacctccttcaggctgcccttgacatcgaagacggcctcgactcgctgcgttataacaaggtgatcgtggcgacggatgctgatgtggacggcatgcacatccgtctgctcatcatcaccttcttcctgcagttcttccccgaactcatcaagaaaggccacgtctatgtacttcagacccccctcttccgtgtccgtaaccgccggacaaagataaaagacaagcaggtcattgccgatgcggatgcccaccgtgccaagaacgaaaagaagaacgattttatcacacgttactgctactcagaggaggagcgtctggcggccatctccgacctcggtcccgagcctgaaataacccgattcaagggtctcggtgagatttcacctgatgaattcgcccatttcatcggtcctgacatgcgcctcgaacaggttaccttgcacaagaacgaccaggtttccaagctcctggaatactacatgggcaagaacacgatggagcgtcagaacttcatcatcgacaacctcgtcattgaggaggacctgccggaggaggaaggggagtaaatgcttttctttgaaaaaacgcattagaggtgatcttttatgtgtgtaacaaggctcacacagagtcaaggaaaacacggagaagaggaaatgactttagcatagctggaagatgggggttgacgggaggataaagatgcagagacaacaaatagcatcatactttcaaacgtcaatctgtttataaacaatttggattatgacataaagaaaggcatagaagaaatatcagatgatttcacgtatcgcttttagcatgtgcttacactgtccactctttattaggcccttgactattagagagtgtttatgagaaggcgttgacatatggactgacacagaatggatttaaagtaggaaggcaggtgcctgttgcagtgctatatatataaaggaatagaacttggtgaaagctatcgtttggatttgttgattgacgaaaaagtcaccattgaaattaagtcggtggtagagttgctgccagtacattttaagcaattgctgacttatctgaagctgcgggaacttagatatggatatttgataaactttgatgtcaatatgcttaaggatggtattcacagagtcctgaatggtttttagtgattactccttaaactcgcttggtgctttagcacctctttagactcttgaccgttttctacaagaatctgtctttttctccctctgtgctctccatgtctctgtgtgaaaccgcatttggaagaataatggatataagatgaaagaacatgattttataaagttcaaatgatgaaaaaagctattattatattattaatgatgtctctgttgcctgttattggtaaggcacagattagaggtaacattggaaacgcttctccattgcggaagctccagctggcggagatggcgataacgaacttctacgtggactccgtggacgaacagaagctggcggaggatgccatcaggggcatgctcgagaagctcgacccgcattccacctataccgacgccaaggaaaccaaggcgatgaacgaaccgctgcagggcgacttcgagggaatcggcgtacagttcaatatgatcaacgatacgctcgtcgtgatccagcctgtcgtcaacggcccttccgagaaggtgggaatccttgccggcgaccggatcgtgaacgtcaacgactcttccatagccggcgtcaagatggaacgcatcgacatcatgaagcggctgcgtggcaggaaagggacgaaggtgaagctgggcatcgtccgccggggcgtgaaaggcacgctgacttttgtcgtcacacgcgccaggattcccgtacataccctcaatgccgcctatatgatccggccgggcatgggctatgtccgcctggaaagtttcggcatgaagacgcacggagagttcatgtcggcagtagactcactgaagaaaaaaggcatgaagacgctgctcctcgacctccaggacaacggcggcggctatctccagtctgccgtgcagatcgccaatgagttcctgcggaacaatgacatgatcgtctataccgagggacgccggtctcgccggcaggacttccgggcaatgggcaacggccgcctgcaggatatcaaggtctatgtgctggtcaacgaactgtcggcatcggccgcagagattgtcaccggagccatccaggacaatgaccgggggacgatcgtcggtcgaaggactttcgggaaagggcttgtacagcggccgctcgacctccccgacggcagcatgatccggctgaccatcgcccattactacacgcccagcggccgctgcatccagaagccgtacaagaaaggcgacctgaaagactacgagatggatctcgagaaccggctcagacacggcgaactgatccacccggacagcatccatttctccgattcactgaagtattacaccctccggcggcatcgtgtcgtgtacggcggcggcggcatcatgcccgactgtttcgtcccgctcgatacgacccgtttcacccgtttccaccgcctcctggccgccaagaacatcatcatcaacgcctatctgaaatatgtggatgcaaaccggcaggcactgaagacccagtacaggtcgttcgacgcattcaacaagacgtatggcataccgcagtcgctgctcgatgcaatcgtgtcagagggaaagaaagagaagatagaaccgaaggatgccgccgagctcaagacgacgcttccttacctcagccaccagctgaaggcactcgtggctcgtgacctctgggacatgaacgagtacttccgggtatggaacgagcagagcgatatcgtcaacaaggccgtgcagctggcagccggcaagtagagggacagcgcacggcaacggcttcagacggatttctgcaggccgccagaaggaagtgaaggagaatatacggcagagccagcgcattctcgccggtctccagcctcccggacagccacaccgagaggacagctttcatggaacgcacatggcgacaggagcgtttccgcaatctcccagattcgacggaagagccaaaatatctccgtatttatttgtgtgttacatatataataggtaaatttgcacggattaaattttgtggaacgcgtgagaaggtaagcgtcatggcagcggagcttcgccagaggttacccccttttggttccctaagatgttggtcaaaacaataagtattttaaaattttagatgaacgtaattacgaaaacagttcaattgccagatggaagaaccatctcaattgaaaccggaaaggttgcaaagcaggctgatggcgcagcggtactccgcatgggtaacaccgtacttcttgccactgtttgtgcagctaaagaggcagttccgggcacagacttcatgcctttgcaagttgattatcgcgagcagtattctgccgcaggtcgttacccaggcggtttcaccaaacgcgaaggcaaagccaatgacgatgaaatccttacatcacgccttgtggaccgtgttctccgtccacttttcccatcagattaccactgcgaggtctatgtacaggtcatgctgctgtcggccgacagcgttgaccagcctgacgcccttgcagggtttgcagcatccgcagcactggctgcatcagacatccccatcgaacaccccacctcagaagtccgcgtagcccgtatcaacggcgaatacgtcatcgatcctaccttcgagcagatgaaggaggcagacatggacctcatggtcggtgccaccaaggacaacatcatgatggtcgagggcgagatggacgaggtttccgagcaggacctcatcggcgctctgaaggcagcgcacgaggccatcaagcctatgtgcgagatgcaggaagaactttcgaaggcctgcggtacggacgtgaagcgcgagtacgacgatgagatcaacgacgaagagctgcgcgaacaggtacgcaaagagacctacgacgcctgctatgccgaggcacagagcggcgacaacgacaagaagcaccgcgaggagacctacgagaagatcaaggcagacttcaccgaggcatacgatgcggcccacacagacctttcagaagacgacctcgaagaaaaacacgcagaaatcgaccgttactttgcagacgtgcagcgcgactccatgcgccgcagtgtcctcgacaccggcaagcgcatggacggccgtgcaacagacgagatacgtcctatctggtgcgaggtagacacgctgccgatgccccacggaagtgcgctcttccagcggggcgaaaccatgtcgctctctacctgcaccctcggcacgaagatggacgagaagatgatcgacaacgtactggagaagagctaccagcgtttcctcctccactataactttccgccgttctgcaccggtgaggccaaggcacagcgcggcgtaggccgccgtgagatcggccacggccatctggcatggcgtgcgctgaagggccagattcctgccgacttcccttacaccgtccgtctggtaagccagatcctggagtccaacggctcctcttccatggcgaccgtatgcgccggcacgctggcgctgatggatgcaggtgtcccgatgaagaagccggtatcaggcatcgcaatgggtctgatcaagaacccgggcgaggacaagtacgccgtactgagcgacatcctcggcgatgaagaccacctgggcgacatggacttcaagacgaccggtacccgtgacggcctgaccgccacacagatggacatcaagtgcgacggtctgtcgttcgagattcttgagaaggcgctcatgcaggcaaaggccggccgcgagcacatcctcaacctcctgaccgacacgatcgcagagccgcgtgcagagatgaagccgcaggttccacgcatcgtgcagctggaaatccccaaggagttcatcggtgccgtcatcggccccggcggcaagatcatccagcagatgcaggaagatacaggcgccgtcatcaccatcgacgagaccgacggtgtcggcaaggtgcaggtttccgctcccaacaaggagtcgattgatgccgctctcggcaagatcaaggcgattgtcgccgtaccggaaatcggtgaaatctacgagggaacggtacgctccatcatgccttacggctgcttcgtggagatcctgccgggcaaggacggtctgctccatatctccgagatcgactggaagcgtctcgagacagtagaggacgcaggcatcaaggagggcgacaagatcaaggtcaaactcctcgacatcgacccgaagaccggcaagtacaagctctcacgccgtgtactgctcgagaagccggaaggctatgtcgagccgcagcgccggccgcgcggagaccgtcgcccacgccgtgacggtgaacgccgccatgacgaccgccgtccgcgccgcgagttcagcgacagcgagaacaacgattgatcgtccgttctccctataatagacttttaaagtcatgagaggctttttaaatccccccgcaggcggctttcaacctgcggggggatttgctttatacacacctgaaaacattcctctgcccagctgtcacatcaacttgtgacacaccctccgccggttttgaattagttttacagatagaaccagtgtcttcccctttttctgcgactttccgcccctgtaaacagggaggaccgactgcccggattccaatcagccgtcacctgcattccaaccgatgtccggttgcacgtcaagtggtgctttcttgaagtccaagtaacgcccttttgcaagggaatcgggcatcttttccaatggatctgctatgtatctgataataaggtgcttgcaatccccccgacccggtttatatcagtcgtcttcacgtacatcgcttaaatccatgggaaataggacgataccggttccggcatcgcatccatgagtaaattatcttaacaaaaaccgtccctgacctgcatcaggaagcagcggaaaggattgattcctttctgcaatcagtggcggatctcccccactggggcagacttccttgctgccgcgggtgcagaaagaagggacaggatgcaaaataaacaggcagacggttgggaatgtggaagttaattgctaactttgatgcgcataaaaacaaagagggcgagttgccccgcccagtttgttttcacaacggaataatccttattgtgacttgcttgaaattctgatgcaaatatagtaatttaataactaagaaccaaataaaacggacagaatatgaagacaatcctcggattggatctgggatccaacagtatcggatgggccaaggtctgcgtggacgaccagggaaactacctgcacgacatcaaactgggaagccgtatcattcccatgagccaggacatcctgggaaactttgacaagggagtgaccgtttcacagacggctgtacgcacaggtttccgcagtatgcgcagaataagggaacgcactctgcagcgtcgggaacggctgcacagagtgctgcatactatgggattcctgccggcccactacgatgcagccatcgggtgggacagaaaagagcctgaaacatacggcaagttccttcaccacggagaaccgaaactggcatgggaacggcaggaggacggctcgacacgcttccttttcatcgaatcctttcaggagatgctggccgattttgcccgtcgccagcccggactggttgccgacggccggaagattccggcagactggacactctattatctccggaagaaggcacttacgcaggccgttcggaaagaggagctggcgtggatattgctcagcttcaaccagaaacggggctatttccagctgcggggagaggatgaagaggggaatccgacgaagcgggaggaatatcatgaactgaaagtcgttgatgtagaggtcggggaaaatggaagaaatgacggcagatggtaccgtgtgaaactggagaacggctggtcgtttcatcgtcaaagcaagacagacctgaaagaatggatcggaaagacaaaacagctgatcgtcactactgaatacgaaaaggacggggtgacacccaagaaagacaaggacggacaggtaaagcggtcgttccgtgctcccggagaggacgactggggactccggaagaagctgacggaaagacggctggaaaaatcggggaagacggtcggagccttcatctacgaccatctgctggaagagccggcagacaaggtacgcgggaacttcatacggacgatcgaacgaaaatattacaaaaacgagctggaggccatcctgcacgaacaatgcagacaccacaaggagctgcagagcagggaaatgctggaacggtgtgcggaagagctgtacaggaacaacgggacgcaccgcgacagtctgctccggaaagacatgatctatctgctcctgacggatctcatcttctatcagcggccgctgaaaagcaagaaatcgctgatagccgactgtccctatgaatattacgaatacgaggacaaaaagagcggaaagaaagaacggaagggcatcaaatgtatcgcaaagtcgaatccttactaccaggaattccggctgtggcagtttgtcctcaacctccggctgtatgacaggacggacgacagagaggtaactgccgaatatctgccgacaaaagaagcctatgtcaggctgttcgtttatctgaacaaccggaaagagatcaaccaggatacattgctgaaggactatttcaaactgaagaaagtgaaatgcggcaatgagaaggagttcgctatccggtggaattacattgaagacaaagaaaagaaatacccctgcaacgagacgaggcatgagctgctggccgcactcgacagagccggcatggagcacggctggcttgacgacagcggccggcagtatcgactctggcacctgctctactcggtggaagccaaagatgaggccgagggagccttgcgcagactgaaggatgacgacaaattcgtcagtgaattcctgaaaataaagcctttcaggaaagaatacggagcctactcggagaaagcggtgaagaagctgctggccgtcatgcgcacgggcagcctgtggcgggaagaccagatatgcacggctacgaaagagagaatcagccgcatcatagaaggagacatcgaagaggaaatcaaagtcagaatggggcatacggcatgtcccttcaggtctgttaccgacttccagggactgcccgagtggctggcctgctacgtggtgtacggcagacattccgaaacgacagacatacagcggtggaagaagccggaggacctgatggcttacatcaggaaattcaggcagcattcgctccgcaatccgatcgtggagcagtgcgtcctcgaaacgctccgcaccgtccacgacatctggaaggaagccggacagatagacgaaatccacgtggagttaggacggaacatgaagagcacggcggagcagcggaggaacatgacggaaaaagtactgcggaacgagaacaccaatctgcgcatcaggcgtctgttgatggaactgaaggatgaagccgacatcagggaggtacgcccgtattcgccgatgcagcaggagatactgcgcatctacgaggagggagctctgcaggaactgacgaaggaggacagcgaatatgcagagatcgccagaatatcaaagacggcacagccctcggcgaaggaactgctgaagtacaggctgtggctggatcagaagtactgttcgccctataccggtaagcccatatccctgtcaaagctctttactccggcttatcagatagaacatattatcccgcagagccgttactttgacgattctttcagcaacaaggtaatctgcgaatcggaggtaaacgcattgaaaagcaacagattaggatatgagttcatcaaggaacacggcggagagattgtcgcctgtacgatgctgggcaatgtacgcgtgctgaacgagcaggaatacaagacattcataacgggacattacgccaataaccggcgcaagagagagaacctcctgcgggaggatataccgatggagttcgccaaccggcagatgaacgacagccggtacatcagcaaggtggtgaaaggtctgctttccaacatcgtacggacggcagaggagagagaggagacatcaaagttcgtcatatcctgtaccggcaggattaccgacaggctgaaacaggactggggactgaatgatgtctggaacagccttgtatatacccgtttcaaacggctcaacgaactgacggagacagaagccttcgggcattggcaggacaaagacagacgggtgttccagacttccgtccccctggaactgcagcgcgggttcagcaagaagcggatagaccaccgacaccatgcaatggacgcactggtgattgcgtgtgcctcccgaaacatcatcggttatcttaacaacgagtctgccgaaagtccggagaagcgggaagacctgcgccggaaactgtgcgacaaaaaccgcatcatccggaagccatgggaaagcttcacacaggatgcccgtgcagcgctggaagacatagtcgtcagcttcaagaactatgtccgcatcatcaataaagccacgaactactatgagcggtacgatgccgacggcaggaagacaaaggcagaacagaaaggaggggagatgtgggcagtccgaaagccgatgcacgaagcgacctattatggaaaggtcaatttaagaaggaaggaacgggtcagcctgaaggcggctttggaggatattccttccatctgcaacagggatctgcgcgacgatattaacggattggtggaaaagcattacaacaaggaacaggtgctggctcatttcaggagcgtcggcaaccgatggaacaaacagcatatcgacaaggtggatgtctggcggttcagcgacggaaaggaagaaatggtagcaacaaggaagccgcttgacacctcgtttgatgccaaacgcatcgaagctgtcaccgacacgggaatccaaaggattctctcaaactacctggaagcaaagggaggagatcctaagatagccttcacaccggagggaatagccgacatgaaccagcatataacggcttataacaacgggaagcagcacaagccgatattgaaggtgagagtctctacgaagctcggaaagaaataccccgtaggacagacaggctgcaaagccgggcagtttgtggttgcagaagccgggaccaacctctactttgcagtctatgaagatggggaaggcaaccggagctacgatacgattcctttaaatgaggcggtagaatgtctgaaacagggacttccaccggttcccgaaacgagagagaaaggagaccgtctgaagttttatctctcaccgaatgatcttgtgtatgtaccggcgggagacgaggagaatgaaatagacagagaacggatctacaagtttgttgattccagcggtacgacagcaaacttcatccctcacaggacagccggacttatttacaatgtggacaagaaactggccgaggcattgtgtaatggcagcatcattcagaacgaatatggcgtaggaagtcagcaatccaaaaatcagagggcactgacaagggaaatggtcaaggccgtctgctggaaactggaggtagaccggttggggaacattcttagaatcataaagtaaagaccgcacagaaccatgataaagaagaccctttgtttcagcagccctgcctatctgagcctggccaatgcgcagctggtaatccggctgcctgaagtggagaacaatgagacgctgccgcagaggatgaaaaaagaagccgagcgcaccatcccgatagaagatattggggtggtgatgctcgacaaccggcgcatcacggttacgtcaggagtcctggaagcactgctggaaaacaactgtgccgtcatcacctgcgaccagaaggggatgccggtcgggctgctcctccctttgtgcgggaacacgacacagaacgagcggttccgcttacagctggacgcctctcttcctttgcgcaaacagctctggcagcagacggtaaagcagaagattctcaaccaggagcgtgtattgcatgcaaacacggacaagaacaccggctgtatgcgtgcgtgggcgaatgacgtacgcagcggcgacgccgacaatctcgaagggagagccgccgcatattattggaagaacctttttgcaggtcatcccggcttcgtccgtgacagggacggggcaccacccaaccatctgctcaattacggttatgccatcctgagggctgtcatagcccggtcattggtgggaagcggactgttgcccacactgggtattcatcatcataaccgttataatgcttattgtctggccgatgatgtgatggaaccataccgcccgtatgtcgaccagctggtcatcgacatcatccgtcgtaatgaggatatatcggttctgacgaaagaactgaagatgcagcttttgagcatccccatgctggatgtcgtcgtcaatggaaaacgaagtccgttgatgattgccgcacagcagacgacggcctctcttgtcaaatgtttctcgggagaaatccgacgtgtcagctatccggaaatgtaggttatcatgatgcggcttgatcgtttcagtgaatatcggattatgtggattctcgtgttcttcgacctgcctacggaaaccaagaaggagaagaaagcctatgctgacttccgtaagtccttgatgaaagatggattcactatgttccagttctctatttacgtacgccattgtgcgagtatggagaatgccgaagtccacatgagacgggttcgggcaatgctccctaagatcgggaaagttggcatactgtgtattacggataaacaattcgccaatatacagcttttctacggggaaaagccgaagcctcccaatgctcccggacagcaattggaactcttttagggtcttccggaatttggagtgataataattagttattaataatcaactacttacaccattgctcatatatgttaaaccctttatatacggagaattataatcataatgtgctaattagtagtgcaggagttactataacttataaattcacttcatttagtctaaatccattattaatgagaaggttatgaagagatttttgtctcaaactttgagtatcattcataggttatcactccaaatgtcggatgaaccctcttttagacctgtgaaaagtgggctcttccgttaaatgcgtagatgaagctctttgatatttatgggatgtcaaaggatctgtatcacgtatcaagttatatgcaacattgatttacagttggttgggaaataagtgcgtgacgttttggaagacaaacacagatcttcccctagtgtcaacaatcgtactatttgttctgcaccataaagtcattgaaaatcatacagatagcaaaacttttaggaacttattgttcctcagatatttataatacatattaataataaattacgtgtttagttacggaattaaggataaaagtatcagttggagtatctttctctgaatgtttggataaaagtcattcagattatagtttcctgtaacggttactacttgaaacaaaaaaaactggataaatgtgcctgtatttctggtaaacaaaggctataggaatttcaagcattattttccgaacaacaatagtttaaaatgcaccttcaataagagtttcgtataagtaatggtaaaacagacaagaagtatcatatttttcttattccttatgtcatagcaagcaaaaagtcccacactttaaagtgtaggacttttgccttgtggtattttttattttccaaacgacaacccatccatctgataatcaaccatttatcttcaatgagttgttgttgctaccacaaaggtaggaattttcaagcaaatcacaacgcaaaaatgattacctttgcaaagcaaggtgttgttgttgctaccacaaaggtaggaattttcaagcaaatcacaacttaagaggacagcctttcacgcgctcccatgttgttgttgctaccacaaaggtaggaattttcaagcaaatcacaactcaacatctccataaggatattgcgcttaagttgttgttgctaccacaaaggtaggaattttcaagcaaatcacaacgaactgcgacaaaaccatagtaatagactgttgttgttgctaccacaaaggtaggaattttcaagcaaatcacaaccgcaagcccggttatgccgatgcctggccgttgttgttgctaccacaaaggtaggaattttcaagcaaatcacaaccatcgttctacgtcaacgacggatcgttctgttgttgttgctaccacaaaggtaggaattttcaagcaaatcacaactcgtcctacaatcctacaaaaacacatattgttgttgttgctaccacaaaggtaggaattttcaagcaaatcacaacaacaggaacggaacgccgcgtatcatcaccgttgttgttgctaccacaaaggtaggaattttcaagcaaatcacaacttaacttgttactcataactacatattaaggttgttgttgctaccacaaaggtaggaattttcaagtaaatcacaactcaggttctaattgggagcaagacgtgtcagttgttgttgctaccacaaaggtaggaattttcaagcaaatcacaacggtttctccctctgaaacccggcataagttgttgttgttgctaccacaaaggtaggaattttcaagcaaatcacaactactttgcagagtggtattcaaaggacggcgttgttgttgctaccacaaaggtaggaattttcaagcaaatcacaaccgtgtaggaactgccgtcattgacaaagagttgttgttgctaccacaaaggtaggaattttcaagcaaatcacaacgcaaacgtggcgaaaaagccaaagtttgtgttgttgttgctaccacaaaggtaggaattttcaagcaaatcacaactagttgaggataaggcagcagcagagcaatgttgttgttgctaccacaaaggtaggaattttcaagcaaatcacaactatttggtgacgagggcgaagcagagccgggttgttgttgctaccacaaaggtaggaattttcaagcaaatcacaactgtatgagaaaggccatacataatcgggcggttgttgttgctaccacaaaggtaggaattttcaagcaaatcacaacgaaatgactgttgcacgtgctgcaatggtggttgttgttgctaccacaaaggtaggaattttcaagcaaatcacaactgatagccgcttataccctcgctaatagcggttgttgttgctaccacaaaggtaggaattttcaagcaaatcacaacctcttacggcagatgggtattgaataggcgttgttgttgctaccacaaaggtaggaattttcaagcaaatcacaacaaagatgagcttgcgtattgcttttttacgggttgttgttgctaccacaaaggtaggaattttcaagcaaatcacaacagactcgtacttctgtcaaggcgatgactgggttgttgttgctaccacaaaggtaggaattttcaagcaaatcacaactttcaactggaaatattcttcttcgttcttggttgttgttgctaccacaaaggtaggaattttcaagcaaatcacaactacctaccctgatgatttcgtcagtgcgcaggttgttgttgctaccacaaaggtaggaattttcaagcaaatcacaacatagtttgggttataaacttgatcaggtttgttgttgttgctaccacaaaggtaggaattttcaagcaaatcacaacagatcgaagaaaatcttttttccttctatcgttgttgttgctaccacaaaggtaggaattttcaagcaaatcacaacgaatgcttccaacgagttgcgtggtgagacgttgttgttgctaccacaaaggtaggaattttcaagcaaatcacaacattgtgtaattttgatgatggacatgctgcgttgttgttgctaccacaaaggtaggaattttcaagcaaatcacaacagacgatttcgttagcgcgcatttggataagttgttgttgctaccacaaaggtaggaattttcaagcaaatcacaaccgtctcctacctttggagacatcaaatgtagttgttgttgctaccacaaaggtaggaattttcaagcaaatcacaacgacgaaacaccgtaaaaccggcagacgctagttgttgttgctaccacaaaggtaggaattttcaagcaaatcacaaccacgtcttaaggatgctttgcctcggatctgttgttgttgctaccacaaaggtaggaattttcaagcaaatcacaacatcagactgtaaagacgtgtcagcgtcagtgttgttgttgctaccacaaaggtaggaattttcaagcaaatcacaacgcatccgtggtatcatagagaaacggcacagttgttgttgctaccacaaaggtaggaattttcaagcaaatcacaacaagaacgcacaagacatcatcaatgggttagttgttgttgctaccacaaaggtaggaattttcaagcaaatcacaaccggcgatgacggcatactgcagggggacgggttgttgttgctaccacaaaggtaggaattttcaagcaaatcacaactgcatagagtagtgcgatatacgcttctgagttgttgttgctaccacaaaggtaggaattttcaagcaaatcacaacatgttgtaagtgtaagtagggaattaactgaaattccctacttaatgaatatgaagtttgaagttatataatcgtcttgaacatgctgaatatgaagcttgaggcgatatcatcgtcatgtacacttagatgaataggaaactcagaattataccatcattcttctttggaaccacttgtggaaaacagggtcggttattttcagttcttctccttccttttctatcaggtcacgttccagaagggctgtcttcagccggttcacattggaatagctgcctaaatggtacttctcccggacttccgacagtgtaaaattctttgtgacgccggcgcagatcgcacgcaggaagttaagctgatatcctgagagcggctccaccatctgcatgaaaagcacttcattcgtagcaagaagatcctccgaagcctgttttatgtccgcctcgtccacacgctccccttcctctttctgtgtgtaaacaagccaggacaactgctgtacataagccgaataactgtccgtgaacctgcagatttcctctgccagagctgtgctgatggtcctttttccgtctgcaaagtggctgacaatatattccaaccattcggccgtcggaatcttgtccaatgctatcaggtcgccgaactgatagaaaggcatactgtggtgcaggaagatgctgcccatcaagtgatgcttactaccgaaaagacagtaggacacgtgctgctggtgctgccagacactcctcagccgtgcctgtacctgtttgctgtcggccatttcgcctatctgctggaattcatctatgcagacgatgatacgttttcctttcctcacggcaatcttctcgaccattccgagcacctcttcaggcgtatgcgtcttcggcgttatccctaaagaaatggcaaaatcgctgttcggttcagggctgaaggaaatccgcggtgtaagtctgtacaggaagtcccgggcctcttcgagccacatgctccgctgcgaagcggtctgcttcaacaattccgatgccagcctgttgtaaaagtcgtactcacttttacagccgaagatgtccagataaaccgtaaggatgctgtcgttcgggtcgatcctgccacacacgtgtttcaccagggaagtctttcccaaccgtcgcggggacatcagtatgacgttgatgccgcccctgaaatcattcaggagccgtttcgtttcctgcgaccttccaatgaagttgtagtcggagaccgccacaccataaacaaatttcctgcacatgacattacattttcagtttgttttacgaatgcaaatatagtaataaaacggcaatcacacaagcaggtgtcacacaaaattgtgtgacacctgcttgtgtgattgccaatatgctttctacaagatagttacatatattcttccatgattttacataccgccgccggcacccattcccatgccgttcatctgctggtcgttcttcttttcctggaagtcgttagaaatgttgctcttgtgtgtctggaactgcttcttggtgtttccgaagttccaggtgacggtcaatgcaacctgctgggctggaatccggatgttcatacggttctcgaagccggctccacggctgtactggctgatcttgatcttgcctgtcagcggtacgaaatacatcagactgatgtcgagcttgtccttgacaagactcttcgaaagcgacgtgttgaacatattgaagccgccgttatacccctgcagggaatatttcttcgtcagtccacccacgaacatactccatttcagtttccacggcaaggtctgctgcagtcccaggaatcccgtggcctgccatccatggctgtgttcgcccagctggttggaacggatgtcaccgtaatcgactcctccgttgaacatgatacgggtcttcggcgtgagggcgtagttcatgaaagtagtgaaattcgtccagcggctgcgtacgatattgccgtaggtagtgttcagaaccgtcccgtccatgaaggaatactgctcgatctggttgttggcaaacgattctcccaacgtcatgttgaccatgaacttcggtgtgaagtagttgaagacaaaacttatattatggcttttctcaacggccagatccgggttgccatagctcagcaccgtcgggttggaacggtcgacatacgggttgagatagctgattccggggcgggtgatgcgcattccgtagttcacaccgatgttgaatcctgccgagatattataagtaagactggccgacggcaccagattaccgtagttcttcttgaagtcgctgcccggaccgacgatgaactccacgttctcccatgtatgttcatagcgcaggccgccctttgctccgaacttgcccagcgtcgcactgtattcggcatactcggcaagaatgttctgggtgttcttgtaattgacgctgttggctgcattgtagacctcgtttccacccgtgatgtcatagtactttgaatcggacgagttacgacgggaaatgaacttcaggccggcattcagcgtctgtcccttgcccagcggcgtggtgaagtccgcctgtaccgtatgctccgtaccccgtgtcttcgcctcggagtagaggtcgtgcaacggaatggccacattgcccggtatcgggtcgtagacacggcggttgtcattctccgccggagaggttgtgaaaagatagctcagcatcaggctgcttgtacgctctttgttgaagaaacgctggtagtccacgcttccgttgaagctcgtgttggtgttctccatcgtcatctcattgccgtaggagaaccccgcagctccgtatggaccgcctgagaaacgtgtcaaagggtgcccgtcgttcttcatagagaaagaagtaagccctacggaggcaccgatgttgctcatcgagtcaagttcatatcccaggctgatgctgttcatcgtgaacgggatgcgtgtgtgcccttcctgccagtagtccatgcgtgacccgtcgacggaggtacggttgatttccgttacagtcccgttgatcagggccttgctgtacatgacgttggcactgtaggtaagttttccctgctgtccgctcaggaagcctgaggtgcgccatcccttgctgcttgctgtgaggcttacattgccgttgtagccgttcatcttcacctttccctgtccgtcggcatggttcatgacgatgttcagcacaccgccgacaccttccgcatcgtattttgctcccgggttcgtaaccacttctatcgacttcacggccgatgccggcatcgacttgaatatctgtgacgggctggccgagaacatcacgttgggttttccgtccacatagaccttgaaggaactctggccgttgacggtgatattgtcctgtccgtcgaccgtcaccatcgggactttgcgaagcatatcgagtaccgtgttcgtcttggcatcgttgtcggcctgtacatcatacgacatcttgtcggtctccatcttcaccagcggcttctgtgccaccacctcaacgcctttcagctgcttggcatcgtcctgtacaagaagctgtccgaggctgatcgtgccgcctgccgccgtcagctgtaccttgcgtacgatttccttgcgccccatcgagctgaaagagatgaggtaactgccctgtccggtcactttctgggcgaacttcccgtcctgtcccgtgaccgacatggctaccggcttctcgcttcttctgcctttgtagactctgattgtagcgaacgactctccctcatgggtcagagaatcgagcagctcgcctgaaataacagatgtctgaccttgtgcggccatggaaaccaacagcaatacataggtgaaaaacaattttccaattttcataatagtatgttttatggatctcaagttacggtattataacttttcgcctaaataatagaatcatttaaaattaatattttaagcatactttgtaaggaggtcgacaagactgcctgtctgcaaattcatcctaatcaagtgtaccacttatataacacactgcaaaagtaggataaatattctgtccctgcaaatgtttttcctaaaaaataaggtactcatagaaaataatgtgctcaacccttcatgccaccttaattatatagaagccgcatcggatttcggcactgcactgcattcttttactgcactctgctccctcccagcaataaacagtaaggttgtgcgccatcgaaacgaccggtgttgacccttaacacggctggcgttgaccgacgacacgatgagtgtcggacatcagtacaacgacaggatgcggaaccggttgcattcccgtcacaaaatactacgcaaacggcctgccataaggctatttccaaaagcctgtaaagggtgtgcagacatcaaaaaggctttctcccgtaacacaaaaaggatacaagagaaagcctttcttacctaagataaaagcaagaagaatgtattttcaccctatctcacctgtgaggtgaccggactgttgatgcctttcatcgctaccaggaaggccttggcagaaccgaacttcaggcgcatatcaaggcggacggggatgtggttcttgtcatcagtgacgtaaaaactggcaatgtcgcgccacttctcgtcttcatattcataataggtaagacgcagacagcggtacttgtgaccattgtcagcctttatgttctcctttcctaaatagacgatgcgggcggcatgccggctgttcccatctacgatagggaacttcaccacctcgcctttcttccagctttcaggattgaagctgcgtgcccgaagaaagatg

SEQ ID NO: 616 - DNA, 24485 bp, synthetic construct
  misc_feature 1..24485: note = Synthetic
  source 1..24485: mol_type = other DNA
tcataatcgtcaaaaggttaagtcattgttattggagaaaaggaaaaatacgtatttatctattactcctctttccccttttcaatctcatttataatatctttcagttcttctggcgagatgttatcctcctttgcaaaaaaggaaaccatttcacggaaagaacttttaaagtacttatcaacgaagcctttcatgaaatctgccttatatttcgtctgttctatcttcggaacaaagtgataggtcagtccatgctgctcagcgactacatatcccttacgcttcagattgttcaaaatagaagccactgtggtataaggaggtttaggttcttccaactcttgtagcacatctttgatagtgcaagtttttaaactccatacctgtaacattatttcttcttcttgtttagttagtttctccataaattatatatctaaaagttcacgccacaaagctacgaattattcgtaataaagtcaaatataaatagtaaaataaagttaattgagcaacatttaatgttatatttcaatgtaatacgaaatgttagtaagaataaacaataggtaaagtattagcttttacaatagttttaccctatgaaatataaagttattacgtcagaactatcagcctctattgataataatatttatcgtttttttcaacatctcttgcctttatgcttgtaaaagtgtacatttgtacttaaatattaagcgtaaaacaaaatgattagaaaactatatacccaccttactatggctgccttaatgctgagtagctgtgacaaaggaacacaagaaaaaccgaaggaagactttcatggtattaagacgattactaccgagattgttgataaaggcgatcaggctgttaagaatgcaaatagaagggatgcaggcttcatcagcaacagagcaaacgaagtaacactaactatcccttgttttggagttgttaatatgaatgttcttgatctcttacctcgtcctgatgaaataagccgaaaagattctactatcattgaacaactaaacaatggagaggtgtttttattacagccaggcacaaaaggtatcatgctgactgatacaggatcaaagctattagttcgctttcaaatgggcgaactatgggtgtggaagtcggctacaaagtaattatggatgaaccatctgttaataacacattcccgtccctaccccaaatcatcaatttaaccttactataaagctgacctttagccaaaagtataaatcgcaaatcacatcattaagatatgaaaagaagcctttttcttgttttcttattactgacattcattaccaatgggtatgcaatcacagtaaaaaacccagttgactacgtgagtacattagtgggatcagcctcaaaatcagagctttcaaccggcaacacctaccctgctattgccttaccatggggcatgaacttctggactccacaaacaggaaagatgggagacggctggacttacacctacggggccgataagattcgcggtctcaagcagacacaccaacccagtccatggattaacgactacggacagttctctatcatgcccgtcgtcggtaagaaagtctttgatgaagaaggacgcgccagttggttctcgcacaaagctgagacagctacaccatattactataaggtttatttagctgactatgacgtcactgcagagattagtcctaccagccgtgctgctgcaatgcgcttcacctatccacaaacagatgaagcttatttggttgtagacgcctttgacaagggttcttccgtaaccattatgtctgacaaacgtacaatcgtgggctatacaactaagaatagcggaggtgtaccagcaaactttaagaactattttgtgcttcgtttcgaccacgaattctctttcgttggcagcattgaagatgggaaactatcagagggaaagacttctgcaaccagcaatcacactatggctgttgtaggatttcgcaccaaacaaggcgaacaagttaatgtgcaggtagcctcatcgtttattagtgacgagcaggcattgcgcaatctcaaggaagttgagggaaagacattcgacgaagtgaagacagaaggtagaaaggaatggaataatgtgttaggacgtatagaggttgaagatgacaacatcgaccatcttcgtactttctatagttgcctctatcgctcagtactttcccacgttcgttctatgagtttgacgaacagggtaatcctatccattatagtccatataatggcaaagtactaccgggttatctctttaccgacacaggtttctgggacactttccgttcactcttcccattgctcaacctcgtctatccttcaatgaatgagaagatgcaagcgagcttagtcaatacctataaggagagtggattccttccagagtgggcaagcccagggcatcgtgattgtatggtgggcaacaactcagcttcaatcgttgctgatgcttacatcaagggcttgcgtggctacgacatagaaacactttggaaggctgtagtgcatggtgctaatgctgttcacccaaccgttagctctactggacgaaaaggctttgactattataatcgcttaggttacgtaccttataacgtgggaatcaacgagagtgttgcccgcaccttagagtacgcctacgatgattggtgtatctatcagttaggattaaaactcggaaagagtgctaaggaactcaaacctttcaaactccgagcaatgaactatcagaaggttttcgacaaggaaacgggtctgatgcgtggacgtaatgaggacggtagcttccaatcgccatttaatcctttcaaatggggtgatgccttcacggaaggaaacagctggcattacacgtggagtgtattccatgaccctgctgggctggcaaagctgatgggaggatacgataagtttaatgcaatgttagacagtgtattccaacttcctcctatctttgacgatagctattacggctttacaattcacgaaatacgtgaaatgcaaatcatgaacatgggcaattacgcacatggtaaccaacctatccagcacatgatttacctctatgactacagcggacagccttggaaggcgcaatattgggtgcgtgaggtgatggaccgactctatactgctcagcctgatggctattgtggcgacgaagataatggtcagacatcagcttggtatgtcttctctgctctcggcttctatcctgtttgtcctggcagtacccaatatatgattggtactccttatttcaataaagtaaagatacagcttgaaaatggaaagaccattacaatccatgcagacaagagtgatgctgacaatcgtttcattcaacgtattaaagtgaatgggcagccttattcacattattatattgagcatgaacagctgttatcaggtcctataatcgacttcacaatgggcaataaacctgcgaaataggaagctatcacatcccctttgcactcaataaacagattttgtttctatttgaacaaatctgttaatttagagacagtctgttaatgaattctataaaatcatttaaaacggtataaatacttccctgctattataatttctttacgtatatttgcaacatattaatccaaaaatgaatatataacaatgaagaaaaactttttttctaaccacgctttatgtgctggtttagtattaggtggactgtttacattttccagttcatacgcggcaaacaatgaagtaaaggataataacaacatagtagctgcagcacctacaaccaactctaagattgttggtacctgggagcttacaaataagggtagctatgccattgtgcgcaatccaagaacacataaggaatataaggtaggtttcacgattgacagatatgacgactataagttcctccctgttgactttgctacaggtgagcctgttaatcttcgtacgcttgttggtcacgatgataacgacctcgatgatgagttgcaccgtttcgatttctaccatgatggaaccatgagcgttatagaaagagaagacaacggcagatggaagcgtgatgatgatatcggtgtttatggtttccgccgtgatggtttctttatgaagatagacggtaagatgcgcaagaacctccaaattagattcttgagcaacaatgagtttgagctaactcagaccaaattcaatgacagcgacttgagaagagtagtcgttaagaaggttatgagatatgttcgtgttacaagaaagtaagacataacaaactcaaacttataatatttaccccaattaatagtagcttgaacttatataaagctctgttaattggggtttcttttggctcttcagcaatttggagtgataccttttgagattagaactttaaagaaacctcacacagagaaaaggagaacacggaggattatttataacaaagctatttgttgacacagaggcaccgttggtgcgtggagaaacagagaatatctgtgagttttattaatactttggtttacttcattacaaagcagtggtttgcaagatttcttaaaacgtttattaccaaagatatcagcaacacgtacactacggctctgtcactctttgtgccttcggcacctctgtgaaattgtcttttatgcttttcacctccgtgttctcccactctctgtgtgacatttatatgtagtaggctttccttatcactccaaattcctgaagaacctttctttttagcctcttcaaaatatgaaatggtaaagtaaagctctgttaaataataagtcacacagaaatatagagagcgcagaactaaaaaacaacacacggaaaaacctctttgggctatgcgcctttaaacccaaaagacaaagaaatatattgacaaaatattcaagaaaaaggtaggaaaaaaggttaaaagcaagctattttagcacctttgtaatctccttgttatcaagtagttgcagagagaggattcaaaagatgcttaataaggcttcaaaagggcgttagttagacctcaaaagggcaccttttgcaagccaattaggcgttatttgtaagctgtttgatggtctttacaaaatcagtatgtgaaaaaatcggacaaatcagacgttatcaaaagattaaagtgataaggtttaccctttgcatggagagctttaaaaaacttcatacagagaaaaagagaataaagacaaagcaatagaagtccacaaagacaacgacaatgtgtggagcatcgaaggctgtttgcgagttttatagtcaccttgttagcagggcaaaaagaaaggagtgaattctcaacgatagagaactcactcctttataaatagggttgtgtgggttatttcaccacctttttgtaagttttgtttccttgtttaatgataacaacgcccttcacttggttttcgttcacctcacgtccgttaaggtcgaatacctttcggggttggtttttgtcgttctcgatagcagagatgcctaaagaaacattgtttgtgtcctctactttccagcctttgcttaatattttattaattatttcggttgagtatttgttctcttcacccactatatctttgagaattaatattctttcgtagttcgaaggatcgctctctactggcaaatcgttagctaattgctccatttgctcaagagtaatcttatttttgtggatatctaaattcttaagatttggattgtttgcaatatttatttctgttatattgtttctacaacaatcaattcccataaggccatcatggtctgttatagttaatttggttatttggttgtcgttacaatatactgctctgagaacacccaccgtattggaaatatttagctcattcaatttattgttagagcagaacaagtaatttagtttaccatcttggggtaaattgagagtagaaatgttgttttctgtacatattaatactcttagtgccttgtttgtagacacgtctaaagttgtaaaattgtttctactgcaatcaagtcgtattaatttcttagctttcttggtgtcaactgtggtgatatggttatctggaaattctaaaaataaaagttctggatttgagatatctattgaggtgagttcgttattggggcagagtaagtctgatacgtgacccaaaattttcactgtattcgaggtaagtttataggtttggaagtaatattcactaaatctttcagagtctctttttaatgttgaactcactaatgttgcgccttcaagttgtatatcttcaacatttgcaccaggcaacatcttgagttgcacattaatagtttcaccaacactcttatttgtagtgaaagagatgtaaggtgtttcagagaaattaggtatttcagctcctgttacatctgtagatttccaacctttattatttaaatttttcgttagagcatttaaaaagtttataccatactgttctataaactcacttataaactctattgatggaactaatctaaagtctccttgtctgtttgacgcatctccaacagtaggtaaagaggcaaccagttgctcaattagagacatgttagtggttgactcaatagcacctacataaataagctttggattatattggacgcttagctctgatatgttgttattgctaaaaattaaaacgcttaggagtggacagttatctatactaagtttgtttagtttattaaaaccacaattgagacgaaccaattgatttgctgctgaaatgttaagttctttaatctcattataacgacaatctatttcggtaatactctctaacgatgtttttaatgttgttattttattatctgagcagtctaatgaatacaaatttttagcataagacaagtctaattctttgattttattatcgttgcactcaagcgtgctaagattagtacagttatctacatgcaaactttcaagtaagttattagaacatactaaataccttaaatttggacattttgagaggtctaatgatgtaattttgttgttggcgcaaataaagtcactcacttctcctataatacgaacctcttgtgaggtgagtttataggttctattcgattttaatagatttgggaagtcttcactttttgttaaagtggcaccttcaactgtaatgctctctatatttgaaccgagtggatatgatatttctaagtagatttcttcgccaacacttttatcagttctgaatgttatttgatctttgttgccttcttgttcgagagtttgagcattgacattgtcttttttaagcgcaacgacatcgagggcagacgagcctgcattgttgccgtttcgttgctctgcgccacgcatgtgatgggttggtgtactactttcgttattcgaaagatgtgctgaataattgggacaagctccattgagggatgccattgttgtgcctcctactaaaagaagcattgataaaaatagtaagattcttttcataaataaatatttcttgaagtttattgcgacaaagatacacattttttaataagaaaacataaataatcctatgtattaaaataaatctatttaaaatataataaaagttgtataaatgaaaaacaaaaagtactcttcttatctgttaataacatttttattgacgtccaaaagcattgcggttggtaggtaaaagcaatgtggttaagcgatagcttcgagggcttatcaaaacaaaaagcgacatcatgaggtgtcactttcgttgttttatagagaaatgaagtacgcttatctcaaacggaatttacctgtttgactaaaatataacataattctaagctgctgttgacttggagaagtccatgaagacaacgacaatgtctggagcaacgaaggctgtttgcgagttttatgcacaaagcatttatccttaaaattatcagaaagccgtatgtttcgtctttgtcgatttttgtactattctcacctccatgatattgcattaatctccagccacccttcatctctgtgtgacttattatataacagaactttactttatgatttcatatttcggaagaagcaaaaaacagcaaaaaaagttccgaaatacagcttttttgtgtaagtttgtactctaatttagaactgagtaaaaaacaacataacacaaacaataggatatgaaacgtaaaacatggcgtaaaaaccataaatggattggtatcatcataacattcttcttagtaatgttctgcctttcaggtattgtcctcaatcatcgtcaactcttttctgatattaatgtaagccgtggaatattgcctggtcagtatgaattcaaccaatggaacaacggattactacgtggaacattacgctacaaagattataaaaacaaagataaagtgttcatatatggcgcagcgggtgtcattcaaactgatacaactgcttctcacttcacagaatacaaccaaggtctacctgctggtgctgactatcgacagatgcgaggaatggctaaaactccacaaaatgacctgtttgcggttagcgtcatagacttatataaactgggaaagaacgcatcttggcaaaaaatagacttacctaagcaagaggatgacgaactattgacagatatcaccacccatggtgacacgctcatcgttctttctcgttctcacctctactatgctacagccccttataagaagtttacttgtctgacactacaagctggtgaggggaatgaggggaaggtatcactgttccgtcaaatgtggttattgcatagtggtgcactgtttggaaccgtaggaaagctcattgtagacggaattggagtcgtcttaattatcctttgtgtgacgggtatatggtattggattcgtcgtaaaacagtatcaatggtcgtttggcatacaaagattgggcattacacattcgccttaacgctatttatcgcaataacgggatgggcattacgtcctccactgatgattctcctcgccacaaacagtacgaaaccattgcctggtacgaccttagataatgataatccttggaatgataaactaagaatgattcgatatgatgagcaagctcacgattggctcatctcgacttcggaaggtttctactctcttaagaatctctcttccaagccaacacctatcaccacagcacccccagtgagtgttatgggtcaaaatgtttggcaacatgcagacaacaaatcatggatagtaggctccttcgatggtctattctactgggatcgtaagaataacgtcgtactttactacaatgatgctatggtctctactccccgcataccgggtactgcaccagacgaacagacaatctctggctatagttctgatttcacaaacaaggaatgtatagcaacctatttccaaggttcatccttcgcaaaacagccagaagaattgaaagataaacccatgtcgctttggagtcttgctttagaggtacacacaggtagaatctatgccggtgcattaggctccttcctcttcattttcgtcatcggcatcctcatcatcttcgtacttgtttctggtaagaaagcgtaggaatattacaaaaaaagaattgattgcattgcgattaaaattaatcgcaatgcaatttaatttatacataacataggattctatgataaactaatatagaatcttcctcaactacaatatgaattcaactgtttatgcatactaaaataaagagaattcacttgtttttaaaaaaaattaatattaactttggcactataaaacacaaaaaagagcgagttgccccgctctgtttgttttcacaacggaataatccttattgtgacttgcttaaaaatctactgcaaatatagaaagaatataactaacaaccaaataaaacaagaaaaaaatgaaaacaattcttggattagacttgggaaccaatagtattggttgggctaaagtctgcgttgacgacaacggaaactacacacgtgagattaaacttggcagccgtatcatccctatgagccaagacacactcagtaactttgacaagggagtaactgactctccagctgctgcacgaacaggttttcgaggtataagaagaatcagagaacgtgcgctacaaagacgagaacgcttacacagagtcctacacgtgatgggattcttgcctccacactacgagaatgccatcggatggtatcgagaggaagccacaacgtacggcaagttccttgacaatgcagaacctaagttagcttgggagaaacaagaggacggttctatgcgtttcctctttatggattctttctatgaaatgatggctgattttgcaaatcatcaaccgggaatagttgctgatgggagaaagattccactggactggacactttattacttacgcaagaaagcacttacacaagctgtcagaaaagaagaattggcttggatactactcaattttaatcagaaacgcggctactaccagctgcgtggagaagaagacgaagagaatcctactaaacgtgaggaatattatgaactgaaagttgtcggtatagaggctgccgaagaaggaaaaggaggtaacacgtggtataatattacattagagaacggctggatatatcgtcgacagagcaaaattgagctaaatgactggatagggaaagtaagaccgtttattgttacaacagaatacgaaatagatggagttaccatcaaaaaggataaaaatggagaagtgaaacgttctttccgagcgccaagtgaagatgattggggattacgtaagaaacaaaccgaaagtctcttagaggaatcaggtaagactgttggaacatttatctatgaccacatactttcagaacccgctgataaaatcagaggtaactttgtacgtacaattgaacgaaagttctacaagaaagaattagaagccattctacgtgaacaatcaaaacatcataaagaattaaaagacatagatacgcttatagcctgtatcaaagagttatatcccaacaacaagcctcatcaagatagtttgatgaagaaggatatggcgtatcttttaattacagacttgattttctatcaaagaccgttgaaaagtaagaagtcactgatagcagactgcccatacgagtattacaaatacgttattaaggaaactggagaaatcaagcgacagggtatcaaatgtattgcaaagtcaaatccttattatcaggagttccgactatggcaattcatcatcaacctcagactctttgataggactaatgataaagaagtcacttctgaatatttgtcttctatggaagactacaccagactgtttacatatctcaacgacagaaaagacattaatcaagagaccctattaaaagacttctgcaaacaaaagaaagtcaaaataggaatggaaaaggagtttcctatccgttggaactatattgaagacaaagagaaaaaatacccttgcaacgaaacacgtcacgaactacttgcagcattagacaaagctggtatagaccatagttggttagatgataaagaacaatactaccgactttggcatcttctctattctgtagagtccaaggaggaagcagaaggagccttgagaaaacttaatgataatgatgactttgtaaatgctttcttaaaaataaagccatttaaaaaagaatatggtgcttattcggagaaagctataaagaagctattggctgtgatgcgtatgggagacctgtgggatgagactgacatttgcgaacagacaagagatagaatacaaaacatcataaaaggccatattgacgagaagataaaagatcgaatggggcgcactttctgccaaatatccgactttcagggacttcctgagtggttagcttgctatgttgtatatgaccgacactctgaagcaacagatatacagcggtggacaaagccagaaaacttgatggcatacatcaatgggttcaaacaacattctcttcgtaaccctatcgccgagcagtgtatccttgagacactcagaactgtgcacgatatatggaaggaagctggacacatagatgaaattcatatagaattgggaaggagtatgaagagtacagccgaccagcgtgcacgtatggctaaaagtattatgcagaatgagaataccaatctgcgcatcaagagtctcttaatggaactcaagaatgcaaaagagtttgagaatgtgcgcccatactcacctatgcagcaggaaattctaagaatatacgaggagggagccttgcaggaattaactaaagaggatgcccaatatactgagatttctaagatttctcaaatggcacaaccttctgcaaacgaattacttaaatacagactttggttagaacaaaagtattgttcaccctatacaggtaaacctatttctctgtcaaaactattcacatctgcttatcaaatagaacatattatcccacagagccgatattttgatgattcattcacaaataaggtcatctgtgaggctgaggtaaatcagctcaagagtaatatgttaggttacgaattcatcaagaaacatggtggcgaaatcgtacattgtacgatgataggtgacgtgaagatatacgatactaaggaatattctaacttcgtaacagaacattatgccaacaatagacgtaagaaggaaaaactcttaatggaggacataccacaggagtttcttaatcgtcaaatgaatgacagtcgatatatcagtaagaaggtgatggcaatcctatctaatattgtacgcgaagaagatgaaaaagaagctaaatctaagtttgttatcgcatgctcaggaggcataacaaaccgcctgaaacaggattggggcctgaatgatatatggaacagcatcgtttatccacgttttgaacgtctcaacaaactcaccaatacagaaaactttggacgttgggagaacaaagaagggaaacaggtattccaaacatcactacctttggaactacagaggggctttagtaagaagcgtatagaccatcgccatcatgctatggatgctctcgtcatagcttgtgcatcaaataacattatcaactacctcaataatgaatctgccaagagtcaagagaagagagaagacctaagaaagaagctttgtgataagaatcgcattatacgcaaaccttgggagaccttcacacaagatgctcatacagctcttgaggatgtcgtagtaagctttaagaattatgtgcgtgtcatcaacaaggcaacaaactattacgagaagtatgataagaatggaaagaaaggaatagcagagcagaaagggcaagatatgtgggctataagaaagcctatgcataaagagactgtgtttggtcaagttaacctccgacgcagagttactgtcaatttaaaggatgcacttgagaagattcctgctatctgcgacaaggaactacgtgactacatcaacaaattagtaacaaaacagtttaataagaaacaaatacttgcacatttcaaaagcatcaactatcgtctaaaaatgaaatatgttaataaagttgacgtatggcaatacagtgacgaaaaggagcctatggttgctacgcgtaagcctatcgacacgtcatttgatgctaagcgcattgctaccattactgatactggtatccaaaagattcttcgcaactaccttgaagcaaaagacaataatccaaacatagcctttactccagaaggaatagctgagatgaataagcatatcactgaatataacaatggcaagcgacaccaacctattctaaaagtcagagtctcagagcctaagggagctaaataccaagtaggtgaaacgggtaataaaacgtcaaagtttgttgaagcacaaaaaggaacaaatctctactttgcaatctacgaagataaagaaggtaatcgttcatacaataccatcccattaaatgaagttatagaacgtttgaaacaaggattatctccagttccagatgcgaatgaaaaaggtataccattgaagtttcatctttctccaaatgatttagtatatgtacctaaaacagacgaagaaaatgaaattaaaaagggacaaatatataagtttgtagattctagcggaacaacagcaaactttattcctcatagagtttctaacctcatttacaatgtagataaaaagattgcagaaaaattctgtaatcatgaagtaatccagaacgaatatggaataggcagtccacaatcaaagaatcagaaatcaatcactggcgaaatgattaaatcagtctgctggaaacttgaagtcgaccgattagggaacatacataagattataaagtaaaagtattgcctatgataaagaaaactctatgcttcagcaatccaatctacttaagtttgcgaaatgcacaattagtcctgcatataccagaagtagaaagtaataagacattgcctgaagctataaaaaaagaagcagagcgtaccatcccgatagaagatatcggggtggtaatcctcgacaataggcgtattaccataacttctggggtaatggaggctttacttgagaacaactgcgcagtcatcacttgcaatcaaaagagtatgccagtagggttacttctgccactatgcggtaacactacacaaaacgaacgctttcgctctcaactagaagcatctttacctttacggaaacaactttggcaacagacaataaaacaaaaaatccttaatcaagagtatgtgctacggacaaatacagataaggaaaccaattgtatgcgtgtctggtctaatgatgtacgtagtggagaccctgataaccttgaagcaagagctgctgcctattattggaaaaacctctttacaaattatccaaactttgtaagagacagagaaggagcccctcctaataacctcttaaactatggctatgctattcttcgtgccataatcgctcgggcgttagtaggaagtggattgctaccaaccttaggaatccatcatcataataggtataacgcctattgtcttgctgatgatattatggaaccctatcgcccttatgtcgatcaattagtgttagatatcattcaacgcaacttagaaatatctgatatcacacgagatttgaaaatgcaacttctcggtattccaatgttagatgtagtgataaatggcaaacgcagtcctttaatgattgctgcccaacaaactacagcctcacttgcaagatgttttgctggggaaaacaaacgcattagttacccagaaatgtaaaagtagtatgactggctttgagcgctttagtgagtaccgaattatgtggattcttgtattctttgatctaccaacagaaaccaagaaggagaagaaagcatatagcgatttccggaaatcccttataaaggatggatttactatgttccagttttccatctatgtacgccattgcgcaagtatggaaaatgcagaggtacatataaaacgagttcgaaccatgttaccaaagttagggaaagtaggaatactctgtataacagataaacaatttgcaaacattcaactctactatggcgaaaaagaacaaactcctaacgcacctggacaacaattagaacttttttaaactttataccctaacaattaaaaacaagctttcaatgtcctcttaaacaacttaaaaacttatccttctcagcatagtcattaaagtaaaaaatcccattctaaacgaatgggatttcactttgtagtatcaatttattttcgaataacaaccttatatcttgctattagccaataaattatacaacttctgttgttttagataccacaaaggtactgattttcaagcaaatcacaactaattcactcaagcaccgctatcagtacctgttgttttagataccacaaaggtactgattttcaagcaaatcacaacttatcagcagtagcaacaacttcactaatagttgttttagataccacaaaggtactgattttcaagcaaatcacaacagatgctggtattaatccttatattgctgcgttgttttagataccacaaaggtactgattttcaagcaaatcacaacggagtgtatgtccgagctcgtccttaagaggttgttttagataccacaaaggtactgattttcaagcaaatcacaacaaaacatctttaggtactaaaagagaaagtgttgttttagataccacaaaggtactgattttcaagcaaatcacaacacgctcttgttaaattgcctgttgaacaaggttgttttagataccacaaaggtactgattttcaagcaaatcacaacagcaaaccgatagttttgttcctattacaagttgttttagataccacaaaggtactgattttcaagcaaatcacaacctgctgtagctggtgaccatttctatataagttgttttagataccacaaaggtactgattttcaagcaaatcacaacacttaatcacaatgaggacaaaggagtattgttgttttagataccacaaaggtactgattttcaagcaaatcacaaccagacatgattaaagtgtgacgagttgtctgttgttttagataccacaaaggtactgattttcaagcaaatcacaacgagatatgatagatgtagtaagttatgcaagttgttttagataccacaaaggtactgattttcaagcaaatcacaactaaggattggttaactggcatgaaaccaacgttgttttagataccacaaaggtactgattttcaagcaaatcacaactgattctttagaatacaataaagttcgtccgttgttttagataccacaaaggtactgattttcaagcaaatcacaacgtgacttccttactggcttagggcaaaatggttgttttagataccacaaaggtactgattttcaagcaaatcacaacgccgtgaactaaattgtaccgctgactattgttgttttagataccacaaaggtactgattttcaagcaaatcacaacctttttctttgtgtcttataagtcgctttggttgttttagataccacaaaggtactgattttcaagcaaatcacaacgcacgcatattttgttcagaataaccacgcgttgttttagataccacaaaggtactgattttcaagcaaatcacaacggctgcctgttctctcttttgcctcttaaagttgttttagataccacaaaggtactgattttcaagcaaatcacaacgcctatcagtattaacggctcagatgctcagttgttttagataccacaaaggtactgattttcaagcaaatcacaacgtttactttgcaaatgtgctataaaagggggttgttttagataccacaaaggtactgattttcaagcaaatcacaacttcagacgctaaaacagctgctaatcgtgcgttgttttagataccacaaaggtactgattttcaagcaaatcacaacacgtagattaaggtttgcagtcaattcgccgttgttttagataccacaaaggtactgattttcaagcaaatcacaacacgagtggaaacagaaggcgaacaatatcgttgttttagataccacaaaggtactgatttttttcaaatacaatagagaaacatactgatgaaggggaaaagagggtatataatagataccacaaacatggtattttcaggtaattagtacttaaaaaagtatgaaaagtaaggattgtgaagatttatttggaataaatacaaaataattctttgcagtttgaagataaatatatatctttgccgacaaatccaaacataaggataaaaataggttaaaggaataggataagactaaacttaatctataaattgctgggtaaaacccacaaacacaaatataaattcaagacataaagtcaataaaaaacagattatgaacaaagtaaaattattattagatttcgttcttaacaccgcagcatcgctgaagggtacaggtattcatttgatacgtattgccatctttatcatcttcgtatggattggtggtttgaagttctggaactatgaggcagagggtattgtacctttcgttgctaacagtccttttatgagtttcttctattcaaaggatgcacctgaatataaggactacaaactcaaagaaggtgagtttgatcaagttaagcatgagtggcacaaggcaaataatacttacaccttctcacatggcttaggtattgctatcatgtcattcggtatcttgacattattgggtatttggttccctaagattggttttgtaggctccggactggttattatcatgacattcggaacgctatccttccttgtcacgacccctgaaacatgggtaccagacttaggtagtggcgagcacggattcccattacttacgggtgcaggtcgacttgtcatcaaggatgtatgtattttagcaggcgcagtggtagttttagcagactgtgcacaacgaatcttgaaaaataataagagatagacgattatagtaaaggggatgtagcgttacatccccttttcttatgcaataaacagaagaatattcttaatagtttaagattgcttactttggcttatataactaagacttgcatttactttgtctacatattgcaaagcgatttagcatcaacaccattggtgtttacccttagcacattatgtgcgaagcatcagcacaacatgtgcgcagcatcaacacaacgatagaaaatcataaatgaggctcattatgagtactataagatacggaaaagcactaaagaaagacttatgttagaaatatataccactctgtagcaagatagaatagatattcatttaataagaaaacacatccgaagcatcatttttctgcaaacaatataaaatatcatatcacatttctggagtaattcgttatctttgcagacaaagtagaatctaatgactacaaaatataacataaggacaaagaagcgtttacttgttaattggctttgtttgatgctattatttatcatcacaggctgcaaggagacaactacttcacggtcattatcagagcgggaattccactatgatgaccgattgtcaacgctatctatagataagaatggatactggataggcggcgagacaggtgttatatggcatatcaacggacagaataggaagcgtttctacacggggttagaccgcatctatgacattgagcgtgattccaaccaaagcaatcagatatgggtggcaacacgtaatgctggtttacaattatggaacatagctggcgacacgctcattcataagacaacctttgagattccaagcaaaggcagccgatactctccatatagtattgaaataatagacggcaatctctttgttgctacttctcaaggacttttctccatgccgcttaatcagcaacagcaaggattaaagcccctctaccctatccatataaacgacacaagtcaatattatgaaccttttttggtaaataacctctgtcatgttgggaataaatggctttttgcttcaacgcaagctggcgtaataagcataaatctccctacgaagaaaatagaactacgacacaaaggggagaacatacgcaatgttgctatctatgatggaaaactctacattttatctgataagcagttgactatcgaaggatttgatggtacagagagtaagacgttctcgctgccccaatcggtactttccttctataaagccagttcaacctactatttcatcacatcgtctacaatactattatccgacaacttagagcgttttgttagtattccattgcgaaataatattcctgacaatccgcatcaaatatctattgccgacgatggtaatggcttttctatcttgctgacaaagaatgctatatggcgtattccacaccatcttggtttctttaatgctaaccctcctatcattgctgcttgtgtatccgacaaagaccttctctatgttaataaccaacatgagttattccgtcaaaaagcaggagaacaagtagctacaaagatttatgattttgagaacgatgagttgccaaaggagatgtatgccaatggcgaggacatttattactataatgctaataaccagctattcaggctaagccttggtaatcattaccttgtcaatcagctctttaagcgtccacagctactggcgaaaccaaagacacgtatcacctctatggcacttctgtcccaccaaagcagaatactccttggtgtgcaagactatctattatccattgatacccaaaatggtaagacagataccattaaggcgatgaacaacagatatataaccgcttttcatcaggcacaaaatagcgacaacatatatattgccacgctcaataatggtgtatttgtagaaaagggggaacagataaaacaagttgcaggaacacaggataaagtatttatcagcagtctgttaacatacggtcagcagaatcctcaattactcctccttaccaatcatcatctacaaattcaaggtgctgactctatccgggccgatggaagctgtagaatgttctgcatcaatgacagcattatctatacaataccagaaacaggtatacataagtataagattaaagggggaagactaattgatagtggtagtttctttgcagacatccacttcaatgctcaggcaggatttatccttgacaacaccttatatataggttctgaccttggagttttacagttaaccccagataaggaaaaagcagccgagtgggttacttttgatgacaaggttccaagtctacaacttattgctatcattctgtttaccctcatttgcatcttcatcattattttctttagttatcgtagacatcggatattaacttatcgccaacttcagatgagtaaggacgatctacgcaaacgtctggaagcattagacaccttaaaagacagactgacggagaatgaacgcaacacgcttgacagtatcagtcatgaaattgatagcattaatgtcagctcacaaagtctgcgtactaacaatgagcagtttgccaaactatcggcacgtattgcccgactgaatcgtgataccgctcttcagatggtaaaatacctaaatgatcagatagctcgtattaaacaatttgaggtctatgaacgtgattctatggtacacgactcagaagaagcacgcaatacggacaacatagagattatcattgaacaatgccgaaggaatgaggtatggctcaatcatatccaagaacttaaggaacgacttaataaaatccatcgctcaacacaagacacactcgtgctaaagggattgaatgatggtatgaaagaacgcttacaccatattcttaacgaatcaaagcaacactctgtggctgaggtttatactgacttcattgctgtgaagaatcaatatgagaatatcttcacgccagagggcttaaaagttatccgtgaatatatatctgaaagcatcgaacaacttaaaaagctggagggttatgaagtaatgactaaagcattgacggccgaattgcagtcaatagaaaaagacattgacaaccgtgaccgcatagtacttcttcgcatattacagacgattgataaccgtatcaaccaaattaagcaactgaataccttgcaacaattaatgcaggaatatgctgctgtacacgagaatgttgtgcaggagaacgaggagcgacgaatgaagaagtttaattcaaaactctttgccgatatcgaatcagctactcgagacatcaccgaccaaattgctgatgtatcagataagttctttaagaactttgccacaaccgataaagaaatttgtaaggaggtattccacttcacagcttccaatagtcagcaggtgcgtgtgcttattttgctccttgcaatgccacgagtaaagcgtacactcctaccaggaatgttaggaatctatggtaacctaaatcctgttgtcagccgcctttatcatagtaagattggtgataacaatgctgttctcactgcctattgcaaagagaatccaaccagtatcgtcaattatattctaaaattatcaaaataagaataaatactgataatcaacatattaacaatagttgcatccgtttattttatctaaaaaacaagatgcaactattttgtatacaacatttcctttacctttgcagcaacttattacttttgtattttaattaaaccgttttataaatttaaaactctactaagatgacaaagaaaaccttattagttggtttgctggcaatgttctcagtaaccactttcgcacagacagcagctaagaagattaaagacgtacgtacacaaccagacctctattaccttcaggatggacagcaggcaagttcactcgagcttctcccagcacctccacagccaggtagtattcagttccttaacgaccaagcacagtaccaatggggtaagatgcagcgcaacacacctcgtggtgatcaggctgctgctgatgcacgtgtaggtggtgatggtgtacctaacgctttctcagaggctttcggtatcaaaattagcaaagagacaactccagagatttacaagctcgttttgaatatgcgtgaggatgcaggtgatttagctacacgtagtgctaaagatcattacatgcgcgttcgtccatttgcattctacaaggagatgacttgtaacccagagcagcaggaagagctttcaaccaatggttcttatccatcaggtcacacagctatcggttgggctaccgctcttgttctctctgagattaacgttgatcgtcagaatgaaatccttgaacgtggctatcagatgggccagagtcgtgttatctgtggttaccactggcagagcgatgtagacgcagcacgtatcatcagtgcagctgttgtagcacgtctccacgcagaaccagctttccaggagcagttggcaaaggctaagaaagagtttgctaagctgaagaaggagggtaagattgcgaagagtacttttaagacagcaaactaagtcttacaaagcataaggtatcataggagttaagtcaataggtttacattgacttttagttagtgacttaactcctctatgcccttcttatatctctatttctcatttaaaacctaatttatagaatacaaataccctatgaaaagaattatccttattgctacctgtgccttgatgacttgtgcaggggcctttgctcaggaagacgaggaaccaaagttagttgttaagccaactggtcgaatccttatggatgctggtataatgcactcaaccgacgagacactcaacgaccagcttaatgatggtgctgctattcctgatgtacgtattggcgtaggtgcaacatacggtaagtggaaagcaaaggttgacattggttatgctcgtcagagtctttcacttaaagatattagtctcgaatataacttcaacaaagagaacttgattcgtatgggctacttcgtacaccagtttggtttacagagtggtacatcatcaagtttcaagatttcaatggaagagccattggctaaccaggctttctttaatagtcgtctgattggtgccatgtatgttcacgctggtgagaaattccatgccacagcatctgtatttgcagagaatgatgcgatgaagatgtcaactgacaagcttggtaatgaggcatggggtgcaatgacacgattggtatggcgtccagcaaccgagcgtggaaagattttccatattggtatcagtggagcatacgagtcaccacgttacaacaagaatgcagctatcagccataagtcttacacattgaaggctccattcccaacacgtattgcaaatgttgcagcacaggaagcaactatcacagacgctacagcactatggaagttctctccagaaatgaactttgcagttggtaacttgggctttgaggcacagtacttctacgtaggtatcaagcgtgataacgctatgccaaactatagtgcatggggtgcatatagcaatttacgctgccttctcaagggtcagggctatacctatacaatggctgatgcaggtattgcaactccagacccaggttctatggagcttgttgcagcttacaactactcaaccttaaccgataaggacgctaatatctttggtggtaaagtaaacgattggtcattgactttcaactattacctcaacaagtatatgatttggcgtgttcgtggttctatcacccgcgcaacagataa

SEQ ID NO: 617 - DNA, 24482 bp, synthetic construct
  misc_feature 1..24482: note = Synthetic
  source 1..24482: mol_type = other DNA
tcttgctccacaatgtgttgcttacaaacgatgctctcacgcaccagtccttgcagaatgtcaaaatcaggagcagagagatcgaaacgcagatgccgcgcccagcagtctgtgccggtgagaagggcgtgcttgagcatttcggcataacctgaacggaggttttcgtcatcaagtgtgcgtaggagttcggtgcagacaaccacggtttgtgcatcggcaaagcagcctacctcgttcttcagcccaccgaagttgataccggtcttgccccccacagccgcatcgaccatggccaagagggtcgttgggatgttgatgaagcgaatgccacgcttgaacgtagcggcagcaaatcctcccaagtcggtgaccatgcccccccccagattgatgagcagcgagtggcgtgtggcttctgcacgttgcagtccttcccagacttgtgaaagcgtgtcgagcgttttgtgcgtatcggtgggcggaatgacgatgtcgtaggccgttgctgcgctgttacccagcaggctgcggcagtgttggtaggtggtctggtcggtaagcaccgcgatgcggtccggcacgggtgcttctgccagaagagtgggcagcaactctgagagtgcactggggtagagaatttgttgcatggctgcgaaaggcaaaatctaagtaggggttcgtagttaatttgatagttacgtttaattttgaacacttacttaaggtgaggaaaagagttagaccccggcttcaaaggcttcgaaagcttgacgatattgttcgggaacttcggccgtttcttgggtgtgcaggttgatacacaccatcacggtttcgcctttgcaaacgatgcgtcctgtcttctgattgcgcgcctgctgcatgagggtaaaactcttagtgccgatgtggctgacgcgggtttcgactataatgtcatcaccatagtggatgggttcaataaaatcgaaagagatgtgtgccacgatgaatacaacatcttgcaagcggaagtcgcattgcagcacatcggcaaaataactttctttgcccaagtcatagtaggaggcatagacgttgttgttgacgtggttgtaggcatccaagtcattaaatcggatttgaatgggtgtcttatggcgaaaagtttcagtcattgtcgtagtgtttttggtgaaggtgaatgagtggttgttcagcaatgaagcgtgtttatcgcagcccgaagtcgcgccctacggttgcacagcgatggcggtcgggacgaagttccatcgtgtcgtcatccagtgcacagagatcgcgcagggcgtagatgccgtgttcttcatcggtgaggtgaggaccgacagcggcaaaaaggtgattgcgagcatcaacaatgcgcacagcctcttggcagtagtcgggcatctcgccggcagcacggagggccgcctctacgtaggaaaggagggccgcgctaaaatcatcgagttcagaaatcctgagttgagccattgcgttgaggaggaaaaagtagaacagttcgtcagcgagccaaaattttgacgaagtagtcgaaattcgtgtcgagacgtgaaagttcgtaaggagcgagttgtaaagaaaaagtgccgggcagggcttcgaggtcgaagtagtcgcgaagaatacacgccatattataagcctgcttgtcaccgcgacggatgagttctaccgcaaatctgcggatgaggttcgggtcgtcatcgacttccttgagggtacggaacaagaggaagagagtggccggcgaactgatgcgcaagaggcagagagcacgtgtgaccggtgtttcttgcgaaagtaaaaaacgttgcagcatttgctccacggcttcaggagtggagagaagaggcaacagggcttcgagagcctttcgacggtcgatgtcggtagccgtttcggtggcaaagcgcccgaagtcttcgctttcaaaagtcagtgattgcaccttatgtcttgccacagtggctttgagcagcgtccccagataggcgcgagcattatcgacattaagaacgaggaaaaaatgccaaaactctgcttcatccaactgctcccaacatttggcttcgctcatcacgataccagccgcacgaaagtcagagttgcgcaaagtcctgaggtagtcgcgcagtgcctcggcctggcgtgcagagacaaaggcggagatttgagagcggagatgggccgtaggtcgtggggagagcataagcactgtgagagagagtcgtatagaatatctgcctctaagtaggcagaaggtggctgcaaagtcaaggtgttttgagttcgaggagcaccacattttccacgtgatgcgtttgagggaacatatcgaccggctgcacagcgacaacacgatatttggtgtccagcaattgtaggtcacgtgcctgggtcgcgggattgcaggagacgtagacaatgcgcttcggggcggcattcaaaatcacacccaccacatcagcgtgcataccggcgcggggagggtctgtgatgatgacatccggccggccgtgctcatcaatgaaggcgtcggtcaggatatctttcatatcgccggcatagaacagcgtctttttgtccagaccattgagggctgcattgaccttggcatcggcaatcgcttcgggtacatattcgatgcccaccacaaagcgagccttttgagccacgaagttggcaatcgttccggtaccggtgtagaggtcgtagacaagttcattgcccgttaggccggcaaaatcgcgcgtcaccttgtagagttcgtaagcctgctccgaattggtctgatagaaactcttcgggccgactttgaaacgcaagccttccatctgctcatagatgaagtccgtgccggcataagtgatgacgtcaaggtcgccgatggtgtcgttgcacttggtgttgttgacgtaaagtagggccgtgatttcgggaaactctcggtgcaggaagtccatcacttcgagagcttgctcacgctcgctatcggaggtgatgcaaaactgcacaagcagcatcacttcgcccgtcgaggcggtgcgcagcatgatgttgcgcagcagaccacgattgccgcgcaggtcgtaaaagtcaaatccacgctccaagacaaaggcgcgcagcccgttgcggatgcggttgttgatgtcctgcataagaaagcactcatcgatgtcgagaattttatcgaacgctcctgggatgtgaaaacccaaggcgttcatttggtcgaatttctcaccgcttttcacctgttcaagggtgagccacttcttattggaaaagccaaactccaacttgttgcggtattcgcggtcctgacgcgacccgaggatgggccggcactcagggagatccaccttgccgatgcgttgcaggtggtccatcacctgcttctgtttgtaacggatttgctcggcataaggcaacacctgccatttgcaaccgccacacacaccataatgcttgcagaaaggttgcgcacgatggtcgctgagttggtggaacttcacggcttcgccttcggcataactatgcttcttgcggcggagctggatgtccacgacatcgcccgggacgacgtaaggtacgaatacagccaagccgtccaccttggccagcgctttgccttcggcggcgatgtcggtgatgaggatattttcgagtaaaggaagaggtttctttttgcgagccatactaattaggtctgattttgaaggcaaagttacggcttttaggccgtaactacaacaacgtatgccctaaatctatcgattttagtagatgagtttggccgttgcacgagttttctctacctttgcaagcgtaaatttgtagaaataataacaacaaacaagcaacgagttatgaacaaaacagcccttatcacaggagtaacaggacaagacggctcttacttggccgagttcttattggaaaaaggctacgatgtgcacggtgtcatccgccgatcttcagtggactatcgtgagcgcatcgcccacctcgaaggccgcccacagttccatcttcattatggcgacatgggcgactctatgtccgtcctgcaaatcatttccaaggtgcgccccgatgagatttacaacctcgcagcacaaagccacgttcaggtttcgttcgacgctcccgaatttacggccgatgtcgatgctgtgggagtgctccgcgtgctggaggccgtgcgtatgtgtggcctgaccgacacctgccgcatctatcaagcctcgacctctgaactttacggcaaggtggaggaagtgcctcaaaacgagaacaccccattccacccttacagtccttatgctgtggccaaactttatggtttctggattgtcaaggaataccgcgaagcctatggtatgttctgctgttcgggcatcctcttcaaccacgaaagtgagcgccgcggcgaaaccttcgtgacacgcaaaatcaccctcgctgccgcccgcatcgcccaaggcaagcaggacaagctctacttgggcaacctctcctcgctgcgcgactggggttatgccaaggactacgtggagtgcatgtggctcatccttcagcacgaacgccccgaagacttcgtcatcgccaccggcgaacagcattctgtgcgtgagttctgttatcacgctttcaaggctgccggcatcgaactggagtttgaaggcgaaggcatggaagagaaaggcatcgacaagaaaacgggcaaagtgctcatcgaggtgtcgcccgacttctatcgtcccaccgacgtggtcaatctctggggcgaccccaccaaagccaagcagcagttgggctgggatcctttggccaaaacttcttttgaagaactcgtacacatcatggtgcagcacgacatgcacaaggtggctgtcgaaaacgtggccgacaccctacgcgtgaacctcgccgaatatctggaaaaaggcatcgttaaataacctcctgtcatcatgttagagaaaaacgcaaaaatctacgtcgccggtcatcgcggcttggtgggttctgctatctgggacaacctccaaacccgcggctaccgcaacctcgtggggaaaacccacgccgagctcgacttgctcgatggtgtggccgtgcgagagttttttgatgccgagcgccccgacgctgttgtccttgccgcagcccatgtgggtggcatcatggccaatctgcaatatcgggccgacttcatctatcgcaaccttcagatccagcaaaacgtcatcggagaggcttggcgacacggagtgcaacatctgctcttcctgggcagcacctgcatctaccctcgcgaagctccgcagccgatgtccgaagacactttgctcacctcccccctcgaatacaccaacgagccctatgccattgccaaaatcgcaggactcaagatgtgcgagagtttcaatctccaatacggtaccaactacattgccgtgatgcccaccaacctctacggccccaacgacaacttccacctcgaaaactcccacgtgctgccggcgatgatacgcaaaattcacctggcccgctgtctcaacgagggcgattgggacgcggtacgccaagacttgaagttgcgcccggtgactcgacgcagcaccacgcaacgcatcgacgacacctcctccgaggtcgacatcttggctgtgctgagcgactacggcatcacccccgaggccgtcactctttggggaacaggcgctccgatgcgcgagttcttgtggagcgaagagatggccgatgccagtgtgcacgtcctgctcaacgtcgacttccgcgccacctgcacatcctcccccaccaatgccgatggcctgcgagaagtgcgcaactgccacatcaacgtgggcactggtcgcgaaatcagcatccgcgaagctgccgagcacatcgtccaagaaatcggttttcgtggtgcgctgcgctgggacgcctccaagcccgacggcaccctccgcaaactctgtgatgtcagcaaactccacagcttgggttggcatcacaagatcgaaatcgaagaaggtatccaccgcctttaccaatggtatcggcaaggcatctgcatcaaccacgctgctcaatagtcggccaccgacattcctccccctcaaaaaagcggtgctcctcctcgtccttacggacgaaagaggggcaccgcttctcctttccggagttcgtgggtctgaggtagcagaattttcaccacgttgaaaatgagttttcaccacgttgaaaataaatttaccaccgtgagaaaggctattggatggggacggaacatccgctccagcaagaaaaaacggcagccatcggctctgagagtcgatggttgccgtagaggaaagcggggaaaggagaggagcagaaccccacacgaaagggcggctaagcctctaccacagtgaatttggcaaacttgagcaagaggtttttgcgaccggagaggtcgaactcgaccgtggctttggcgttgtcaccgctgccctcaatctgcgtgatgcgccctcggccgaaacgctcgtggtcaatgcaagtgccgatggcgagcctagcggggtgcacgcttccactgattgcagctgggggtgtctcgacccgccgcaaaggcttggcgagcggtgcaggacgaggcgtctgtcctccccgagagggagcagaagtctcgaaacacgaagggcgaaaggctggcttcgggcggggcggttcggccgcggagtctaccccgaagagagctttgcgcaacgagggagcaatgccaccgatgagagcgtcggacgaggaggcatctttcacgacaaagcgccggtcgatttcgcccacgaaaagactttcgtccgaaacttccagattgccgtagcggtagcgcgactgcgcatagctcagatagcagaagcgcttggcacgcgtcacagccacgtagaagaggcggcgctcctcctccatctcgttcgcaaacaagcgggcctgactgccgggaaagaggttttcctccagccccgtgacaaagactgcgtcaaactcaagtcccttggcggcatggatggtcataagggtgattttgggcgtgccatcatccttttcatcggcatcggtttggagggccgattgttgcagatagtcggtgacagggacacgtccctgggtattttcgcccaagacctcatgctcaaaggagcggatggcgcccagcaactcctcgacattctcgcggcggctgtcgccctcgggaccatcttcgcggtcgagatccgccttgatgcccgactcgctgatgaccttcagcacgaggtcaaacgcaccgagacgggcggcctgtgcctgaaagtcgcgcaacagggtgcagaaggctgcgagcttgccgagggtaccgcgattgagcgccacaccataggcatcaggatgctcggccacgctccagaggctcacgccgtgctcgcgtgaggcggtaaagagtttttgaagcgtggtattgccgatgccgcgggcgggatagttgaccacgcgcttgaaagcctcctcgtcgtcgagattgctcagcaagcggaggtaggcgaggatgtctttgatttccttgcgctgatagaacgaaagaccgccgtagatgcggtaggggaagttgcgctcgcggagcacgtcctcgaaggagcgactctgggcgttggtgcgatagaggatggcgatttggtcgaagcccacgctttccgtgcggtgcagccgcgcgatgacgcccaccaccttggccgcctcttccttgtcagtggcggcgggcatgacgcggattttgtcgccttcttcgttttcgctgaacaccaccttttctatctgccccttgttgtgggcgatgatactgttggccgcaccgacgatgttttgggtggagcgatagttttgctcgagcttgacggtgatggcttctggatattggcgatggaagtggaggatgttgtcaatcttcgctccgcggaaagagtagatgctctgggcatcgtcgcccactacgcagatgtgggggttgtcgcgggtgaggagggagacgatggcgtgctgcgcgtagttggtgtcttggtattcgtcgacaaggagatacttgaaacgctgcccatagcgctggcgtatctcttcgttgtgggcaaagaggaggtaggtgtagagcaggaggtcgtcgaaatcgaaagcccctgccgtgcggcaacgccgaaagtattcggtgtagatgtgatgggtttcaccgatgccttcgcgctgatcgtaggcctgaatttgggcatcggctgcatagtcctgaggcaggatgagattgtttttggccgaagagatgcgtccctgaatgcgcgagggggcgtaggttttgtcgttcagtccacgctccttgatgatactcttgatgagggagcgagagtcggcggcgtcatagatggagaaatcggacttcatgcccacggcttcgctttcggctcgaaggatgcgcgcaaaacaactgtgaaacgtgccgctccacagcccgcgtgaacgtcccggccccacgatgcgggcaatgcgttcgttcatctccttggcggctttgttggtgaaggtgagcgccaagatgtcccacggcttatagccatgttccaataggtaggcaattttgtaggtcaagacgcgtgtcttgcccgaacccgctccggcaatgaccaacagcgggcggtcgcaatggcgcacggcttcccactggctgtcgttgagttgttcctgccagaaactgtcggggcgcaccacgaaggcagcttcttcgcgctgataggggtcaaggatgtgaccggcgttgctgtttgtcatattgtagtttgcgttgatagaatttcacttgtcggcagatttcgtcaaattgccgttgaagccgttcggcctcggccattgctcctcgctcttgcgcggccagcagtcgcccatcgaccccttgcagatggtgctgtgccatgagcagttccacgctgtccagcaacacaatcccctcttcgcgagcttcgagggcatagcgacaactgtcgcgcatggcgtagatgcgttgtcgcgctcgggcaaagtcgtgttgctgcaagtgggcacgggcttctacaagaaagctccgcgcctgcgcttcggcttgccggcggcgctcagaggtttgtgagcccttggactggcaggctgccagcagaagggtcgccccaaagaaagcgagggaaagaggtctaaacatggagttgggaagtgattttgaggcgctaaattacgaaaaaaaagccgtaatcactggtttttcccctcttttccacaaaaatgcaaggctgtgggcttgttcaagtgcatcttttaagtaattttgcagttacatccctcttttacgtttcatccttattattcaaccttatgaagaagacccaactcagcacgaccctcacccactataatgccgatggcagcgaactctccgaactggatcgccgtttggtggaacgcgccaaaaaaatcacccaaacgagctatgccgtctactcgcattttcatgtaggggcggccttgctgttggagaatggcgaaatcgtgtgtggctccaatcaggaaaacgcagcctatcccgccggcacctgcgccgagcgcaccgccattttctatgccaactccagtcggcccgatgtggctcccgtggccatcgctgtggcagcatggcgcgaggaagaccaagagtttttggacaatcccatcagcccttgtggcgtctgccggcaggttttggtcgagacggaaaaacgttacggccgtcccatccgcgtcctgctctacggccgcaacggtatcttcgaggtcgaaacggcctcagccctactgcctctgcgcttcgacagcgatgcgttgtgattgagcgcgaatcggaactcaactttattttaatcagaccttatcatctttaaacatgaaaagaattcttggtttggacctgggtaccaatagtattggttgggcctacttagtttttgacgacaatggtaacctaattgaaaaaatacgtttaggcagtcgtatcatcccgatgtcgcaagacgtgatgggaaaatttgaaagtggcatcagtgtatcacaaacggctgagcgtacccaatatcgctcaactcgccatttgcgtgagcgctctctacagagaagagagcgcttgtttcgcgtactccacatgatgggttttcttcctcaacactttgatcaatccattggctgggataagaatgacaacaaaacctacggaaagtttctcgatgaaagcgaaccgaaattagcttggagacgtaataaagatggtaaaatggaatttctttttatggactcgttccatgagatgattgccgactttatggcacacgattcgagctggacacccgaccaaaaggtgccactcgactggaccatctactatctgcgcagcaaagcgttacgtgctccaatcagtaaagaagaattggcttggataatcctcaatttcaatcaaaaacgtggctattatcaattgcgcggcgaggaagaagaagaggataaaacaaagcgcgtggagtttttagaagcccgcgtggtacgtgtggaagccacggataggaagaaaggcaagagtacttggtacaatgtgtatctcgacaatggtatgattgaccggcgtaccagtgctatctctttggagaattgggtcggccaaactcgtcaattcattgttaccacagaatatgaagctgatggtgtcacattgaagcttgataaggaggggaatgtaaaacgcagttttcgtattcccaaagacgatgattggacacttcggaaaaagcgcacagagcacgatattgaagagagtggactgcatgtaggcactttcatctaccaggccttgcgagatcgtcccaaagtgaaaatcagaggaaatttcgtgcacactatcgaacgtaaattttataaacaagaactacgtgcaatcctcacaaagcaaacagagtttatacccgagttgcaagaccaagcgttattacaagactgcatcgccaacctgtaccccagcaacgaggcacagcgtcaaaaattgcaaagcaaagacttcatttatcttttccttgatgacatcattttctatcagcgtcctcttaaaagcaagaaaaacttaatcagtaactgctcgctcgagaaacgtatctcaatagaccactcaacgggggaatgtatagaccgtcccatcaaatgtattgctcgttcaaatccgtattaccaagagtttcgtctgtggcaatttatcaccaacatccgtctttttgatcgtgatagtcaagaggacgtcacctcacgatatctctcaacgtctgaagaatgggagcgcctttacgcttttctctacaatcgtaaagaaatcaatcaagacacactattcaaagagttttttggatggaagaagcccaaaggaaggaatagcgtttacccgattcactggaattacgccgaagacaaggagaaaacttatccttgcaacgaaacacgagcaaccctcctcacaactttcgaaaaggcagaaatgaacaccgctgagctcaacacccgagaaggtgaaatgcagtggtggcatctgctctactccgtcactgataagttggaattggagcaagccttacgtaaacgtggtttgagtcaagagcaaatcagagtatttacacgtatcaaaccttttgaaaaggattatggtgcattctcagaaaaagccattaaacgctttctgactcttctgcgtaaaggttcgttttggaatgctgacgccattgatacaaccactcgagcacgaattgacaacataatcgcaggaaacattgacgaaaagctgcgtgacaaaatgcagcacaagagctacccgctccaaaaactcgaagacttccaaggtcttccagtttggctggccagctatatcatttatggacgtcatagtgaagtgagcgagattgtgcgttgggaaacactccaagatttgcaaaactatatccataacttcaagcagcactccctcaggaacccgatagttgaacaagtggtgcttgaaacgctacggacggtctacgacatttggaagaaattcggagatattgatgaaatccatctcgaaatggggcgtgagatgaagaaaacggctaaacaacggcaagacgacagtcaacgcatccaacgcaatgagaacaccaagctgcgtatcaaagcactactgatggaactcaaaaatgatgcaactatcagcgatgtccgtccatattcacccagtcagcaagacatcttgcgtatttacgaagagggtgctttggccaccctcgaaaaaagcgaccaagattatgatgagatcatcaagatttctcagaagtctcagccttctgcgagcgagatgaagcgctacaaactttggttagaacaaaaataccaatctccttacaccggtcgcttcatctctctcacaaaactatttactcctgcttatgaaatagaacatgtgattcctcagaaacgcttcttcgatgattctttcagcaacaaagtgatttgtgaggcagaaatcaacaaagctaaaagtagtatgcttgcccacgaatttattactaaacggggaggggaaattatccattcacaatccctgggtgatttacgcgtactcaaagtggatgattatgaaagtttggtaaagcatatctacaaagacaatgcaaccaaacgacgcaaactccttttggatgatatcccaacagagtttatacagcgtcagctcaacgactctcgttatatcgcccgcttcatacaatccgtcctctccaatctcgttcgagaagaaggagaagaagaggccaagtcgaaacatgtcattgtatgtaccggaggcattactgatcgtctgaagaaagactgggggctacaagatgtttggaatcacctagtctctcctcgctatcaacgtcttaataagctgaccaactcagaagattttggtcattgggagaataaagacggaaagcgtgtgttccaaacctcaatgccgatcgaattgcaaaaaggctactctaagaagcgcattgaccaccgacatcacgcaatggatgcactcgtcattgcttgcgcctcgcataacattatcaactatctcaacaatgagaacgcagcctcaccacaaagtagggaggatttgcgcaaacaactttgcgacaaaggtcgcactttacgtaaaccatggaaaacttttacccaagatgtcgagcaggcattgcatggggtggtggtaagtttcaagaactatgtgcgtattatcaataaagcgaccaatttctaccagcactacgagcaaggcaagaagaaatatattcctcaaaaaggggaaacattgtgggctatacgtaaacctatgcataaaggcatgccgtttgggcgtgtcaacctgcgctatcccttgatggtttctcttgcctacgctttggaacgtccacaaaatattgtggataaagctttgcgcgaatacattttacacctcattgcacaaaattttgatacaaagcaactcaaaaaacacttcaagactttaggaaataagtttgaaaatcgtgatattagtaaggtggaaatttgggtgatgagtgatgatagagaaccactcgttgcctcacgcaaacctctgaacgaaaattttgataaggagtccatagcaaaaatcaccgatactggtattcaaaagattttgctcaactttttgaagtacaaaggagatgaccctaaggtggctttctctcctgaagggattatcgaacttaatgccaacatagcaaagttcaatgacggaaaatcccatcaacccattaaaaaggtacgtatatttgaactactcggcaataaataccctgtcggacaacgaggcaatcgtaaaacaaagtttgttgaagctcaaagtggcaccaatctttactttgccatctttgaagatggcgagggcaaacgctcctatgaaactatccaactcatcgaagtggtcgaacgtctcaagcaaggtctatcacctgttccggacagtaatgataaaaacatttcgctgaaattcttcctctctccgaacgacctcgtctatgtacctaacgaagaggaaatcggaagcaatatgaaagtcgaagatttgcaaagagaacggatatataaatttatcgattcaagcaacaccactgcgaattttattcctcatcgaattgcgacgactctccttaatgtaaagactcccatcaacaatatacagaacgaactcggattaggaagtcctcaatccaagcatcaacgtgcacttaccggcgagataatcaaatccgtatgctggaaactcgaagttgaccgtctcggcaacatcaccaaaatcattagataacatcatgattaaacgcaccctctattttggcaatcctgcctatctttccttgtcctcccgacagttggtaattcgtaaatcggaaagccaaaaggagggtgcgcaaggtgaaaatatttgtacacgagctattgaagatattggcgtcatcgttattgatcatcctcaaatcactctaaccagcgccctcatcgctgcactactcgacaacaatgtagccctcatcacgtgcgattctcatcacatgcctacaggactgctactgcctctttctggaaacactatacaatctgaacgatttcaagcgcaagtcagtgcttcattgccgttgaaaaaacagttgtggcagcaaaccgtcaaacaaaaaatcgccaatcaatccacaatcttgcgccaacttacttctgcagaagcgggatgcatggataagtggagcaacgatgtgcgtagtggcgatatcgacaatttggaaggacgtgcagcggcttactattggaaaaatctctttgctcaagaaattgaccatttcaaacgtggtcgagaagaggcggctcccaaccatttgctcaattatggctacgccatcctacgcgccattattgcgcgggctttggtatccagcggacttttgccgaccttgggcattcatcaccataatcgctacaatgcctattgtttagccgatgacattatggagccctatcgcccctatgtcgatgcccatgttcttgttctccttcgtcaaaaaggtttccaagaagaactaactcaggaggacaaagcccatcttctgcaaattccgactcttgatgtctgcgttgaaggtaaacgaagtccactattagtcgcagcttcactcacaacggcttctgtggctaaatgttttactggagaattgcgaaaaataagctatcctaaactgtaaggttatcgctaaacatcgcactttccgaagtctaaatcttttattatggaacgcctgaatgaatatcgtattatgtggattcttgtactcttcgatctcccgacagagaccaaaaaggaacgcaaggctgctgccgactttcgcaagcatctcattgaggatggttttacgatgtttcagttttcaatctacgtgcgtcattgtgccagtatggaaaatgccgatgtccatcttaaacgcgtccgtggtctacttccagaatatggaaaggtttgccagctctgtatcacagacaagcagttctccaaaatagaaatatttcatgggcaaaagaaagagaaacctcaaacggggcctatacaattagaactcttttagattcttaacccgctggcggaattaaatcagtgcgtacttaatccttcctatgggtttgttgttaatgtaattgatgcattgtaatgtggtcatcgcactgattcttcctactactcgggcaaaaagtccgcaggtttcctttgcgtagttcctgatgaggaggaactgatcagcaagttgcgaaaacaaagtttcaactctctttcgtgcctttgcgaaagggataagggttggcctccggttcttttggttgagcctgtaggggcattcaagtctgatattgaccgtctcgaaaaggtcaagttggacttccgcactgagtatcccttgtctccaaagatgcagcaatcgcggtaaagcggcttgatgtccttcatatagttgatgtcgtatacactcgccttgggagggtcgtatgaatggatgactccattaaaccacagagcacgtggagtttatagccgaagtagtgctttccttgggatacgcaatagtcaaagtccggcgcccaaatcagagaaacgagacacaggaccgagacggcgtacatttctgtactttcaagatagaagaaacaatggacgttaaactgctaacagtgttctgacttctcattttgtgaaacaattttcattcactctagatcaagggcggaagagtcattgcgtgcctatatttagtcgtcccttaaaaagctttgataagtaaaaagtcactcctcccctgcctctcgcttattattttgagcagccacaaaagaactctcatggctcttttgaagttgtaagcagctgctgccatcagtatgtttacagcgtctcctaccacacctttgtaaaagttgcggcctaaacgatgatctgctttcaaatgtccaatggtaggttctatgcctgcccgcttgcagaatagtttgtgtttcttacgcctttgatatctgctctctgatggcttggggctgtccggtattaaaatctgagtaccattcacctctttcctacctcgataacctctgtctcctgcaagtattttaatctttcgttgtgtgagacgttcaacttgtcctaacgcagcttctatcgtgtgtccgtcatattcattacgaaaagacatcgcaccaagaatgatacacccgtagccgaacgtatgatggagaccttgttgccgaattcgtacttcttgtcttcttttcccttactgatacattgcacctgggcttcgtgaatggaataaagttttttccggctgttacgtctttgtgaaagaatggtttgaaatctatcaatgagttcagtgtagagagaattctctccaagattgcgcttgagctctcgaaccaaccgcccggctattgtccgcaatttccggtctgctctcagtgccttcttgcggttcttggggtgattgcggaaacgttggtcgcgataaatgcctttcaacacaaaggtatagctttggcgaagaggaagatgcagtttatcgacgagatgcagaaccttgcccactatctttttatgcaacttggcatccgtaggaaaagtgatgttcttttcctgaacggttgaatcgataaaagcggtatcatgatgatgttcatcatcatcttcgttattgacacgaatgctttcttgaaagatgagttcaataccctcctctccaatgcgatggcgaaagtgaaccaattcggaagaggcacaaggagcaccgggtataaactcctgcataccacaaaagtattgataataagcgttttcactccattgctccacaacggattcatctgagagattgcgaaggtgcttgagtatcaacaaaccacacatcaaacgtatcggcttacttgggcgaccattgtgctgacaatacaaaggccggaaagcagcatcgaatttctcccaatttattttgtcggagagtttgtagagagggcgagagggggccggcatatccgacaaactgctgaataatgaagggctgggatagggctttttaatcataaaaatctgcaagtttctgaatacaaagataagaaaacttgcagatttatcaaaggaatatcttaattaaattactgaatatcagatgataaatgggaatttaagggacgactatttaaggaaggaagacgcaaggctaatcccgaattggggttaatagaaaatgaagaagatatggtgtcaaccaatcttcttcattttgatagtaccttttttattactaaattacgacgtaactttctaataaatagacatttagcaagaatgagttgttactcatactgcaaaggtactcaaatttaagcaaatcacaactgcacaaatcggaggagcgctcgcgagttcgttgttactcatactgcaaaggtactcaaatttaagcaaatcacaacagattaaatccctattttcgcggtgagaatgttgttactcatactgcaaaggtactcaaatttaagcaaatcacaacgggctgcaagggcaactttaatgcagaaacgttgttactcatactgcaaaggtactcaaatttaagcaaatcacaacaaagtttcaatctacatatatattgatttggttgttactcatactgcaaaggtactcaaatttaagcaaatcacaactgcgcaatgatttcaagtgatagagagcctgttgttactcatactgcaaaggtactcaaatttaagcaaatcacaacaatttgcagctgtaacctcggcgttcatctgttgttactcatactgcaaaggtactcaaatttaagcaaatcacaaccgttaaatacgagtacttcggaacgttgcagttgttactcatactgcaaaggtactcaaatttaagcaaatcacaacaagtgggcgtttaagcgcaacagccacgaagttgttactcatactgcaaaggtactcaaatttaagcaaatcacaactacatcggaaaaaggggctatttttgcactgttgttactcatactgcaaaggtactcaaatttaagcaaatcacaacagaaccagcctacaaactcttcattcgtcagttgttactcatactgcaaaggtactcaaatttaagcaaatcacaacgaaatctttggtatgcccatgcgcatcgcgttgttactcatactgcaaaggtactcaaatttaagcaaatcacaacaggagaagaacgccatggcgcgctggtcaagttgttactcatactgcaaaggtactcaaatttaagcaaatcacaactcgcgcggacgctcaccttcaactttccctgttgttactcatactgcaaaggtactcaaatttaagcaaatcacaacccccggtggtagaactgaccaccgagtggagttgttactcatactgcaaaggtactcaaatttaagcaaatcacaactaggtctgcgccgacttctcgagcgcaccgttgttactcatactgcaaaggtactcaaatttaagcaaatcacaacatcttttgccgtcatcatacccgccttttcgttgttactcatactgcaaaggtactcaaatttaagcaaatcacaacgacttcttctctctaccgctcctctcgtcgttgttactcatactgcaaaggtactcaaatttaagcaaatcacaaccacagccttccgcatctttggcgcaagcgggttgttactcatactgcaaaggtactcaaatttaagcaaatcacaactatgattacccagatgaacccgagtcgctcgttgttactcatactgcaaaggtactcaaatttaagcaaatcacaacgagtattgtatcttcttcttggggagtatcgttgttactcatactgcaaaggtactcaaatttaagcaaatcacaactacaagccttttacttcgtcgttgaagtatgttgttactcatactgcaaaggtactcaaatttaagcaaatcacaactatcaaaatgaaattactatttttgtcgtggttgttactcatactgcaaaggtactcaaatttaagcaaatcacaacgtcggaaagagttcctcgataggcttgccgtgttgttactcatactgcaaaggtactcaaatttaagcaaatcacaactatattctttagctttggactgtcggagcggttgttactcatactgcaaaggtactcaaatttaagcaaatcacaactttcatcaaatcgaagagttcttgcttctcgttgttactcatactgcaaaggtactcaaatttaagcaaatcacaacatttgcgcagcctgctctacggaagcatctgttgttactcatactgcaaaggtactcaaatttaagcaaatcacaaccagcgttgggtaggttttgcagtactcccagttgttactcatactgcaaaggtactcaaatttaagcaaatcacaacacggtaacaacaagggtcttcctgccgaaggttgttactcatactgcaaaggtactcaaatttaagcaaatcacaacaaggtagctgtgatgcacagacccaccgcagttgttactcatactgcaaaggtactcaaatttaagcaaatcacaactcataatgagtacgtaaaattcccttctcagttgttactcatactgcaaaggtactcaaatttaagcaaatcacaacgcaatacgatagccaccgccccaggggattgttgttactcatactgcaaaggtactcaaatttaagcaaatcacaaccaggccgacaaccgcgtaaaggccgaagaggttgttactcatactgcaaaggtactcaaatttaagcaaatcacaacactgccgcggtttgccgccgcggggcgcgtgttgttactcatactgcaaaggtactcaaatttaagcaaatcacaacggaacggtgtgattgtcagaaattgtcctagttgttactcatactgcaaaggtactcaaatttaagcaaatcacaacccctacgacctaatctccctcattgaaaggttgttactcatactgcaaaggtactcaaatttaagcaaatcacaactaagagagagcgtacagctcatcgtccgtggttgttactcatactgcaaaggtactcaaatttaagggatgttctaaaaatcaatccactgaaaatcagataaatctttcgtcagcgtgctgtaatgtggaagcaagactggtgcacttcgtatttcacgtagcacgtccccatgcggcgctggtcgtcgagcacctcggctaggacactcttgagctgcacaccccacgtttcgggctgcggcgggagggcaggatcctgcacgcgccgatagaaattgtaggagatgtcgaaagtcgtgccgaatcggtggcaactctgctcgctggcgttgccattgtgccggcgcagccgctcgatgtcctcgttggtacgcagcacggaagtaactttcagtttgtggaagggcaaccctttggacgccagactatcgagaaaggagcgcccgatttcgttgagcagggtggcggcacgaggcaccaggtagggggtactgtgggtaaggtttttgagttcgtagaagggactgtcgccgatatagacgaggtcctttatgcgctgcgctgcctctgcacggtcggcacattcggagatgccgatacgccgagcagtggccaattgcacgtcgttcaggtcggggaaagccgtatcaaaagccggtacggagaggatgggatgcttgacgggggctcccgtcttgtcgagcaatcgtaacgaggtgcgccgacggcgcaggagcgagtcggcgcgtgccgatgccagcgcgatggtgtcttgtggaaggggagccgcctgctctgcggcctcggagaagaaggagaaatgcgtcacctccggaaacagcctgcggacgccagccaggagggcgatgatgccgataaagcctacgaagaaatggcgtttgatcagtaagatgggggaaggctttcgagtcataagtctggataaagatggagcgggggtgcctccatcagtttagcgtttctcctgcaaaagtagcaataaaataaggatttacttgggtttttggctacgaaaacgtacttttgcagtagtaaacccaaccaacggagatttccactcaatgatagaacgacattttgtgcttgaagaggccgaccccgccactttctttggccctgccaatgccaaccttcgcctgctgcgcgccctctgtcccaaacttcgcatcatcgggcgcgacaacgtcatcaaagcgatgggcacggaagaagacatggcagaatttgaggaacacatcgccgccttggaaaagcattgtgtcaaatacaatgccctcacggaagaaaacgtgattgatttgctcaaacatcgcacaccgcaacaagcagacgacagcgatgtcatcgttttttcgaccggcgggcgccccatcactccgcgttcggccaaccaactacgtttagtagaagcctatcggaagaacgacatgctctttgccatcggcccggcaggctccggcaaaacttatgtagcgatagctctggctgtccgtgcgctaaagaacaaggaggtcaagaaaatcatcctaagccgccccgccgtagaggccggcgagaagttgggcttcctccccggcgacatgaaggacaaaatcgacccttacctacaacctctctacgacgctctgcaagagatgattcctgcggccaaactgcaagaatacatggacctcaacgtcatccagatagccccgttggctttcatgcgcggccgtacgctcaacgatgcggtggtcatcctcgatgaagcccagaacacgacaacggctcaaatcaagatgtttctcacccgcatggggtggaacactaagatgatgattaccggtgaccgcacacagatagatctcccgccctcgcaaaagagtggtttggtcgaagcacaacgcattttggcgaaggtgccgggcatcgcctttatagaaatgacgaagaaggatattgtgcgccacaagctcgtttcgcgcattgtcgaagcctatgaagccgacgccccatctccagcctactattcacaacagctcctaaccccctaacttaccctcactatgacagctttaacaaaaacagatttccacttccccggccaacagagtgtctatcacggcaaagtgcgtgacgtctaccacttgggcgaccacttggtgatggtggccaccgaccgtatttcagcctttgatgtcgtgctccccgaaggcatccctttcaaagggcagatgctcaaccagattgcggcaaagtttttggacgcgaccaccgacatttgtcccaactggaagttggccacccccgaccctatggtcactgtcggcattatgtgcgaaggcttcccgattgaaatgattgtgcgcggctacttgtgtggaagcgcttggcgtgcctacaagagcggtgtgcgtgaaatctgtggcgtaaaacttcccgatggcatgcgtgagaatgaggagttccccactcccatcatcaccccgaccacgaaagccgagatcggcgagcacgatgccgacatctccaaggaggaaatcctggcacaaggccttgccacccccgaagaatatgcgttactcgaacagtacaccttggccctctttgagcgcggcacgaagatggcagccgagcgtgggctgatactcgtagacacgaaatacgaatttggcaagcataacggcaccatctacctgatggatgaaatccacacgcccgactccagtcgctacttttatgccgaaggctatgccgaacgctttgcagcaggtaaccctcaaaaacaactctccaaagagttcgtgcgcgaatggctgatggccaatggcttccaaggcaaagccggacaggaagtgccggagatgacaccgaccatcgtgcaaggaatatcggaacgctatatcgaactttacgagcacatcaccggcgaaaccttcaaccgcgaagccaatgccgacctgcacgcccgcattgagcagaacgtgctgaactacctgaagcaataacggcttttctaaccagtcagaagagataagataggaaacggttttctgatgtgtaaaatatgacgtttagaaccttctttcagaaattgaccagtcgctatctttggggcaatctgttggcaatgggaatagtgcttgcagccataggaacgggattttactttttcctcgacttctacacctatcatggccaaaccatagaagtgcctgatgtacgcggccaaagcagcgaagtggcacagcgcaagttgcgtgctgccgggttccaagtggaggtgagtgacacgggctatatgccacgcttggccggagatttgattttggaccaacagccccttccaggtacgccggtcaaactcaaccgcgtgatttacctcaccgtcaacgcctcttcggcacgcaccattgctctgcccgacattgctgacaactgctcactgcgcgaagccaaaatgcgcctatcggccatgggatttaagttgggagcggtgaagcgtgtcaccggtgaccgcgactgggtctacagtattgaagtggctggaaagacggtacatacgggcgatcgtattcctatcaatcagcctttgattttgctggtcggcgatggcgctgatgaagagatcttcaacggcaacgactctctcgaccaactcatccatggccacgactccgtggtctatgaa

SEQ ID NO: 618 - DNA, 24461 bp, synthetic construct
  misc_feature 1..24461: note = Synthetic
  source 1..24461: mol_type = other DNA
aatatattcagaatcttgtttttcatatctttttcaggtttcgttcgttccgttctgcatctgaatgcaagtggtttgtaagttattggaaatcaatggataaaacatctgttttcaaacgtgcgaagattgcattccattcttcgcaaaaacgcgctgcaaacgtgcgaagattgcgctgcgtttttcggtcatttgcaaatcgtgtcttgtctgttcgtaatcatctctcgttctgatgagtttgtatgatgcaaattccgttgaaccaatgagcgaaaatctcgggcagaagagccaaataggcaaaaggaagctcgccaatggagagaacgtatgttgaggatgcgttttgcgatttcctgtcatacgctgtctctattggcgtgtagggcaagatgcctaatgctttctgatttctttgtattcagctctcgacacagccgttccgcccttgagctcttcggggagcttgtcgtccatagcgtttatttcctgcaaggtaaagaggaaaaaataacgtttgtagcttaccacaagccccggcagtccatagcagtcgtacggtccacaggtgaaaggcaaatcggtggtaaaccaggcttccattcctttgttgtcttttctgatggcttttgtgcagttccatcctcctattaccttgctctcgtctgttatctcccattccattgcaggcaggtcatcctttatcaggtataaagtgtcattatacacgggctgataagtggtagtattattgatgaaatctatctttctgtacacctcaaagccgtttgttttcataatatgctgagactttgccgtgttttctaccattaccaccacaccatctttatagtaagtgtcgtaaaccaccttgtcatttatcgcctcaggatggttttgctgttcaaactctgttaatcctaacggagtgcggaaataggttagtttaactcctttttctgtttgtgattgtgccaacaggcagttgcacatcagaagaaaaagtattgtgaatgataaatgtttcatcgttaatggcattaagttttcttttagagtaatgaaaatgccgtcatttcattgcttttttgaaaaatataataaaagcaattgaaacgacggcatagtcaatttaatttcctcttgatgctaactctggttctgtgaaaaccttcaatgttaccgttgttgttgttgtcgttttttctgaaactttcttgccgttttcataagtaacgactgtcgttgttttggtaacggaaccatcatcatttctaacttcctctataaaagtgagagtacgtgtttctgcttgaacttgtgtagcataaccaaactgcaaggctaatgctgcaaaaaggacaactaattttttcattttgtttaagttttttaagttgttataatttaatttgtaggtgttgcaaatttataatttcatatttaattactatcattttaattattttttttgcaatgtttaacctttttggagaggaattttgtaaactttaggtttgttaaattgaatgaattgccatagtatggtacttgattttggataatgagtgcagaagtctaatgcttttctatcttttcatatttggctctggacacaatttttccagtcttgggctcttccggaagttcttcgttcatagtgtttatttcctgtaaagtgaaaagaaatatatagcgtttgtagcttactacaagtcccggcagcccatagcagtcgtatggtccgcaggtaaaaggcaaatcggtggtaaaccaagcctctattctcttgttgtctttcctgatggctcttgtgcagttccatcctcctatctgcttgctctcgtctgttatctcccattctatcggaggcaaatcgtcctttatcaaatatagagtgttaagatgtatgggctgataggtggtagtattgttgatgaaatctatctttctgtacaactctaagccttctatttttatagttggctctgatttttccgtgttttccactgttaccacaacgccgtctttgtagtaagtgtcgtaaaccatcttgtcgtcttcccactctggacggtcttgcgctgcataatcagctaacagagtacggagataggttaatttaactcctttttctgtttgtgattgtgcaaacagaaaattgcacatcagtaagaaaagtattgtaactgataaatgtttcatcttgtcttgatttgttttttatgattgttgttcgatttaagttttacaaatttatgtttttcgtatgatttttataccaagtgcgaagtgtttttgtcaaattttaacctttcaagagatttgtttcccctcttgaaatgtattcgtaagttcattctcttgccacacactccctctgaattggaatcgtattcggggttaaaacagcttatgccgaattgtgatgaatatgaaaacagggaaagacaataaattaaatgccgcttcgttatttcatagtatgaatgtatttaatagatttgcaatattcttgttcgcaatggcagccgtgtttgtggcagcctgttcagacgatgatagtttcactacgtccacgtcgagcgtgcttacgttttccaccgacacgttacggctcgacactactttctctaaagtgcctacacctacgaagactttctgggtctacaaccgttcgggcgatggcattcggctctcaaatgtgcgtctggaacagggcaatcagactggattcagggtaaatgtagatggcatttatctcggtcaggcgagcggctatcaggtaaacggactcgaagtgcgcgacaaggacagcattcgtgtgtttgtggagctgacctctcccgcgaatggtaatgtggatccgacgctgatcgaggataatttgatatttacgttggaaagtggcgttcagcaaaaggtaaacctgaatgcgtatagttgggatgcggaactgctgaaagaggtggttgtttccagcgattccaccatacaaagcacgaagcccatcgtgattcaaggagggattacggtgaaggaaggagctactctgaccatcggcgcaggcacagttatctacttttccaattcagccggagttgatgtgcacggacgattgaaagtggatggtacgcccgatgaaaacgttgttttcagaggcgaccgccttgattggatgttcgactatctgccttacgaccgtgtgagcgggcaatggcgaggcattcgtttccacgaaacgagctatgagaacgaaatagcctttgctgatattcattcggcgtataacggcattgtgtgcgattcatcggatgtgagccgaaccacgctaacgctgaagcacagcatcgtgcataactgtcagggctacggcttgttggcgaccaacagcagggtggacgtgagcaattcgcagcttaccaataccctgaacgactgtgctgcattcttcggtggatacaccattttgagccattgcacgctcgcccagttctatcctttcgacggcaatcgtggcgcagcccttagatttggcgacaagaaaggggataatgtctatccattacatcagtttgatgtcttgaacacgctcattacgggctattccgataacgtgattatgggttcattctccgatgaaaccgtgaaaaattacaagttcgatcacagcattctccgtacaggcgcacccaaggaaatcgatgccaacatctataaagacgtgatttgggaagacgttaaagacaccgtgcaattcggcgaaaagcatttcgtaaggatagatgccgaaaagcaatcctacgacttccatctacgggacaagtcgaaggcgcgcgatgccggatatgtattgggcaatggcaccagtgctacggacagagacggaaaagcaaggacgaatacgcccgatattggctgctacgaattttttgaataaacaaactctctattttgaataaacaaacctcgacaaattatagaacactatgaagacgatagatttaagtataaaaattggtttctgtcagatagaagaactttcagaagaggaacggaaattagttgaagtggccattcaggctacgaagaacagctactctccttacagccacttcgcagttggggcggcgttgctgctcgaaaatggcgacgttgtaatgggagcgaatcaggaaaatgcggcgtatccatcgggattatgcgccgaacgctctgctattttcgcagcccagtccacgcaacccgaacagccgattaccactttggcgattgctgcccgtaacggtgggggattgatgcgcgagccaatcgttccctgtggttcttgcaggcaggtagtattggagattgaggacaggtacaaacggccggttcgcgtgcttctctatggcaccgacggagtttatgtggtgaatactatcaaggatttgctccccttgcagtttgtaggggagtcaatgaaataggaaacggcttttgcttttcggttcaagcgaaatgaatccggcacgtgtgcgtctgacaggaacgacctgtttgatgcacacgtgccggattttcttgtttatggcgttggcttgatttgctttccaatggttgaggctgttccttcagagctttctgaaacaaataaagttaaatagttgtggggaatgaaagaaacgattacttttgcgaaaaacaatattattgcgtatgaatatgaagtttcttttctgtgcattgtttctgatgttttcaacaatggcaaccgatagctgcatagctgcacggcagacggtagcagacgatacaatccgtgtggattcagtagagaaaattgtaatgacagacaatgctcacgccgttgtctacgtggattatcctgtaagtggaccggcgattttgcgcgattccatcgagaaatatattctaaatgaattatccagaggatgggatgaaagtgttgttttgaagcctctgcccgtaagtagggaggcagtcgggctccgtgcaaaacgtattcacgcatctctcgacgatatgtataaggagtttgcagcatccgtggacgatcccaatgaagactacgtgaagtcaatgatgtacgaaacggatgtgatgctgaggaaagtctgcgaaacggaggacttcgttacttataccaaccgttattatgagtatctcggaggcgcgcacggcattacaggtatggatggtgttacctttctgaagccgagcggaaagttggttggctacgttgtggataatctgaaactgacggaattgcagcccattctacgcaaaggaattgtggaatacttccaagaatccgaagtggaaatgaccgaagaagagattatagagtcgctgtttgtagaggatggtattattcctttgccgttttgtaagccttatttcacgaagggaggactgacatttctttacggacagtacgaaatcggagcttatgcaatcggaatgcccaatttcgttgttccgtacgaaacgatattcccttatctgacgagcgaaggaaagcaaattgtctccaagattctgaatcgcgagtagtcgagaagtgagttactggaaacagcaactggtttcttacagattgcttttctcgttctcttttcccacactctgatacgttatcaaacgtctctccatttcatatttgtaaagtttgattaccaaaaaacgcacatattttttctgcaaaatagagatttctcagcgatatttccaccattgaaaaccgattttcagagcattagatttcaaaagtccgaagactgctacacgtttttgcgaagattagtgcgcatttctgcgaagattgcattacgttcttcgcagaaaagcaaagcaaaaatgcgatgaaaagggataaaataaggctgttaagtaagatttattgctctttttcggaagtcttccgaaaggttttctatgcacaaaaagagaataaaagagccgaatttctgatactcaaaacattaggaatgcacacgcaaaactcgcatatttgaaaaataaaaatatttatttcaaaatacgcgagttatacaagccattttgtaaattttattcgcactctcaatacttttcaaaactctttttcaaactcaattatccattatccgccaacgattcatcagcgtgatttgcgccatctgcgagaacccataacttctattgttagcaagaaaaaaggtatgataaaccaaatgtttaccataccttcttttttctatattcggttttaattatttctccttgctcacaggtgtcaggagttttctgtattcgctttgattgcccaataatctgacggcctccttgtactgcttgtcgaactggaggctgttttcgatggtgccccgctgaaaataataggccgaaacgaggtcggcagtaatcacttgcttgagcatttccttattataatcgaggtcgtgcgccaaattgtggtttagttttgcgttcaacgcatcaaattcagcctttgcatcgtcgtaatagccttcaaatttagccagttttacgagattttccatatattttctgctctcacggtcgtatttgaaaccactcttgagcactgcctgcttgaagctctcaaagtcggcgtccgaaatcataaagtcctttgcagggacaatcgtaggatgattcttcaagtattccagttcccaattaagcatcacttccgtagagtcgcgaccggtggaagcgagatagaatgcaatgtttggcaaggagtcgggcagcacctctatgtcgggctttatgccaccaccgtcgcgtacctcacgcccgttggctgtgtggaaaaccttcgtcagagagtccggcacgtgctccatatagccgccgtttttgtgcttatagttgatggcctgaatgcaacggccgctcggaatgtagtatttgcttgtagtcagcttgagattgccgttgtaggggagatccatcggagcctgaaccagtccttttccataggtacgtgtgccaagaaccacggcacggtcgagatcctgcaagctgccgccggtaatttcgctcgcgcttgctgtttcgccattcacgagcaccacaatcggcatcacggtgtcgatgggttcgacggtagtcttatattcgcggttggcacgttcgagcttaccgattgtctttaccaacgtgagtcctttgggcacaaacatattcacgatgttgatggcttcctgaagactgccgccgacattgttgcgcaagtccagcacgagcgccgccattccctgcttcttcatttcgaggaaagcacggcgcacatccttggaacagtcggtagtgaaggagttcagattaagatagccgatgccgttcgcctgtaaaccataataaggtacagccggaagctgaatggctttgcgtgtaatcttgaacttcatcgtcttgcccgtcatcggacgcttgactttcagaatgaaagtagtgcccgcgtcgccccgaagatgctcgctgacatagctcacggatttctttatcatcgtggaatcgtcgatggacagaatcacgtcgcccttcttcaagcccgcttcggcagccggcatattctcgtagggttcgtcgattaccacgttgtcgagtacaagattgtagcggatgagcgcaccgatacctgcatattttcccgaaatcatcatattaaggtcttttaccttctcttcaggataatacaccgtatagggatcaagcgaatgcagcattgcattgattccgtatcccaccacctcatcggcatcgagtgtgtctacatacatcatatcaagatatttgtagatagccgtgaacgtctcgagattctttgccaccttgtagttatgatccttatcagtcttggcttccgtctgtgcatttgcgccaacggcagccatcagcaaaccaacaaagaggagtatcttcttcatcataattctttattatatagtatatgtttgcgtatcacgacttccgaaagcgcattgcttacgaagccagaataatgcaaaagtacattaatataatggaataagacggagaatgtcggtaaatttacaaaaaattagaacaacagaagcaaacagactaaggtagcttagtctgaaagtaagctaaaaaagcagcgtccgaatctattgaatctatcaaaacacagctatgcgaacgacacgacgatggctcgtccaaagcagtttgtttgggaatcaatcagcacgctgtcgtagggttggagcgtcgccttgcccatttgcaaagcttccaatgcaaatatcagcgaacgcgtattgattactatttcgccagaaacaacagatactttcacattcgtgccttcacggtaaatcacattgaagtcgatagccccctgagtatttgtcgaacgtattttatcgctgccgtcaaagaagaaaggttcattccatttcaggctgatgcgttcgctgtctcggaagagcgtgatgtctccatctactggaagcagacaacgcctgtaaccggtgaaatcgctgaaagtgctttccggagactcaattactgccgaggaaatgcgtaggtcgaaattgcgttcgactaaactgctgccttgtggttgtatcagtatctcgcgtgtgacgccccctttccattccgtaaccttgtagttctcttgcctgattatttccatcatcattagatttttcgattattgccccaaaagtaatcattttttctgatacaatacccccttttctgtattttaatgttcaaaacccctgcttcaggttgcctctttaatttcttttgctctgaataataatagcttatactatttgttctcgaacacctgtctttgtatcagaaaccatagacagccatatcataatcctttctcttttcccttcatcttccttgcaaagaacttttttacatctttcagttcattttttttgtaaaaaatttggtggtttcaaaaaaacgctatacctttgcactcgcttaaaagaaataagcaaaacctgcttcagtagctcagttggttagagcacctgactgttaatcagggggtcgttggttcaagcccatcctggagcgcacaaagagacaacttatggttgtctcttttttgttttatatactttacttctacaaactatatagccgaataatacatttaattaatctatgtttttaagtaccatagaaatgaaaaaatactgtaaataaagtcatttctcagtgttgatgagaattataatattctttgcattgcgaataaaatttacaaaacggcttgtataattcgtgtattttgaaataaatatttttatttttcaaatatgcgagttttgcgtgtgcattcataatgttttgaatatcagagaatcgtcttctctgttctctttttgtgcataataagtccttcggattagttcttaaaaagagcaataattctaacttaacagccttattttcttccttttcatcgcatttttgctttgctttcctgcgaagaccgtaatgcaatcttcgcagaaatgcgcaccaatcttcgcaaaaacgtgtagcaatcttcggacttttgcatcctgatactttgaaaacagcttctcaatagtgaaaacactcctgacaattctctaaattgctgaaaaaatatgcacgttttttggtaatcagattttacaaaattgaattggggacgcgtttgattgattttcctcttttaagtctttctcaccttatgataatctttctccactcttttttcgtcttcggcttgacaatacagaaaagtttgcgtatatttgctttcgactaaaaatttaaattgataagtaacattttggaaaagcagaccatataaaaacaaaaaaggtgagttgccccaccttgaatgttttcacaacggaatgatccttattgtgatttgcttgaaaatatgttgcaaatataacaatttaataatctacttccaaataaaaacgaagaaaaagatgaaaaaatgaaaacaatcttaggattagacttgggaaccaatagtattggttgggccgtagtctttgttgatgatgaagggaaattcgtgcagaaaattaaattgggaagcagaattattcctatgagtcaggatgtgttgggtaagtttgatagtggagttactgaatcacagactgctgttcgtacgggattccgtggagtgagaagaattcgtgagcgtaatcttcaacggcgcgaacgcctgcacagagtgttgcacactttagggtttctgccaaagcattatgattcggcaataggatgggacaggaacaggccgacaacctatggtaagtttcttgaccacgctgaacccaagttggcgtgggagcaacaggaggacggaagtatgcgtttcctgtttatggattcgttctgtgaaatgatggcggactttgcacgatgccaacctcatcttattgccaatggaaggagggtgccattagactggactatctattatttgcgaaaaaaagcacttacacaagctataacaaaggaagaattagcttggatattgcttaattttaatcagaagcgtggttactatcaattacgtggagaagaagatgaagaaaatccaacgaagaaagaagaatattacgaacttaaagttgtcagtgtagaggctgatgagaataataaaggtaaggacacgtggtacaatgtacatctggaaaatggatggatatatcgtcgcagcagtaagatctcgcttgataattgggtaggtaaaaccaaacaattcattgttactactgaatacgagaaggatggtataaccttgaaaaccgataaagagggaaatgtgaaacgttcgtttagagcacccaaggaagatgactggggattgctgaagaaacaaacggaagggcaattggaaaagtcgggaaagacagttggtgcttttatctacgaccatattcttgataatccttctgataaaatcagaggtaagtttgtgagaactattgaacgccgctattacaaggacgaactgcgtgctattcttacggctcaaagtaagtatcacgaagaattaagagacggcacaatgctggctgcttgtgcggaagaactctataagggaaatttgccccatcagcaaagtttgttgaagaaagatatgtcgtaccttcttcttgatgatttgttgttctaccaacgtccgttgaaaagcaagaaatctttgattgctgattgcccttatgaatattatgagtacgttgataaggaaagtggagaaataaagcgccagactatcaagtgtattgccaaatccaatccatattttcaggaattccgtttgtggcaattcattattaacttgcgtttattcgaccggacggatgataaggaagttacggaagagtatttgccatcgaaggaagcctatgctcgcttgtttgcatatttgaacgaccgcaatgatatcaatcaggaaacattgctgaaagacttctttaagctgaagaaagagaagatgggcaatgataaagtgtatccgattcgttggaactacattgaagacacgtccaagaaatatccttgcaacgagactcgccacgaattgttggtggcattgcagagggcaggtatagacaaagagtggttggccgacaagagactggagtatcggctttggcatttgctttattccgtagaagcgaagagtgaggctgaaacggcacttcagaaattgaaagacgatgaggcttttgtaaactcattcctgaaagttaagccttttaaaaaggaatatggtgcttactctgaaaaagctatcaagaagctgttggctgtgatgcgtatgggcaatgactggaatgaagacaatatctgcgtggacacgagaaagcggatagaagacatcataaacggcgatatagatgaaaagatcagaagcagaatggggcagggtatgcgttcctttgaaagtgtatctgattttcaggggttgccggaatggctggcttgttatgtggtttatggaagacattctgaagctacggagattcagcgttgggaaactcctgaagaattgctgaattacgtaaggttcggattcaagcagcattctctccacaatccgatagttgagcaatgcatacttgagagtttgcgcacggttcacgatatttggaaagaagtggggcatattgatgaagttcacattgaattggggcgagaaatgaaaagcacatcggctcagcgtgcaagtcgcacccaagctatattgaagaatgagaataccaatttacgcatcaagagtttgctgatggagctaaagaacgatgccggcattgaaaatgttcgtccattctctccaatgcagcaagaaatattgcgcatttatgaagaaggtgcgttgctggaacttaccaaggaggataagcagtttgatgaaataagtaagatttctcaaatggcgcagccgacggctaatgagctgacaaagtataagctgtggttggaacagaagtatcgttctccatatacgggaaagcagatttcgttggcgaagttgtttacctcggcatatcagatagagcatattattccccagagcagatatttcgatgattcgttctccaacaaggttatttgcgagtctgaggttaatttactgaaatccaatatgcttggatatgagtttataaagaaccacggtggagaaatagtgcattgtacgatgctgggcgatgtgaaagtcttcaacgaagatgagtataaggcgttcgtaaccgagcattattcagctcaagaggcaaaacggaaaaagaagaatctgttattggaagacatacctgatgagtttttgaatcgtcagatgaacgacagtagatatatcagcaaggtggtcagaactctgctctcaaatatagttcgcacagaagatgaaatggaatctacgtctaaattcgtcatttcttgcacgggaggaatcactgaccgattgaagaaggattggggattgaatgatgtttggaacagcatagtctataagcgttttgaaagactcaatcagattacggatacggaagcgttcggacactgggaaaacaaagatggcaagcgggtgttccagacctctgtgccattggaattgcagcgtggattcaataaaaagcgaatcgaccatcggcatcacgctatggatgcgcttgtgatagcgtgtgcgtcgcgcaatatcattaattatctgaataatgaatctgcaaacagtccagagaaaagagaagatttgcgtcgtaagctttgcgataagaacaggattatccgtaagccttgggaaactttcacgcaggatgtgcgtaaagctctggaagacgtagtcgttagttttaagaattatgtgcgcgtaataaacaaggcgacaaattattatgaaaagtatgatgaaagtggaaagaagataatttgcaagcaaaagggagaggatatgtgggctatcagaaagcctatgcataaggataccgttttcggacgtgtgaatttgcgtcgtaaagaaactgtcgttctttcaaaggctttggataatatatcttctatttgtaataaggagttacggaagtacattaatggtttgatagcaaaaaactttaataagaaacaattgttggcacattttaagagcttgaattatcgttggaatagacaatatgtttcaaagattgacgtatgggtgaatagcgatgaaaaagagccgatggtggctacgcgtaagcctcttgatatttcttttgacaagaaacgtatagaatctatcactgatacgggtattcagaagattctgctcaattatcttgcatcaaaaggcgatgatccagcaatggcctttactcccgaagggattgccgagatgaataagaatatttcgctgtataataatggaaagtatcatcagccgataatgaaagtgagactgtctgaaccattgggagccaagttcccaataggtcaaacaggtaataaaaaagaaaagtacgttgaggctcaaaagggtactaatctttattttgctatttatgaaaatgataaaggcgaaagaagctataatactgttccactcaacgaagttgcagaacgtttgaaacagggactttctcctgttcctgaggttgatgatcaaggtgtgcctttgaaattctatctgtctcctaacgatttggtttatgtgccatcagaggaagaggtagctttgaatgaatgtaggatggataagagtaggatatataaggtggtaagtggaactggaaaagattgcttcttcttacctaatagaataagcaaacctattttcgaaaaggtggaatttgaagctaaaaataaattaggtagagccttgtcgggtgaaatgattaagactgtctgttggaaactggaaattgatcgtttgggcaatattcgtaaaatcattaaatagtatggcttatgataaagaaaacgctttgttttacgacccccgtctatttgagtttgcgcaatgcacaattggttttgcgtttgcccgaagtggaaacaagtgatggctatccggaaaaattgaagaaagaagccgagcgcaccattccgatagaagatatcggagtggtggtgctcgaccataaacggataacgattactactggtgtgttggaagccttgctggataataattgtgctgtaatcacgtgcgattccaagagtatgccggtagggatgatgctgcctttagatggaaacagtacgcagagtgaacggttcagacagcagataaatgcttcgcttcctttgaaaaaacaactgtggcagcagactgtcaggcagaaaattctcaatcaggaggctgtactgcgccttaccaccaataaggaaactaattgtatgcgagtatgggcaacggatgtaaggagtggcgatagcgaaaatttggaggctcgtgctgctgcttactattggaagagcctgttcagggatattcctgattttgtgcgggatagggaaggaatgccgcccaataatttgttgaattatggatatgccatacttagggcagtcgttgctcgttcgttggtgggcagtgggctgttgccgacattgggaatacatcatcataataaatataatgcctattgtttggccgatgatataatggagccgtatcgcccatttgtggatcagttggtattaagcataatggaccgggtgtatgattgtagtgaactgacgaaagaaatcaagatggaactgttgggaatccctgcaatggacgttaaattaggaggtaaacgacgccctttgatgattgctgctcaagaaactactgcgtcattgtataaatgtttcgcaggtgaaatacgcaatataagctatcctgaaatttaaacaatacgtaaagatggcaacttttgaccgacttagtgaatttagaattatgtggatacttgttttcttcgaccttcctacagaaacaaagaaagacaagaaagcctatattgactttcggaagggcttgcagcgcgatggtttcacgatgtttcaattctctatctatgtccgtcattgtgccagtatggaaaatgcagaagtgcatatcaagcgcgttaaaaatcttttgcccaagtttggaaaagtgggaattttgtgtattaccgataaacaattttcgaatattcagctcttttatggcgaaaaaccacaaagtcccaatgctccttaccaacaactggagttgttttagaaatgaaaaatcccactcaatacgagtgggatttttgtttgcattatcattttttgttttttatctttctttgcaactcgttgttctgtaaatagttacagtcaatcagttgtttttgataatgcaaagataataattttcaagcaaatcacaactgcagcttgtggagagcctgttggttttccgttgtttttgataatgcaaagataataattttcaagcaaatcacaactgcgtaaaaaactacgtaatatgcttttttgttgtttttgataatgcaaagataataattttcaagcaaatcacaacaagctcgaattttctcacttgaaaaatctagttgtttttgataatgcaaagataataattttcaagcaaatcacaaccaaaagacccttagtattatcactgaatctgttgtttttgataatgcaaagataataattttcaagcaaatcacaacagaatagtgcaatatgcaacagacaatcaagttgtttttgataatgcaaagataataattttcaagcaaatcacaacaaactttgaatttttcttattaaaaaaaagttgtttttgataatgcaaagataataattttcaagcaaatcacaactccttaaagattttttttctttatcattggttgtttttgataatgcaaagataataattttcaagcaaatcacaacacagagaatgctatcaagtaaatgattatgttgtttttgataatgcaaagataataattttcaagcaaatcacaacaaagaagacatattcgttagttgcaatgagttgtttttgataatgcaaagataataattttcaagcaaatcacaacttcttaaggattttttttctttatcattggttgtttttgataatgcaaagataataattttcaagcaaatcacaaccttattgaaaaatctaattattaacaaaaagttgtttttgataatgcaaagataataattttcaagcaaatcacaaccaataatatcttttgcattattcttaattgttgtttttgataatgcaaagataataattttcaagcaaatcacaacgaaaaagctcttaatttatgtaaaaagtagttgtttttgataatgcaaagataataattttcaagcaaatcacaacgaaactaaagaagataagaaaaagcaattagttgtttttgataatgcaaagataataattttcaagcaaatcacaaccattatcaaatttaattaataattaatttagttgtttttgataatgcaaagataataattttcaagcaaatcacaacacaggtacaagaaaacaggtgtttggcaaagttgtttttgataatgcaaagataataattttcaagcaaatcacaacggctatgcgaggaggcgcaacaatgcacttgttgtttttgataatgcaaagataataattttcaagcaaatcacaacaagataatggatattaaagaacttaacgacgttgtttttgataatgcaaagataataattttcaagcaaatcacaactgagttatgaattacagaagtgttattctgttgtttttgataatgcaaagataataattttcaagcaaatcacaacctatttcaggagatggttctacaacctcttgttgtttttgataatgcaaagataataattttcaagcaaatcacaactccggcagctccgttaacacattcgctggtgttgtttttgataatgcaaagataataattttcaagcaaatcacaacccctccaacctgttatgcaactctatgcagttgtttttgataatgcaaagataataattttcaagcaaatcacaacctgattcttataggaatggcttgcttaaccgttgtttttgataatgcaaagataataattttcaagcaaatcacaacatgctttaggttatgaactaaccccgttaggttgtttttgataatgcaaagataataattttcaagcaaatcacaacttgaattcaggattcgaccacgttgccagcgttgtttttgataatgcaaagataataattttcaagcaaatcacaaccacaatcaggagatagtttaagttcaaacagttgtttttgataatgcaaagataataattttcaagcaaatcacaacataaggagttgtgcgaggtaataaatgcggttgtttttgataatgcaaagataataattttcaagcaaatcacaactgttgcccagtctcataaaaagacgaatacgttgtttttgataatgcaaagataataattttcaagcagatcacaacattttgacacacctcctattttatgcttttaaagacttggataaagattactattccacaaaattctcttcaataaattcttcaaaggaatttgaaagcacctgcttttcttctgtatcgtagtcaaatagcactatttcgccattaggcataatagcaataggattgcccgaaccatcatcagcaattacaagacttttattaatttcagggaaaagattggcttcattaaaaaggttgcgagcgttatttgttaaatcaattattgtttcatttcctattgatgttccatttataaaagcatgaatcgctaatcctgcataagcacctccaaaattttggataaactctttataatctttatccattataatattaagttctttttcagcatttatgatttgttcattagtagctgcttttcctgacatagtgggattttgctgaaagaaaacattcaacttttttatgacttcttgtttcatatccgtataaaaaaataatggcacctattttttgcctgttgtttttgataatgcaaagctaataatcttcaagcaaatcacaactggtaataggtaatatttttataaaacctgttactttatgcctctgaatttgagattcttccaaactcgggacaatcattgataaaaaagaattttaatgctgattgtctttttctttttctttttctctttccctttcttcttttttgtcttggatgcgaaaatatataatccacgcaataaacattcccaaaactgataataacataatattagctgccatttttattttcctttctttttatcgttactatctgtcaattatgccctaatttgcacttccggaattacagcagacgccgagattgtaaaactcaatcattcttattgctcggttctgttgaattataaaacaagtattctcacgttgtgagtctgggcgaaacgtgtgccaatgctttgagcgttcatttcacgggtgcgtttagagtctgtttgcaaatatagttataaaaattataataacccaacttatgaggttttttatcggcttgccatttccgggtataggattttgggtgcaaaaagatgcttgttttttgcttgattcgcctgtgatttttccgctctgttgaggctgactccgacaaggggtgctggaaataattgcaggctgataaaaatgtgtttttcaaatgtgcgaagaacgtcgtgcattctttgcacattcgctttccgtttttgcgaagattgaaacgcattcttcgcacgtttggaaagcaaagtagtagtcgctgattatcagtggtttacgaggattggggtgttcggtacattatacgagtcagattttcagtctgatgaaagaatgaatgaataatattgcattatcgtgaatatttgcagaaatcgcgggaaaggtttggatattagcgattttattcgtaactttgcatcgttcagtggaatgaggggcttttcggaagtccctcatttttcatattaaaaactgtatgatagataaaaacgtagtaaagaaatttgttgatgagtggctggaggacaaggagtatttcctcgtcgatattcagttaagcccggacaacagaatcgttgttgaaatcgaccacgttgatggtgtgtggattgaggattgcgtggagttgagcaggttcattgaggagcgtctctcgcgcgatgaggaggactacgaactcgaagtgggttcggctggtctggggcagccgttcaaggttcctcagcagtacatcaacttcattggcaaggaagtcgaggtgctctcgaaggacggaaagaaagtgaagggcgttttgaaaagcgttgatggcaaggactttgtggtgtctgtcaatgagaaggtacaggtggaaggaaagaagcgtcccgtgaaaatggacgtggaccacacgtacaatatggatgaagtaaaatatacaaaatatataataagtttcaagtaaagctatggcagcaagaaaagaagaagagcgtccgaatatgatcgagaccttcaaggagtttaaggacaccaagagtatcgatcgcacgacactggtaagcgttttggaagagagcttccgcaacgtgattgccaagatttatggttcggatgagaactttgacgttatcgtcaatccagacaagggcgactttgaaatctaccgcaaccgtgtcgttgttgcagacggcgaggtgcaggatgagaataaggaaatcagcttgactgatgcacagaagatagaatctgactatgaggtgggcgaggatgtttccgagccagtgaactttgctaagttcggccggcgcgccattctcaaccttcgccagactttggcgtcaaaggttttggaactggagcacgattctctttacaacaagtataaggaccgtgtcggtcagattatctccggcgaggtttatcagacttggaagcgcgaggtgttgctcgttgatgatgagaacaatgaactgattcttccgaagggcgagcagattccccgagaccagtatcgtaagggcgagacggttcgtgccgtcatcttgcgtgtggacaatgaaaacaacaatcctaagattatcctttcgcgtactgcgccttcattcttggagcgtttgctcgaggctgaagttcctgaaatcaatgacggacttattgccatcaagggcatcgcgcgtatgcctggcgagcgtgcaaagattgccgttgagagtttcgacgaccgtatcgacccggtaggtgcttgtgtcggtgtgcgcggcggccgtgtccacggtatcgtgcgtgagctttgcaacgagaatatcgatgttatcaactggactgcaaacaccaagttgtatatccagcgtgcgctttctccggccaaggtaagcagccttaccattgacgaggaaaacaagaaggcagaagttttcctgcagcccgaagaagtgagtctggcaatcggtcgtggaggtatgaacatcaagttggcaagtatgctgacgggttacactatcgacgtgttccgtgagcttgacggacagaatgcagacgaggaagatatctacttggatgaattctctgacgaaatcgacagttgggttattgatgccatcaagggtatcggcttcgatacggctcgcaaggtgctcaatgctccgcgcgaaatgctgattgaaaaggctgaccttgaggaagaaaccgttgataacgtattgagtattttaagagcagaatttgaaaattaggtgatagttggtaggtgatggttgttgtctgatagctaacgggtggactattcagcaacttccatgttcggaacgccaagccaaagtatttttcaacaaccagacaaaccaacaccctacaccgaaaaataagattaatgagcatcagattaaataaagcaattcgagaactgaacataggactccagacggcagtggagttcttggagaaaaaacaagacttgggcgaagtcaagggcgaccttaacttcaaattgagcgacgaacaatatcaggctctggtaaaggagttcaagagcgatcaggctgtaaagaacgacgctgcgaaaatccttcagaagaagcaggagaagaaagaaagctcgcgcaagtcggcagccgagcacagggctgaaaagattttgaagcaacggccacaattcaagcaggtcggaaagatagatctcgaccagctcaacaagccggccgctaaacagactgttgctccggctgaaacaccttctgcacctggagaaaaggctactgtcgcaagcccgaaggaagaggttaagccagaagttaaagccgaaaagacggcagaacccaaggttgagaaagccgttgaggcttctgcaaaagtggaaaaggctgaaacacaaaagcccacggcagcaaagaaggaagacgctccaaaagcgaaaactcctgaagctgaaccggcaaagactgaaacgccaaaacaggaaaccaaggttgaggctccggtagaagaaaaaccaacagtaaaggaaaacgataagaaaatggagtccgcaaaagaaggcatctaccagacttccaatgagaagaagatgctgaatcagccgaaggtaaatgtccttggcaagatagaccttagtacgctcaaccagagcacacgcccgaagaagaaaagcaaggaagaacgccgtaaggagcgcgaagacaaggctggacagaatgggcagaacaagaagaagcgtgttcgcataggcaatgaacgcgtggatatcaacgctgctgccaatcagcagggcggaggtaagtccggttcaaagaaaaacaacaacaataataataataacggtggcggcaaaggcaagaacaatcgcaacaacaaccgcaatcagaagcctctggaggttgatgatgaagccgtagcacgtcaggtaaaggagacgctcgcacgccttacgagcaagaaccagaacaagaagggtgcgaagtatcgtaaggagaagcgcgaagccgttcaggaacgtctgaatgccgaggcaaaggcagagcgcaaggagagcaaggtgctgaaactgacagagtttgttacggtatcggaattggcaacgatgatgaacgtgcctgtaaccaacgtgatctccaccttgatgtcggtcggcattatggtgtctatcaatcagcgtctcgatgccgaaaccatcaatatggtggcagacgaatttggatacagcacggaatacgtgagtgccgaagttcaggaagccgtcagcgaggaaatcgacgacgagaacgacctcgttacccgcgctcccatcgtaaccgtgatgggacacgtagatcacggtaagacctctctgctcgaccatattcgcaacaccaacgtgattgccggcgaggccggtggtatcacacagcacatcggtgcctacggtgttacgctgaagagcggccgtaaggttacgttcctcgacactccgggccacgaagcgtttacggctatgcgtgcccgtggtactcaggttaccgatatcgccattatcatcatcgctgccgacgactcagtgatgcctaccaccaaggaggctatcgctcacgctcaggctgccggagttccgatggtgtttgcaatcaacaagattgacaagccgggagccaatccggataagattcgtgaggaccttagtcagatgaatctgcttgtagaagagtggggtggtaagtatcagtgtcaggaaatcagtgcaaagaaaggactcggcgtggcagacctgctcgacaaggtgctgctcgaagccgatatgctcgacctgaaggccaatcccaaccgaaagtctaccggtacggttatagaatcttcgttggacaagggacgtggatatgtaagtacggttcttgtttccaatggtacgctgaaggttggcgacaacgttatcgcaggcacatcttggggacgcatcaaggctatgttcaacgagcgcaaccagcgtatcgagtcagcaggaccatctgaacctgccatcatcctcggtttgaacggtgctcctactgccggcgacaccttccacgtgatggaaaccgaacaggaagcccgcgatattgcaaataagcgcgaacagttgcagcgtgagcagggcttgcgcacacagacccgtcttacgctttccgatatttcacaccgtattgcccgtggcgagttccacgaaatgaatatcattgtcaagggagataccgatggttctatcgaggctttgtccgattcattcatcaagctttctaccgagaaggtaaaggtaaatgtcatcaacaaggccgtaggtcagatttcagaaaacgacgtgatgcttgccgcagcttcagatgcagtcatcgtaggtttccaagtgcgtccttcatcagaagcacgcaagctggccgaccgtgatggcgtggaaatcaacacctattctgttatctacgacgctatcgacgacgtaacctcaacgatggtcggtatgctcgacaaggtaaagaaggaaatcgtaaccggtcaggtagaggtgcagcaggtgttcaagatttccaaggtgggtacggttgccggatgtatcgttaccgaaggcaaggtacacagcaaggacaagggtcgcttgattcgcgatggtatcgttatccatacggcacctatcagcgcactgaagcgatacaaggacgatgttaaggaagtggttacaggtttggaatgtggtatttcacttgtgaactacaacgatatacagacaggtgatatcattgagacattcaccgaaattgaagtagaacagaaactgtaatatgccagtcgcctctcttttccacagggaaagatgaggcgatttgtgcttgatggcaactgatgttaccattgtgctcgttggcatactatttgtttt

SEQ ID NO: 619 - DNA, 24458 bp, synthetic construct
  source 1..24458: mol_type = other DNA
  misc_feature 1..24458: note = Synthetic
gaaacaaaagcagtggatagggtataccatcatctttctggtagtcatactgattgttatttatcgcgtggaaatctatgatgtgattagtactttgctgactgctctgttcgcaagatagttgattcggattatgtgtgaaaattcaaaagatgtgataggaaattctaaaataatgaaaactaactgttttttgtgcctgatggtcatggcacttactgcgctagtgcagggatgtggaaaccgccagaaagagtctttaactgaccttttagtggtggaacaaaccgattctatacaagggaatcatgagggaaatagctattgttgggcttccttcaaagtggatgttcctgtaaacggtcctctgcaattggtagattccgtgttggcattagtcaatagagaggtctataagatgtgtgagtattgtatagagttcgatgaaagtcctgatgaatacgtggaatatagtgaaaaggagatgtttacacgtgacggtgaaggactgcttcgtcattatatgaaaaagtataaaccgcttattgccgatagtctgtggaatacctttagtcttgaccttaagatggaagcgcaaacagagcattacgttacctatggtatggaatttctccattgtggtggtagctgtggatcagagaaatactactacacattcagtaagatcgacggtcatcaggtaagggatattattactcatcagaaccttgtgatgttctttgaaaaccacccagaatataagaccgtttcagaatgggagttctctgcagataatatttttaataattctcagtatggaatattaaaggataatttcactttgactattaatggggtactgaaccattacttccttaatgaaattccctatagtgatatttcttcttatcttagtccagaagctagggcattagtggaacctttatctcagcggtaagggaaattttggattagagtattaatgttcttattatgcaaaccaaaccacaaattttcacattaagtaatgggcgtgtccacgtaaaagatatatacgtgggacagccactagaaagtgccaagaagatattattggaacaaaatttcactgtggatagagaaactgcagagatcatatattttaaaggatatttagattcgttgggtctatgtaatttaaaaatgtggggaaataataccgttgaagctatttatatttctacagaaaaaagatttaccgaagaagaaatgatggaagtctttgagcagttaaaagtagaacttcacggtgagccaggatatgactataatggctatggagtctcaccaaaacctcatgaagtgcatcatttttgggacctgaatgaaggcctagtatggattcgatgggatgggtataatgtaagcatgttttcccacaaccaagatggtgcggataaaatgaacttagaggttttgggacctgttgttaaagacgaagtttattggaggtcggaggtggattgagcatcacgctgaatttaactttgcataaggaaagacatcccaccttgtagaactgaactgcaccccaaaagttagacataaaacttttggggtgcagttcattcttccacgtaggggtagtgttctcatttcttcaaaaccagcacctgcttccggttcttgtccaggtttctccggcaggagatgtggatccagcagcgcaggtaggggtgggcgtctatccaggtgaggcgctgctcccagatgagctggtcgaaggggcagtggcactggagccactggaaccattccagacctatcttgatgctgggaagatgcagatcacaggcctctcccgtaagatgctgggaatggcgtgcgccgcccaccagcttgttaagctgactgcagcgataaccgctgctgatagtaataggttttccatagtgctctctcaagggctccaaaacctcttgacagaggttctggaggtttgaaatagcttccacaggtggctcgttgcaaatgccatgcttagcggctacggaacttcgcgtgaactcgttcaggctgaagtgttctgtcagtttttgtccttccatgtttcggctattaaggtttcacatgttcatgttctcacggcttacatcatcacgcccaggcccagtgcgctggcaatgccagagatgagggtgaggatggtgttcactatcacggtccaaatgttcttcttttcagtagtcattttcgtaaattttaaacggatggttagtaaaattaaaagtttgataatcactcttttcataggctagttcggtttttgagaccggtccagagaccagagggaggcgcctcctgtcccggatctctttagctctggtctcaagccctagtcctggttaaacggttagtctcccatgcctgagtcgccaccttcctcggtggttccgccggtgttctcaccgccctgtgtgccgctgccggaggttcctgagcctgaggtagagctgccgctgccttctgagctggatgagccaccctgctgtgctgaagcgtcctcctccgatgctgggcgagtaggatagccttcacgcatagccttcatagtggctgctgcggcttttcggctctccaccagctcaaagttggcatcgtctattaggttcttgaacttggagcccggaatccagcgcacgttcacgctggagattttctgagcagtgaactcattgtagtagtcggcccccttagaggagatggtcacagagaactcgcccaggtcgcccaggctgatcttgcacccttccagaagcttctcgcgcagacaggacacggcctctgttatgatgcaatagatgtcgcccttgccatatttgctatgatgctcactgatgtgctgagcaaagtcgtccaggctgaggtattcctgctgctgggcagtggcgtaatacttcacttcgggcacgaaggagtccagcgtgccgttcttggcagccacggtacgttccgcaatgttcaccacacgtgcggagatgctgtagttaatttttcccatttttagtgttttacttttttagattaacaataaggtttttactcacatgtcgctcatgattgacaatacaaagatacgatgccgcggaagcctattgtcagggtttggcagaggtagccaaagatgacattatttggctgaatttgacacgattagatgttgcagaattcagaaaaaaggtgtatctttgtggtatgaaaaggatgtataagatagagttggccagggctgccggggtatctccccgcacgttctcccgatggctgaaggcgaatgagcaggagctaagaaaagtgggggtaaagccatctgatcacttggtttccccttcgggtataaggtatatctgtgagaagtttgatatagagttagaggaggcgtaaggttgtgctctataacgcgtatggcttcgctctatagaacgaagggctctgctttataaagcgaggggctgtgttctataacgtgcaaggccgaagtatattgaacttcagccctgcacgataaacatgttttagaaatgtcaaatttcagtaatgattttattgatgacctctttcatctgaggcacatcttcttgaatagtacggaataccacgtcggtatcaatttcaaaataatggtgggctattttgtctcgcatccgcattacaccactccagtaaatttcggggtatttgggtaatagctcaccatgagtttgcttgtccagacctttaacggcttcacctagtgcaattaagttcatgcagatagcatctattctcatcattccttcaggggaggtgagaagttcattaggatcgctgaccacagaggcacgttctaaaatggtgtcgatggctttctgaattttcagtaagctgtccattacaatttcgtgatcaaacatagacagcctcctttttgatacgttcttttaacaaactgttcattccatctctgatgcgaactaaatctactgggcagtccagtaatcgttctaaatcagtctggataagatctagtgtcaataaggaaggaacacgcccctcgtagcatacatccacatcgctgtcatgggtatgctcaccacgtgccacagaaccaaagatgccaagacgtgtaagtccgtacttgcttttagctgtatgcttgtagctcttcagcaactttaatatctcatcctttgttttcattttgagttcttaattcagctaatactaacgcaaaattactaaatctttttgaataacatggtttttataccttttcttttcgagaaaaaagaaaaagtaccctcaaaaagtcaagggattccggcttcacggcctgcgccccataagataatccactatatctattttttcctttttttgctcctctgtcgctacacgctccaggaaatcactcacatagataggctgggagagcagctgctgcgccctccgtgccgtgccacaccactgtgcataagtctgcccttgcgggtccgtatccgggaaaaggatgatgcggtggcctttcagcggcagcagcagctctggcttgaggctctgcaagccccccgtcgccatccacaggaaccgccgctcggccagcagctgggagcagatgaacgcggtcttctcgctctccactatggctatgcccatgatctcttcctgcgggactacccccagcaggtgcagaccgaagaggcatcgggtggcctcccattcggccgggagccggtacacatcctgacccttgttcttcatgagccacgagatgaagttgggctttatttcccggttccggtgcgcattcaccaggtagtgcatcaccttcccgtcgcgcacccgctgctgctcatctatctgccagaagatgatgcctcggtccgtgagggtgctgcccgtgcggtacaggctggcagcccgctgcatctgctcccgggtcaggatgcgcgtctgcaccaccgcctcgcagaactcattgttgttacttcgccggctctctaccaactggctgtccagcgtatatttcacctctttggggctaaaaatctcctctagttccatgccttttttctgtttgttgaacgaagcgccctcgtcttcctccaccaggatgtgctcctgcccagctatccacttcaccgcatcctgataggacagaccctctttctccatgaccagccccacaccgtgaccgcccttgccgcacacaaagcagcggtagatgttcttctgtggcttgaacatcaggctggggtgcgtgtcgggatggaaagggcagagcgccctatggcggttcacctccagccccagtagctgggctatgcgctctataggcacactgttcactttctccacggtatacttgctaatcatgacgttttctgggttaaaaattctattcgttttctgccttgcggagtgatgtcccttcaccccctagtattaccccttacagggggtatatactgagctgggggtacggcggtccatcacggagcaaaactaaatgaagtttgtttctgcttccattggtccagtccagcctcacgctcgtacaccactaggctggggcttatctctgtgcggcgcaccaggtgcgtctccagcgccttgctcaggaagtaatcatatcgctttaccgacttcatacccaccagccccaagaagtaggcctgcagctgggtggcccgcaaccgtgtctgtgccggtaacaggtaatcgaaggctttctcatacttgatgtagcccgaagatgtagaatattccgggtttagccccccgttcggttctgttcctggcagggtgcccgtgtacggttcaggcagaccgtcttcgcccgccacatagtacatcttcttccagatgtcgaacttacgcgtacgcgtctgcgccagggagaagaccttgtccagccctttggtacactcatagacctcgaacgacttgtacgtgagttccgtacctatccatccgcggaggttcttgtcctcggacgacttattctgatgcagcacgcacacaatgcagcaggagcagctagatgccaggtgcatgagccgttccagcaccgcctgagccagcttcccatcgttgatgtcgtccaccaggtcgcgtatgccatccagaatcaccagatccggcttacagtctgttatagcctgctccagcagcggcaatcgttcctgccaagattcggcccgcacgttgaacacgaagaactgttccgaagggaagtcgtccacctcggtcatgggcatgatacggttcgttaagatttcctgtgtagattcctcgctctgctccgtgtcgaaccaaaggacacgcaaatattcctcaccgaggcgcaccatatccagcacctccttttttacacagagggtcatcagtatggaagaaacgaacgtcttgccacttttctccttacccgtgagagccaccagttcgcctttagggaaacaaggcgttccgaagagctggaagaggaatttccgttccggaatgctggtatgctcatctatgcggcgcgcctgcagtctgcgcctacgttccagcacttcggggtcctcgccagccagctccagttcctgagctatcaggagtaaggcgtcttcgttttgcatacgtatattctatctgctatttcatcgtcatcgtcataatattcatgagattcctggcgggtaagctgttccttttcccatttttctatgtatttctgatgttccatatacttcagcttggcatagaccagggctccggtaggctcatccatatccatgaaatcctggaatgcccgttgtgccgtgtgcacatcgcagatgtgtttcagtctatatggcagcatatcagaatcataaaagatgtccgagttgtagtactggtgtattttctcacagaaccagtacatcacctcctcatgattatggcgcagcaggttagggtttttatagttatggatgaaagactccatccactcgttgttttccacatccagcataaagcccacgtacgtgaaccacggggttttcttaaactggctgaaccgtgctggcagtccagagaagacgtacctcactttaggcttcatagggtttgacataattttctttttttagtttgttcaacattcacctaggtttgatggcaaagttagaggttatgtatctcactgccaagagtttccccgtaaaaggaataaaaaaggaacaaagtgaaaaaagggaaagattaaagggtggagaagtattcccagaagcagtttcccagcatcaccagttcttctaccttttcctgcttcaaccccgatattttccaatccgggtgtttagactgatgggagaaaaccacctttttcaagttctcttcactgggatggctgatgcttttcagcctacaacttttaatgatctccacaaatttattgttgggtagatgcatcgcgcacttctcctgcagaatctgcttcaccgccgccagactgtacttgtactgaatcagcccctgggcatccagatactccaccgcctggcgtatgcggtccatcatctcctgagtcaatcccggcatgaccggcaccaccggcacacagtccacctttactacttgagcctctggcacctcctgcacaggagcctcctttacctgttccgccttcttaggctgttccggaccgttctgctgaaactgacactgatgtccgtacagacatccataattgttgcggatgtagattccgcctttgattaccactctcatttactatatgctgcaacgtgacatggggacaggtcccgtgtaacgtaagttacttatatcgttaattttcaggctattatctttacgttacacgggacctgtccccatgtcacgttcagaaagcgggggcaaaagtagagcgggggagattaacgcaaaggaaaaagggtgggatagtcagtaaaaaagtcagcaagtcagtctttttcagcagaaagtcagcatttttgagccagcaggttcaggtaacattcagagaaacgcagagccatgtggataatcttttcccgcttcacctggctcttggagtctattttccagtccgggaatttccggctgatgttcaggttcttcaggatactttccgaggccggcctgatgttctgcggaatgtccatctccttgagaagcgacaggaagttggcatacgtcatcttcggcgcacagatttccgagatacgatggtggaacacctcaaagtccagcttccgcgttaccaccccgtcgtctatcatctgggccagcgcctccttcagcacctcgcggtccaccggcttcagcagcagtataccctccagcctcagttcactggccagcttctggaactcctccagggccgtttccttctggaagtattcagccttggtgagctgagccgccagctgggtaagcgcatccacctcctcatcgttcagtttagccagccccttcttcgccagttcccaggtgacatccttttccctcagcttattcaggtccatctgggtgagcagctgcagccccatttccagcatcagcatacatattttcaggtgctccgtggagaagtagggccagtcgcccgccgccttgttccccctgagcagtgcccccacagagctccagatctccaccccgtagaagtccttctccacacccaggaagttctggatatcccaatccttctgcgcttgccgggccagcttctccatgctaggcacctccatggttaccacaccccggtgcgtctggctgttgtttcgtcggggacggaagttccgggtcacctccaggaacaccttcagcagactggttactttaggcaccaagagcgggatgcacttatctgccacctgttccgggatacgctccccattaaaccttcctaaaaattccgtgagattcaactccagactagggattacagcctccatagagttgtcacaactttcctttttccatttctccacgccaataagagcactgtccaggtccatactaaacttctggaaatcctggattaaatcaagattttttttcataaagttaaaattataattagtccatggtgttccccccatggattatttttctccggacgctaagatacaagaaattagaagaaatctccccagattttatttcttcttttcccccacaatgaacgtgatgggagagctgtttcccccatagagtttcttgcgccaatactcccggcgcatgagcctcttcttttcctcctcctcagccttccggagcgattctctatccagccccagttgtttctccctacgcttccgctcttccagatatctccggcaggcctgtaccagttcgtcatctatctttaccatggtgggtatatttttattcagattttttgcaaatatagttaattttcatcactttatgcatttttcccccttttttatttggtaggggagaaatttagcgtacctttgcagccagtacaaatttacatagattttctcactaatgcagttctgttgtgaaacagggctgtatttttttgtggtttcagaatattttgtatctttgcagtatctggatgtttttattttataataaaaattcgaaagcggcaaccaatccctttcaggggaacagctcttcccagcagggaggggctgtttttttagtttgaggatttataaaagattgtttctaacttttaacaaaataatttttgaattgtcacagtttgtcaaaagtgcattctacttttgcaagtagaaaaactattcatgatttgaaaaatacaaattatttgagtaagtttgcaaaataagcactagaaaagaaagcatgaggctgaacaaaaacaaaggacgagttgccccgtcctaaatgttttcacaacggaataatccttattgtgaattgctttcaatgtgctgcaaagatactatttattttgaaagtttcaaacaattaaataaaaaatatgaaaaatattttaggtttagacttgggaaccaatagtattggttgggccgtggtctcaaaaagtgatgatgggaaatacactcaggatattaagctgggaagccgtattatcccaatgagccaggatgtactgggcaagttcgacagtggagtaacagagtcacaaactgcagtacgcacatcgtatcgtggtatgcgtagattaagggaaagatgcctcttaagaagggaacgcttgcacagagttcttcacgtgatgaatttccttcctgagcattatgataatgccttaggctggaacaagaaccagaattccacttatggaaaatttctaaatcatggtgagcctaagctggcatggagaaaagacgaaacaggtaagatgcagttcctcttcatggattccttcaatgaaatgctggcagattttgccaaacatcagcctgggcttttagctggtgacaagaaaatccctttggactggacgctttattatctgcgtaaaaaagcacttactcagcccatcagcaagcaggaactggcttggattatcttgaacttcaatcagaagcgtggttactatcagcttcgtggtgaggaagaggaacaggaaaagaagaataaactggaagaatactataaactaaaagtagtaaaagtagaagctaccgatgagcagagaggcgacagccgatggtataatatccaccttgaaaacggatggatatacagaagagccagcaagatgttcctggacgagtgggtgggcaaagaacgtgagttcattgtcactaccgacattgatgagaacggaaaccctaaactggacaaggaaggtaatgtgaaacgtagtttcagagctcctggagcagacgactgggcactgcagaagaaacgtacagaaaactctattgactcttctcacgttacggtgggtgaatacatttacgataaccttctaaagaacccttcagagaaagtaagaggtaagctggttcgtaccgtagagaggaaattttataaggaagaactgaaaagaatcatcagcaagcagacagaatttatcccagaactgagggataaggctttgctggaagactgtattcgtgaactttatgcacggaacatcccgcatcaggatagcttgaagaagaaagatttcgtgtacttgatagtagatgatcttttgttctatcagcgccctttgaagagcaagaaatctcttataagtgattgcccttatgagtcttacccttatgtagataaatctactggggagattaagactcaacacattaaagttgtagctaaatctaatccttacttccaggaattccgtctgtggcagtttattcagaatcttcgtttgctagaccgtgagagcctgaatgaggatgatgtaactgctaaatacttgcagactccagaagactatactaaactctatcagttcctgaacgacaggaaagctatcactcaggaacagctgcttaaggatttcttcgggttaaagaaacccaagggaaaagataccaaatattctctgcgctggaactatgtggaagataaggaatatccttgtaatgaaacacgttaccttatcctttctgcccttaaaaaagcagaaatagagccttctttccttacccgtgaaatggagcagagactctggcacctgctttattccgtagaggacaaaaatgaactaatccatgcactggagaagctgcaaaaagaactagaacttcctaattctttcgtagaagaactgaagaaaattccatcgttcaaaaaagaatatggagcctattcagagaaagccgttaagaaactgctttccgtaatgcgtatgggaacctgctggagtgaagacggaattcctgcttctgtaaaagaaagaattagtacaataataaaaggtgaagcacaagatgtggctctggagaaagctgctaatcaacacatttccttagcagaactaaaagatttccagggattaccagtatggctagcttgctatgtggtctatggtaggcactcagagagtagtgagattacacgctgggaaacacctgaagacctgatgatttttatccgcaatttcaagcagtattccatgcgtaatcctatagtggagcagtgtgtgctggaatctctccgtaccgtgcatgatatttgggtaaaatacggacatatagatgaaatccatttggagctgggccgaaacatgaagagcacagcagaggaaagagcaagaatctcagagcgcaatttggctaatgaaaataccaatcagcgcattaaatatctgctcatggaactgaagaacgatgggaacatttccgatgttcgtccttattctcctatgcagcaggaaatactccgtatctatgaagaaggagctttgacagaactttcccgtgaagacccagattttgcagagatttccagaatttctaagttggcacagcctacctcttcagaattgactaagtataaactctggttggaacaacgttatcgttctccttatactggaaagcctatcccattatcacgcctctttacaccagcttaccagattgagcacgtaattcctcagagccgtttcttcaatgactccctggtgaataaggtaatttgtgaggcagaggttaatggtttgaaatctaacatgctagggttggagttcatcaaggctcatggtggtgaagtggtgcattgtcctaccttgggaaatgtaaccgtatttacagaagaacaatacactaaatttgtaaaagaccactattctgccaatcgtgccaaattgaagaatctgatgatggaagatattccagaggaattcatccagaggcagatgaacgatagccgatacattagtagggtagtgaagcagctcctgtccaatgtggttcgggaagaaaacgaagcagaagctacttccaaaaaccttatcccatgtacgggtggaattaccgacagactgaaacaagactggggcctaaacgacatttggaacaagatagtttccccacgtttccagcgcatgaatgatttaactcaaagtgatgcttttggacattgggaagacaaagacggaaagaaagtattccaaaccaccatgccactggagctccagcgtggattcagtaagaaacgtatagatcaccgtcatcatgccatggatgcgctggttatagccttggcttctagaaatatagtgaattacttgaacaatgaatctgccaatgatgaaaaactaaggcatgaccttaagagactgctttgtggtaagggtggagtcattctgaagccatgggaaacctttactcaggatgcttataaagctcttcaagacatcgtggtaagcttcaagcattatatccgtgtcatcaacaaggccagcaactactatgagcattacgatgagaacggaaagaaggtcactgtggctcagaagggagaaagcatgtgggccatccgtaaaccattgcataaagaaaccgtatttgcccatgtgaatttgaggcgagtgaaagcaattccatttaataaagctctggaaaatccctctaccatagtaaataaagacttaaagcatttgattaagactttgatggaagatggcatggataaaaagaaagtcttgaatttcttcaagaaagaagatggtcttaagttccatggtcaagacatcagtaaagtggaagtttactattttaccgatgatgtagaaaagatggtagcagtacgtaaaccactggatgatagtttcgatgctaagaagatacaatccattacggatacaggtattcagaagattcttcttaactatctggctacaaaatacaatgacccgaaagtggctttcagcccagagggtattatggaaatgaatgagcatattgaagagttcaatggtggtaaaccacatcagcctattcttaaggtaagggtgagtgaaactctaggtgaaaagtatcctgtgggttacggttctaataaagataagaaatttgtggaagcacaaagtggaaccaatctatattttgctatttatgaaaataaggctggggatagaaattatcagacaattcctcttaatatagtagcagagaggatgaagcaaaatttgccaccagttccaggagttaatgaaaatgataaattaaagtttttcttatctcccaatgatttagtttatgtaccagaagagtctgagcaaaatgcagggattgatgaattatataaggaacgcatatataagtttgtttcatcaacaaaaactcaagcgttttttatccctagcaatgttgcttcagtacttatgaataaggttgaattccagtctttaaataaagctgaaagagcaatagatggccaaatgataaaggctgtttgttggaaacttgaagtggatagattaggtaacatcgtaaaaatcatcaagtaatgattaagaaaacgctgtattttggtaatcccatttacttaagaaccagattgtctcagttagtccttcaccttccagaggtggaggacaatgaggcatttacttcggaatttagaaaagaagcttccagaactatcccaatagaagatataggggtagtggtactggataataaacggattaccattacttctggcacccttgaagctcttttagataataatgtggctgtcattacttgtgacagtaaaagtatgcccacagggctcttgcttccgttggctgggaattctctccagaatgagcgtttcaggtatcagatagatgcatctttaccgctaaaaaagcaactttggcaacaaacagtaaggcagaaaatcatcaatcaggaaaaggttctttctgctaattcggaagtagaaaccaattgtatgaaggtatgggctgcagatgtaaaaagtggtgatgcagataatttggaagccagagcagctgccttttattggagaagcctctttcatccttctcttaattttataagggatagggaagggctgcctcccaataatctactgaattatggatatgccatattaagatctgtaatagctcgtgcattagtaagtagtggacttttgcccacactaggaattcatcatcacaatagatataatgcatattgtctggccgatgatatcatggaaccctacaggccttatgtggataaactagttattcagattatgaaaagtggtttggattattccactttatctaaagaggtaaaattccagttgctagggatacccactctggacgttaagatagacggaaaaaatagcccattaatgatagctgcctcacaaactgcagcaactctaagtcgatgttttagtggcgaattaagaaaaatagcttatccagaaatagtatgagttctagcctaagccgttttagtgaatatagagttatgtggattttagttttctttgatcttcctacagaaaccaagaaagacaggaaagcttatgccacttttagaaaaagaatcatgtccgatgggtttaccatgttccagttttctatctatgtaaggcactgtgccagtaaagaaaatatggaggttcataaaaaaagaataaaatcttttttgccggagtatggagatgtaggaattttatgtattacggataaacaatttgggaatatagaaatattttcagggcataaacctaaacagcccaatgctcctggacaacagttagagctattttaggaaaagggaatcttatggtttagataagattccctttttgattagatacaatttttaatttctaattcttcctgtaagtatctgagagctagataaatactggcaatcagttgtatctaatactgcaaagatactgaattgaaagcaattcacaaccctaatttgcaccgatcatgactaaaaacggttgtatctaatactgcaaagatactgaattgaaagcaattcacaactggaaggtaatccgaaaaagccctttcgggttgtatctaatactgcaaagatactgaattgaaagcaattcacaacctgctcctggatcttattaggcaacaaatcgttgtatctaatactgcaaagatactgaattgaaagcaattcacaacttggaaataatagtatagaagatttggccagttgtatctaatactgcaaagatactgaattgaaagcaattcacaacagagttttacttctcgtctaaaggagaatgttgtatctaatactgcaaagatactgaattgaaagcaattcacaacatatgaaatcatgggagcacgcctcccgaggttgtatctaatactgcaaagatactgaattgaaagcaattcacaactgggagacgtgatgaaaatgtacctgctgcgttgtatctaatactgcaaagatactgaattgaaagcaattcacaacgaactgaaaccagagcggtatattaaagagttgtatctaatactgcaaagatactgaattgaaagcaattcacaacgagattgaaaaggtttttaattcttaaattgttgtatctaatactgcaaagatactgaattgaaagcaattcacaacaagatagaagagtattatttggctacatcggttgtatctaatactgcaaagatactgaattgaaagcaattcacaacttgtacttttgtagtggttctaataaggtgttgtatctaatactgcaaagatactgaattgaaagcaattcacaactgcatttcgtccaggtacaagaaacacggtgttgtatctaatactgcaaagatactgaattgaaagcaattcacaacagaactgagaacggacacgtttttaccgaagttgtatctaatactgcaaagatactgaattgaaagcaattcacaacatatattaattattattatattccattacagttgtatctaatactgcaaagatactgaattgaaagcaattcacaaccactcctttggacaagccgtctttcataagttgtatctaatactgcaaagatactgaattgaaagcaattcacaacgaatccagacatccgccaacatcaacacaagttgtatctaatactgcaaagatactgaattgaaagcaattcacaacctttgggctaacacaatccctctttcatatgttgtatctaatactgcaaagatactgaattgaaagcaattcacaacgtgtcagcacagccacgctattagagataagttgtatctaatactgcaaagatactgaattgaaagcaattcacaactgcacatggagcgtggaatcatcttacggggttgtatctaataagcgtggcaaaaataaaactttcttttcaagtttcaactttttattgaattttttcatacagaagtttaataaatcctacttcttaaaataacatcaaattgaacctagggatataagttgaactacctccccaaaaaactatcctctcttgatttaattatttgtaagggcggataaaagggttaatagaatttgtatctctgctcttttaaagattccattacattgaaaaccagtattttgaaagcgagaataaagggtgaatataatcaaagcctcaaatttacctgttcccccctttcaatatttgtttaatcggtccaaatgacaaatcgcccccaaattgggggcaaatatattttggattttcatttattcaaaactgggcacagggagattgtttacatcgatttaactaaatcttatatgggtcaggtgtaatttgaggagtttttacaagtgcttctttttcagtgaaaaacgcttaaattctttccaattttgaaagaattggaatgttttggaaagattttcccctttttctttcccaatccaaaaataaagtataactttgcgatggttaattgataattaatacatgaatttgaatctggtgcagttctgttgtgaaacagggctgcattttttttgcatcagctgttcttcttatagctctggatggcccagcttcccataaacaggccgatgaacagcagggctagcacctggtggaacacctcccggaacccgcctccacggatgaatacggtgcgtatggcatctatgaaatagtgcatggggtttatgtaggtggtcaggtaggcccagtggggcatggaacgggtaggggtgaacaggccgctcagcagcatgatgcacaccacaaagaaccacatcacaaagatggcttgctgcatggtatcgctgtagttggacaccaggaggccgaagctggagaagaacagggccaggagcatggctagcaggtacaccagccacaggggaccgctgggggtgaggccgtagatgagccacgccagcaggaggcacacggtgacgatgaagagggctatgagccagtaggggatgagcttggagaggatgaaggcccacttggacacgggggtcacgttgatctgttctatggtgccggcttctttctcgcccacaatgttcagggtgggtaggaacccggtcatcagcatcatgacgatggccagcagggcgggtatcatgtagagcttgtagttctggtgcttgttgtacaacagcagggtagaggctttctgctgtatggctgctgccgtgggggctacggtggaggtcactatctgggacaggtaggctgaccccatggcgcctttggtgccgttcacggcattggcagctatgagcacggtgggcggctgcacggctcctccggtacggctcagggtgaggtccctgccgaagtgcgggggaatgaccagcaccacatcggcctgtccgtgctctatctccgtgagggcttcgcggtagctggacttctgtccgtggaagatgaagtagttactggcttccagggcatgcaccatctgctgggagagctgggaccggtcttggtccaccacatctaccacgatgttcttcacctccatgttcatgacccagggcatcacacacataatcatgatggggaagacgatgatgagccggggcagaaacgcgtttcgcctaatctgcaggaattctttctgtatgagatatttaatcataaccttaacttattttactccagacgtacattgaatttccggagggcaatggccaggaagagggcggtcatgcccaccaggaccaggacttccgtcagcacttcttctatgcccacacccataatcatgagcttgcgcatggcttgtatgtagtaacgtgggggaaccacggcagatatccattgtagcacttgtggcatgctctccacggggaacatcatgccggagagcatcaccacgggcatgaggagcaccatggcactgaggagcagcgccaccagctgggtctgggctatgctggagatgagcagtcccagggagagggccagcagaatgtagataaggctcaccacgatgatccagaacagggagcctgccaggggtacgcccagcacgtagcgcgccatgagcaggatgaccaccaggatggtgaaggccagtaccaggtagggcacggccttggccaggatgaccatgagcgggcgtacggggctgaccagcagcacttccatggtgccgcgttctttctcccgaacgatggagatggaggtcatcatggcacagataagcatgagcagcatgcccataatggcgggtacgaagttgtaggccgacttcatctgggggttgtagagcatcttggtgttcaccagtgtgccgttcatctgggtaaggccacccagggcatagttggtccactgctgcgccatattcgggtcggaaccgtccactataagttgtatgccgcttttccggctcccgaagtgaggggcgaagaccacggccatatcggctttttggctacggataaggcgttcggcctgctggggggtaggcacggtctgggtcagggtgaagtattccgatgcggagaggcgctgcacggcttgctgggtctgagggtccatctgtgaggtgaccaccacggtgcgcacgttccgcacgtcggtgctgatggcaaacccgaagaggagcatcatcaccacgggcatgccgaagaggatgagcatggtacgtttatcccgcaggatatgtttggcttctttgatgacaaaactgataaactgtttcatagtcttaatcgcttgaacgggtggcttgtcgggccaggtaagtgaatacgtggtccatatcgggctggtggaaccgttctttcagttcctgaggggtgcccagggcgctgattttcccgtctaccatgatggagatgcggtcgcagtactcggcttcgtccatatagtgggtggtgacgaacacggtgatgccccgatgggcggcatcgtagatgagttcccagaactgacggcgggtggcggggtctacaccgccggtgggctcgtccaggaacaccactccgggttcatggaagatggatacggagaaggccagtttctgcttccagcccagggggaggctcttcaccagcgtatcccggtgctccgtgaagttcagtcggctcagcagctcgtcggtcttccggcgtatctcctcgtccttcatgccgtagatgccggcaaacagacggatgttctcggccacggtgaggtcttcatagagggagaacttctgcgacatgtagccgatgtgtttcttaatctgctcatgctgggtacggatgtcgtaccccaccacggtaccggtgccgctggtaggctggttcagtcccgtgagcatgtgcatggcggtggttttcccggctccgttggcgcccaggaaaccgaatatctccccgcgcctcacggagaacgagatgtcgtccacggcacgaaaggtgccgaaggctttcaccaggtgggagacttctatcacgttttcattcttcttttctggggtgttctcatgcgccagtccggaaggattaaagatgtccttgaagcgttccaggatgacctccggggtgtctattccccgtatctttccctcctgcaggaaggccacgcggtcgcaccgacgcacttcgtccaggtagggggtagaggccaggatggtgatgcccctttccttcagggtgcccagcatctcccagaactccttccggctcacgggatccacaccggtggtgggctcgtccaggaagagcacgttgggggagtgtaccagggcgcaggagagggccagcttctgcttcatgccgcccgagagggctccggctttgcggtcccggaaccgttctatctgggagtagatggcgctgatgctggggtatccttcttctactgtggtgccgaagagggtggcgaagaaccggagattctcttccacggtgaggtcctggtagagggagaaccgaccgggcatgtagcccacccggcagcgcacctggcgcatctgcttcactacatcgtagccgtctacctgggctgtacccgtctggggcagcagcagggagcagaggatgcggaacagggtggtctttccggctccgtcgggaccgatgagtccgaatatctctcctttctccacggagaaggaaacatcgtccagggcttttaccttaccgtaactcttggatatatgttctacttctatggcgttcatcttacttcagggagatttctccgtacattcctattttcaggtatccgtcgttcttcacggctatcttcaccgcatagaccaggtcggcccgttcatcatcggtgaggatggtcttcggggtgaactcagagcgggaggaaatccaggatacggtgcctgggtactctttccgctgctggtttccgtagtcggcaaagaccttcacctgctgacccagacggatgttctgcagctgggcagaggtgacgtaggcccggaggtacatctgctgcacgtcggctatcttaaacaggggtttgcccacggctacgaactccccacgttccacgtatttctccagcacggttccctgggtgggggtgacgatgtggcacttctgcagcatgtcccggagctgactcatctgcacgtcggcagcggcggtctgtttgtccagggcacgggtgctggtgctcagggatgaaatctgggcatccagttgccgctgcagcactttcacctggttggtggcatcgtccagcatcttggaaggtacggctccgtcggccaccagttcccggtagcgctgctcttcctggcgggctttagccaactgctgacgggtggctgcaatctgccgttccatgtcgggtttctgactctggtacacttctttcgtagctcccagttgcaggagtttcagccaggtctgggtggtgtctatcaggcccacttcacggccctgtgccaggctgtcgccttcctccacgttaaaggtaagcagggcaccgctctgttcggaaaacacggtggtctctgtagcctcaaaggttccggtggcgtcgtacgctttcttctggtttccgcaggaggctaggagtaaagtggcgaatagtaaataattggatttcatattgttgtttctttttgttttatttttaggtgaaggcagaaggggggagtgttattccactttctgacctttcgtataagcgttatcgtagatttgtttcagcatttccagctcgtgcatcttctgctgcacacgggccgcgttttcctggttgatttcccgcaccaggtcgttcacgtcgataatgccatgtgccagtttggattctgcagcctttctcacgttggcccgcagctggatgatttcctcgtcatcggtcatgagtttccggtaacgggctatctcctggttctgctgaatctgctccaggcggttgttgaacaagaacacttcccggttggattccgtgagcagacgctgctgctgaagcttcgccttgtcgttcttccgcgtatagagtgccccgatgttccaggtgagacgggcaccgatgatgccgttcagggaccattggtgccgcatcatgtcctcaaacatgttcagaccggggtagccgtagtagccttgtgcaaagaggccgaagcggggtttcagggcggcgttcaggctcttctcctgggcctctgccaggcgcagctgtgcatcgaacagtttcagttccgggcgctgcccttcagtggaggcgaggagggaggctccgtcgggtttctgcacatcctttacttccagtccgcagaaggtagagagcatctccatcagcattttttggttggattccagggtggtggcctgctgcatcacattcaggcgctctgccttcacgttcagccagtcgctctctgcagctgtaccgcgtttcaccatcgactccagtttccgttcattcccggagagcagttcctgcaggtccctgttcagctgcatctgttcttccagcatgagcagggagaaatacatctcgttcacgcgtttctttacctggtagagcgatacttcggtctgggccagctgtacctgctcctgttcctgggctatctgtttctggctggagatggcgcctccgtcgtacaccgtctggctgatgtccacacccacccggtactggtctttcttcagtcctttcatattgatgcccatacctttcatcatgctggtcattccctcgggccaggaagccacgtcgctctggtaggtggcctgtgccgtggcagagacctgcggcagccaacccttctggatattcgccagggtaagctgggtggtcttctctatgagcccgtactgacggatgagcggatagttctgctccgctgcccgctgacactcctccagggtctgccccagtgccgggatgcaggctgctgccaaggcaaaaatgaggattccttttttcatatttctgtgtgttttaacttcttttttgcaaatatatccctttccgctggtacatccgttatgaatctgtatgaataaattatgaatttgtacgatttcggtgttttttgtttgtcgtactcccggaaagatgctaattttgtaatcgaatcgtacaaaatcataaggatggacaagaacatcaattatacccccatcagctccctggacctgaaaaaaatggccggagcggagagtcatgtgttcaataacgacgaggtgagcatcattctgaacgggcgcccttccgatgccactttctttcgggagggggaggtctaccagcttcctgagccccgactgctgctgttcctccgtggcgaggcggatgtgcacctagatttggagcagtaccatttccagaaggggatggtgattcttaccacatccgacttgattctggagtttgagcatttcggtgaggaggtggaggtgtgtggcatcgccatgaaagaggcggtacaggtggaagagagcatcgcgctccaggctactccccgggattttgaactgttgctcaagatgatgtacctgctctgggatgtggctacccagacgcctttccgacgggaggtggtgcagccc

SEQ ID NO: 620 - DNA, 24458 bp, synthetic construct
  misc_feature 1..24458: note = Synthetic
  source 1..24458: mol_type = other DNA
atttctatctgtagaatccttatactgtaatcaagaagttttacttcaacttaaaagagttttcaatcgctgctagctctgcagtgaagcctttatccacttgtaggcgatcttctatcttggcacagctatgaataacggtgctatgatctcttccacccacgagtttacctattcggcttgctggcatcttagtatatttctgtgccatatacatagctacttgtcgagcgattacaatatcttttttacgcgatcgagagttgacagctgcctgcgtaacattaaagtgattgcaaaccttgtccaaaatatcatcaatagtcaaaggctcatcatctatcttcactgctcttttgataactctttctgctaaacgcatatcaatagagctattataaacgacactataggccaataaagaattgataaccccttgcaaatcgcgcacactaccattagccgtttgagcgataaactgaataacattttctggaataattaagccatcacgcttaatcttactatgaagaatatccacacagagctgtatattaggcttctcaagctctgtaatcagtcctgccacaaaacgcgtcaaaagacgatcgttcattccttccaaatcaactggcggacgatcggatgctaagataatacgcttcccatttctaaataaatggttaaagatatggaagaaagtatcttgtgtcttcgttgcggtcatccactcttggatatcatctactatcaaaacatcaattgtctgatagaaattgataaaatcgtttgtggtattagtccttacggagtttgtatattgcacttggaataatcgtgcagaaacatataacacccttttttgaggataaagcttcttcacttttaagccaatggcattaatcaagtgcgttttaccacagccagaaggaccataaataaaaagagggttaaactgattcttattgggatgctctgcaattgctaaacctatagtgagcggcattttgttactatcaccctccacataattattaaacgacttatgtggatcaagctgtgaatctatgtcaggcaatactgcatcaataaccgtaggcgactgattaccgcgcactgtaggtcgcttcgaatcaattggatcaatatcttctgcttgtaaatcttgtgttagctgatgatctttatccgtaatcacactataagtaagcataactcgctcaccaaacacacgtgtaagcaccttctttaaaagatcaacgtaatgttcttccaaatactcataaacaaacatactaggaacaagcaccaataatcgcttagttgcaggctggtatgatttaaataccaacggtttaaaccaagtattatattgctgctcggtaacgttctctgctatgagacaaagacactgttcccaaagtgaatttggacttacactcattccttatgccagtttaaaaatattgtttcttcaaaataatgaaagggttaatgccacactattttaaaagctattgcaaagatagataaaaaaaagaagaaaggaaaacccttttattaaatcttcttatcctatattcatagtaacttactatacttacgcatcttagccgattttaacagcaattactatctaaataacatttgcgtatatttaaatatttgaaattcaaccatttaaaaagtctactataaaacatcccaactatagtgaaacattttattaatagacttaaatacgttgatttacaaagcaatcctaccaatctgttcaagcgtggaacatcaacaaagctatttagactatatttaaataaacaaagtttcgttatttaaatacttatttatctttacgtccaaatatagaaaagtgaacatatcgttttggatgtgccttcaagttggtcaataaactatcagcacttaccattgcattattcagattatgatataaagtaggatcgttcattaataagcccaatgatccctgattgctattcagttttgcagtcaagctgtttacatgatcaatagtagtgtttactttcgccatcgttgcttgaagatctataccactcaactgattattcaaatgcgtaatcatagtgttagcacccttcatagctccacgtacgtcttgaatgccattatttgcattggtcatcacgctatttgcattggtaagcaacgtatttgtctttgaggtcaaaccaggtaatgcgatattaacttgtgccataattgcatttaactgctttgtagaagtagtcaaatctgctgttatcttatctacattatgcaaagttcctttcattgcaggatcagcaagcaaactgtttacatgtgctaaaatactatccaatttaggaagcatcttctcaacataagggatcatggttttcatctgtcctaatgctcctgcatttatttgaccatttatcacaccattttcttctaagaagtttctactcttacctactatgagatttacctttgcattgcccatcaaatcgcttatgatgtcggcatgggtgtcttctggcaatttcatacctgcatcaatatccacatccaccataataggaccattagggttatcataatcgtagttaatacgtttaactgtaccaaccttcacaccatttgcaaatatggatgtagtaggagctataccactaatgtcgctaaacttcatttggtaacgtgcaggatgagaaaacaaacttagcccttttaaaaactgtaatccaaaaaagagaactacaatagctaacactgcaacaagtgcaattttaatctctggtgaaagaaatttcttcattatcgtttatttctattttcttttattttttaggaattccttaatagcagtattcacatcaataggctgaccattcttaaatgccactatataagcttgaggaaaatcttttgacaacgtttcccttaatcgccttatctcgttataattctgactattacctatcatatacttataccagttattatccttatagtaggtagcatctttatgccctttaaactgaaaatgtccattgggcaactccatactagtagcaaatatctgcaccttaaagactggtgcatctgaaggataagacatcttttctgaagcttttggtactctggcaactcttcttgacttaccgttatcctttgtatttctccaagaatacgtactcgtttgaatagaaggggaagacgttactggtctaggaacagctcgtcctaccgctatacgtggattatctgccccacgataaggcgcaaccaaatggttgttgtacatattcttatattcggcaaaagcacgataaatgccattagccatcgcattaatacctgattgagtatttaagaattcttcttcatcggctgcagtgataaaacctagctctatcaagcaactaggcattgaactttctctaagcaccaaaaaccctgcttgatgcacccccttatctattctgcctgcagtagaacatacagaggtttggattagtcgagctaactctacacttttttccatattggcattttgcataaactcgaacatgatataactttctgaagaatttggattaaagccttcgtaagtttgcttatagtccgactccatagagattacagagttttcacgcatagccacatcaagattgtcctttgcacggtgcattcctaatgtataaacttgaaatcctttagcataatgaccgggagcaatagagttggtgtggatagagataaacagatcggcttttgccttattagctatatcggctctagtatgtaatgggacaaaaacatctgtcgtacgcgtgtagataacatcaacatctttcatatactgctctacatatcttccaaaagccaatgccacattcaggttaatatctttctctttagaaaaagcgcccaaggcaccagcatcatgaccaccatgccctgcatctatgaccaacgtaaatttacctccagctcctaaactgtgaagtgtcaaacaaaaaaagaaaacaaaaaatagtgatattttcttatacatacaataacatttatagcgacaaagttactcattttcagcagaaactacgccgtcaactatgcttttttcatttattaaggttatttcaacgcttgccccactgcaatctgcgtccattggaggatttttttttgtcaataaaactgttattgcttccattgttggaaaacgattaaaaagtgcttttcctatcctgcctgctgcatattctagcaacagacaaggactcatcatcacttcccttattacttcataaacttcagcatagcttatcgtgtcctgaacatcatctgataacattgcttttgcaatatctacctttagctttaagtccactacataatcgtttcctacaatacgttcttgctctgccacaccaatataagcatggaaacagaggttatgaagatgaataaaactttgttttaaaaacatatatagagaagtttaaaaagttaaaggagtcgcattttaactcctttaactacatatttttacccacatcttgatgcgccacagtttgtacagatcaaacaaccttcttgataaacaagcgattcttcgccacaaacaggacatttcaagccactagcttttgtgccatcagttacatattttttcaatgcacgttctacgccatttttccatgtattgatgctttcatctttcaattgtaatgaggatacaagcttcatcacatgatcaataggcatacgataacgcaacacgcctgatatgagcttagcatagttccaatattctggattaaacttctctgacaagccttccactgttgtcttatagccgcgcttattctcaaactggaagtcgtaacgatgtgttccatcgtcggctgtttgcttaataatctttcctttggtaacgctctttggtaacgctataccttcctcatcatcttgcaaacccgtaaagatctcgtatggataaccattcagcaaccctacaaatgctacccatttctctttattattttggaaacgaaccacatcacaatctagctctttcgggcgatgttccaccacttcagggcgttggcatggtggctcatgatgctcaatagcagcattcaagtccttttcgcttgtttgagtttcttcctttttatctttcttcgataccgagatcatcacgcccgaacgcgatccatcacgataaatcgtacatcccttacatccgcttctccaagcctcaatatacaacttgtttactaaggtctcatctacgttgttaggaagatttacagtaacagagatagaatgatctacccacttctgaatagctccttgcatacgcaccttcatcaaccaatctacatcgttagctgtggctttataataaggtgattgctttacaagtgcgtctatttcgtcttgactatattttttggcagcatcaataccatttacctgcatccatgtcaagaacttgctatggtaaacgatgtattcttcaaatgagtcgcctacctcgtctacaaagtcaacatgcacatcaggttcgtttggatttaccttacggcgacgcttatacacaggcataaacacaggctcaatacccgatgttgtttgggtcatcaaagaggttgtacccgtaggagcaatcgtcaaacaggcaatgttacgccgaccatattccaccatatcagcatacaattgcgcatcttctcccttcaagcgtaatataaaaggattgttttgttcacgtttggcatcaaagatttcaaagcagccacgctcttttgccatagctaccgatgaccgataagcatttaaagctaatgttttatgcacttccacagagaagttggttgcttcttgtgtaccatagcgcaagcccattgcagctatcatatcgccttctgctgtgataccaacacctgtacgacgccccttgccactcttatcctttatcttttcccacaaatgatattcagctccctttacctcatcgctttgagggtcagactttatcttatttagtataaggtctatcttctccatttcaagatctacaatatcgtccataatgcgttgagctagttgaacatgttttgcaaatgtctcaaaatcgaagcgtgcgtgatcggtaaatggatctatcacgtatgaatagaggttgagtgataacaaacgacaactatcgtaaggacacaatggaatttcgccacaaggattagtagatacggtttggaaacctaaatcagcataacaatcaggaatactctcctttaaaatagtatcccaaaacaacacacccagttctgcactcttccatgcgttgtgtactatcttctcccaaatttgctttgccgatacttcttttgtaaaagaaggtcgatcagcgttaataggatattgctgaatatatggcttatcattaacagcagcctccataaactcgtcagtaatcttaaccgaaacattggcaccagttaccttaccttcttccatcttagcatctataaatgcttccgagtcaggatgtttaatacttacagatagcattaaagcaccacgacgaccgtcttgtgcaacctcacgagtactattagaataacgttccataaaaggtaccaatcctgtagaagtgagagcagaattgtttactggtgaacctttaggacgaatatgactaaaatcatgtcccacgcctccacggcgtttcatcagttgtacttgctcttcatcaatacgcatgatagcaccatacgagtcggcattaccctccaaacctattacaaagcagttggacaatgacgctatctgatgattattaccaataccagtcataggacttcccgcaggaatgatataacggaagtgatccaatagttcgaatacttccgctgcacccatagggttagcatactttttttctatacgtgccacctcattggctatacgccaatgcatatcttcaggactttgctcataaatattaccgaagctatccttcatagcatacttattaacccacactcttgctgcaagttcgtcgcctttaaaatagtttaaagccgatttaaaagcttcttcgtaagaataaattttaccagtactcattattggtttttactttttttaatctctgcgaagttacgaatagttatccaaaacagaaaacttttatttatctttgcactattaaaatttccaaaaatgaaaacaatcaacgagcgaaaaacaattagaaagtactcgaatagagaagtttctactgcaatattgaagaagttattgagtgaagccatgcgtacgcccactatgggcaatttgcaactttactctgttgtcattacgcgcgatgcagaaaagaaagcattactagccccctctcattttaatcagcccatggttaccgaggctccagtggttcttaccttttgtgccgactttaatcgtactacccaatgggctttaaatcgtaaggctacacctggttacgacaactttttgtctttcctaaatgcagccaccgatgccctgctttattgccaaacattctgcaacctagccgaagctgaaggactaggtacttgctttcttggcactactatttaccaaccacaatctattattgatacgcttcagcttccacaccttgtattccctattgccaccattacccttggctatccagacgaagatcctgcacaatgcgagcggttaccccttgagagtattatccacgaggaaacctataccgactactccgctgcgcttatcgattgtttctatcatgaaaaagagaatactcccgaaaacaaacactttgtagaaatcaataacaaagaaacgttagcacaagtattcaccgacctacgctacacaaagcgcgataatgaagctttatcaaaaacaacacttgaggctttaaagcaacagggctttttataaaaagaaaaagcagtgctatttttgaccaatagcactgctttcttcttatttaccgcctttctcacgattgcaggtttggcacagcatttggcaattttctaatctagtatttcttgccttatggcactcccctttaagtatttatctcccaaccccattgcagcacaaccacttttagagaaataacgtttagcatcggtaagccacgcccacgcatattgcgcaggcgcttacaacttattctttctatattgttctttctacgaccaagtttctagaacgtttatagaataaacagcaaacgcatgttattatttccgcaaaaatataaatgtaagggataaatcctcaaacattctttacaaaagtaggaaaaagcacgctaataaacaaagataataagcctaggtccactaaaatattacctttttaagacacaaagctaatctttaagacgaggaaagaagatgtttcgtctggcaaaagatgatgttttactactaaaaataatttatttttgatttgtttttaatttatttttaagctaaaaataaattaaaaatgagcataaaaaatgagtttttaaaacataaaagataagggaaagctatatgaaaggttagcttttcatgaaaaacagataaacgtttacctataaaactggaaattattacctccatataaaacacatatccttatcatagaagtatatcctaaatagaatattcggcaggattaattaagcctgatcgaagtgcatagcgcgtagcttcattggcattattgacactaagttttcggaagatatttttacgatgcgtattaactgtatggaaagaagaaaaacgcttttcagctatttcttttgttgtcattcccaaggctatatcaatgagaatttcggtttctgttttggtgagcttaaagcgctcaaaggaaagagaagaagctggttctagcaacatttccgtgatatgctgacaaagaaaacgacgcccttctttggcataactaatacattgttctatctctgtgagttttgcttccttgagaagcacactaatacgataactcatattcattacttcttttacaaaactcacacccaagtcttcactccaaagaataaagaacgactctggaaaacgtaaaccaagtattcgtatatcgttagcactcgcaaaatcgaaaagtggataatctacaataacgatgcttgtgggattagtttttaactgctcaataagttccattttgttcgttgcaagcaaacattctatatgttccattttagaaaaaacatacatcattcctgcccgtgttatatcctgattatctgctaatattatttttaccatacaacaaaattataaaataaaactacctcttgcggtacaaaagtaagaaaaacattcaatccaaaataggaaaagccgcactaatttgacccattggggcaagtatctttgatccagcaataccttttatttttgactcactaaataccttgaccgagttgggtattttaccctcttttattgcttcaactttctctaataagcaataaggaatatttggcgtatagctcattttgcagaatattttttagtactttgtctcaataggtcaaaaatcacctactttattagcagtaaaataatttcaagtattagttctatgtagacttcttaaagagttcgttttgtttaagtcccaaataaggtcttagtgttcgaaaatctttcttaaaataaattataaaggctaatattaaacgtttcaatttgttttttgcggattatatatgatttatatgaaaattattcatatttttgtgaaaatatagacttctatgggaaacttttttagcataaagatttccataaaaagagggcgagattattagtcccaccctagatgttttcacaacggaataatccttattgtgatttgcttgaaaattttctgcaaatataaactttaaaaattatattaccaaataaataacgtaaaacttatgaagaatattcttggacttgaccttggaactaatagcataggatgggctaaaatatctattgatgacaatggcaaatacataaaagacagtataaagctaggaagtagaataatacctatgtcgcaagacgtattgagtaatttttccaaaggagttactctatcacaaacttctgagcgaacaagttttcgaggagctcgccgcttaagagaacgaactctactcagacgtgaacgcttacataggattttacacctacttggatttctgccaaagcactatgaaaaagctataggttgggatagaaacgacaataagacctatggtaaatttatcaatcatgccgaacccaaattagcttggtgcaaagataataacggtaaaatgcgatttctttttatggattctttccatgatatgctttctgaattttctgaaaagcaccctgagttattggctaatggaaagaaaatcccattagactggaccatatattatctacgcaaaaaggctctctacaaggcaataactaaggaagaactagcttggattctcttaaactttaaccaaaaacgtggctattatcagctacgaggagaagaagatagagatagtgaagcgaacaaaaaagagtacctcgagttgaaagttataggtgtagaagctacaggagagaagaaaggtaacgatatttggtataatatacatcttgaaaatggttggatctaccgtcgatcgagtaagaaccctttaaatgattggttaggcaaggtaaaatcatttatagtaactacagatttagatgccgatggtaaccccaaaaaagacaaagatggaaatataaaacgatcgttccgtgcccctagcgaaggcgattggactttaattaaaaagcgcacagaatcacttttggaaaattctgggcaaactgtagggcaattcatatacaaccatatattggaagaaccgagcgcaaagattagaggaaactttatccgcactattgaacgtaaatattacaaagatgagctaaaagctatcttagaaaagcagaaagaatttcatcatgaattaagtagtgagtcattacttactgaatgtgcaaaagaactttataaaagaaatattgcacatcaagaagtattgcttaagaaagggataatccatctattgctcaacgacattctattttaccaacgcccacttaaaataaagaaatcactcattgataattgcccttacgaaaattataagtatgttgataagaaatctggtgatataaaagtcaagtccataaaatgtatagcaaaatcaaatcctttctttcaggagtttcgattatggcaattcgtttctaatttacgactttatagaaagtctgacgataaagatgttactagtgaacatctcgttactaccgacgattatgccaacctatttacatatctcaacaacagaaaagatattaagcaatctgtacttttaaaagaatatttcaaaataaagaaggtaaaaactatcaatggtgcagaataccctgttcgctggaattacatagatgatgataataagacttatccttgtaatgaaacacgctatgatattcttcatgcgctcagcaaaacagaactgaagagtgaatggctaacccctgaaagaacctatcgtttgtggcacttgctatattctattgaaagcaaagaggaaacaaaaaaagcattaaacaaactcaacttgagcgatgattttactgaagcctttcttaccataaaaccttttaaaaaagaatatggatcctattccgaaaaggctattaagaaactactctcattaatgcgaatgggatatttatggagtgaagatgaagccattaaacaagtaggagcagaaatagaaaagacgatagaaggagaacttcctgattatgtcttacaacgcttagaaaaatcacaacataactacaacaagatatccgacttttctgggctacctttatggctagctagctatatcatatatggcagacattctgaagccaaagagataatccattgggataatcccgaaagtatgatggcttacataaaagatttccgccaacactctatgcgcaatccgatagtagagcaatgtgtgctagaaaccttacgaactgtgcatgatatatggaaagaaatagggcatattgacgaaatccatatagaattaggacgtgaaatgaagagcacatccgaacaaagaaaggctatcacacaaaatgttttacataatcaaaatacaaacattcgaattaagctgcttctacaagaacttaaaaatgataataacattactggtgtacgcccctactctccaatgcaacaagagatccttcgtatatacgaggaaggcgcattacaaggattaacaaaagaggataaagactacaacgacatcttaaagatctctcaaacagcacaaccaacttctaacgaactgactcgctacaaattatggttagagcaaaaatatcgttccccttatactggtaaagccatctcgctgtcaaagctttttacatctgcttaccaaatagagcatgttattcctcaaagcagatatttcgatgactcgctttctaataaagttatctgcgaatcagaagttaacacacttaaaaaagctatgcttggcatggaatttatcaaaacatgtggtggacaaaaagttcactgcactctccttggtgatgttgagatttataatgaagaggactacaaagcgtttgttaatgagcattattccaacaatcgaaccaaacgcaacaaacttttaatggaagatattcctcaagagtttatcaatcgacaactcaacgatagccgctatatcagcaaaatggtaaaacaattactttctgctattgtacgtggacaagaagaggtggaagctacctctaagtttgtcattccatgtactggaggtatcaccgatcgtctaaaaaaagattggggacttaacgacatttggaataatcttgtttcaccacgtttccagcgaatgaatgctctaacaggatcagaatactttggacattgggaaaacaaagagggcaagcgagtattccaaaccacaatgccaatccaacttcaacaaggatttagtaaaaagcgcattgatcatcgccaccacgcaatggatgcacttgttattgcatgtgcttctcgtaacataatcagctatcttaacaatgaaacagcacaagacacagaacgtcgcagagatttacgccaaaagttatgcgataaaggagggagcgttagaaaaccttgggactcttttacgcaagatactcaatatgccttaaaagacattattgttacattcaaaaactatgtacgtattatcaataaagcaaccaactactatgaacactataagacagatggtaaaaaaggaatgataagccaaaaaggcgatgaactttgggctattcgcaaaccaatgcacaaagaaacagtctttggtaaagtgaaccttcgccgtcctaaacgtgtatcattatcaaaggctattgatagtgtagatatcatctgtaatagaaaactcaagaagtacatcaaagcacgcctaaacgaaggtctacaaaagaaacaaatccttaatatcttcaaagaactaaataacgtttgggaaggaatagatgttaataaaatagacatctgggaaatgagcaatgacaaagagcctatggtggcaacaagaaaacagcttgacacttcatttgacgaaaagaaaattcgctcaattagcgatactggtattcaaaaaatattactcaactatctcataacaaagaataacaatcctgagcttgcctttacccctgaaggtattcaagaaatgaacagtaatatctctgaatacaacgatcataaaaaacatcaacctatttataaggtaagagttactgaaccattaggggctaaatatccaataggaacaatgggcaataacccaaagaaatttgttgaagcacaagctggcacaaatctttattttgccatctacgaagataaagagggaaaacgtaattatgataccattcctttaaacattgctgctgagagactaaatcagcaactatcccctgtgccagaaacaaacgaaaacaatactccccttaagttctatctttctcctaatgatctagtatatgtcccttcagaagaggaaagacactctggcaataatattcaattagacaagaatagaatctataagatggtatcttctacaagtaaacgatgtttcttcatacatcatagagtggcaatctcccttgttgataaaaaagagtttagtgctcagaataaaatggaacgttctattgacaatgaacaagtaatgataaagtccgtctgttggaaactcatcacagaccgtttaggcaatattataaaggtaattaaataacatttgcttatgataaagaaaacgctttgctttagcaatccagcttatctgagtatgcgaaatcagcaattagtgctgaaaataccagaggttgaagctaacgcagacctcccaaatatcataaaagagcagtcagagcgcaccattcctatagaagatataggagtggtagtactcgacaacaagcgtattaccatcacaacaggtttaatggaagccctacttgataataattgcgctatcattacctgcaatcagaaaagtatgcccataggattaatgctaccacttgcaggcaatacccttcaaaacgaacgatttcgacatcaattagaagcctctctcccactacgtaaacagttatggcagcaaacgataaaacaaaaaatctataatcaggaaaaggtactaagcagcaatacccctgtcgaaacaaaatgtatgaaagtgtggacctctgaagttaaaagtggtgataccgataataccgaagcacgtgcagcagcttattactggcgtaacctctttccttctctcccccactttatacgtgataaagaaggtgatcctcctaacaatcttctcaactatggttatgccatattgcgagctattattgctcgtgcattagtagcaagtggattattacctacacttggtattcatcatcacaatcgttacaatgcttattgcttagctgacgacataatggaaccctatcgcccttatgtagataatttggtgatcaaaatcatgcagcactctaacgactattcagagctaactaaagatataaaaatgcagttacttagcattcctgtcatagatgtagaaataaacaagaagagaagcccactaatgatagctgctcaacaaacaacagcttctttgtataaatgcttctcaggagaactccgacaaatagcttatcccgaactatgacatgactactttagatcgctttagcgaatatcgaattatgtggatactggtatttttcgaccttcccactgaaacgaagaaagacaagaaagcttacatagactttcgaaaaactcttcaaaaagatggatttactatgtttcagttttccatctatgttcgccactgtgctagtcaagagaatgctgatgtacatattaagcgtgtcaaaagcatactaccaccttatggaaagattggaataatgtgtattaccgataaacaattttccaatattcaactcttttatggtaaaaaaccacaaaagacttccacaccttaccaacaacttgaacttttctagaatcagaaaatcctccttatctctattgatgaggaggatttttgcctatctttttatttttctaagtatctctgtaaatagctattatcaagcatattacactgatcaggttgtgtttgataccacaaagatagaaattttcaagcaaatcacaacaggtatcgacgagcctattaaaacgacacagttgtgtttgataccacaaagatagaaattttcaagcaaatcacaacttaaacaagcaaataattctttaagtatcggttgtgtttgataccacaaagatagaaattttcaagcaaatcacaacaaacgccatccggacaatttcgtcggggcgttgtgtttgataccacaaagatagaaattttcaagcaaatcacaacgccatacaggtgcgttcctctatctttatcgttgtgtttgataccacaaagatagaaattttcaagcaaatcacaacttagatatgagcatagaggaaaaagagcaagttgtgtttgataccacaaagatagaaattttcaagcaaatcacaactcggtaaacttagtgtgcgctccactgttagttgtgtttgataccacaaagatagaaattttcaagcaaatcacaaccagcttatgagagtttagtttctcatcaaggttgtgtttgataccacaaagatagaaattttcaagcaaatcacaacttaaatttgaatttgacaaaaaccttgatagttgtgtttgataccacaaagatagaaattttcaagcaaatcacaacaattctattacatctaccatgtagcaataggttgtgtttgataccacaaagatagaaattttcaagcaaatcacaacctattactttagacaagaataaagaattagttgtgtttgataccacaaagatagaaattttcaagcaaatcacaacattcgtttcgcaatcgttaaggttttccatgttgtgtttgataccacaaagatagaaattttcaagcaaatcacaacagaatgcggatactaatcgtatgaatgctagttgtgtttgataccacaaagatagaaatttatccataggtagaaatctgtgaggaactgcaccataatctcatttatatataagtgttccctttttagccagcgtactaatgcttttattgtacactcgtaactttttgcagtaccaactctgccagcctttatgtactcatcagttatttgcctgctaaactctataaaatcaaggttaaatacagagtgtgtccgctcgtaattgcttatatactccacaacctctgccacccccatacaacttgcttttgctgttggaatagttgccgttatctcttggtacttagttatctcctttttaagcaaatcatttactttggctgattttattttcaaccctcgtgtcagctcctctttggttacaaatatgtttgtggcaatgtgtctgcgttgcctgttgtgtgtaacacgtatcttcacattgtacgtgccatctgcttttttatggtgggcatataccaccgccttaaatgttgtactcataatcttgcaggtaaactgtggcacatttgaaccacatttaccgcaaaagtagatgaaaagccttaaaagtgcggaaataataacagccaacttttgaaaattggctgttaaggagtacacttgtagggaatcgaaccctaatcttaagaaccggaatcttatattctatccgttgaactacaagtgcttactagtttcttttgacactctattcagctaagctacggaacctttatgctgtttgcgttacaaaggtacattaatctttgcagatgacaaagtatgatgtagaaagaaaatgaaagacaactttataggtgtacatacatataaggcttagaataagacaaaaggatattgtaaaagttaaaataaaatctttttgtatataaatattgcatttttctcgattaatgtaaacttctgtattacctttgagcattggtggaggtatcgggcaaagccgcttgtgtatggtgatgctccataaagcacatattggtgaaattcaagcgagtatttggccagaagaaatgtgtgaagagtgcgagaaagctggtatgcccttgatttagaacagtcttagaaatcaatcgtttcttcttcttatagaaacataaaaaggcacccttctgacttagaagagtgtcttttatgtttttagctagcctccatactcatttttgaagctagtcatttaaagtttagcttaatgtctttattcgtcaataaaacgctttgtaatatctccgtatgcctctattcggcgatcgcgtaagaaaggccaccaacgacgaacatcttcagagtggtcaagatcaatgtcaatcaccacactttcctcatcgttatcgcaggcttgataatggatttctccttgtggtccagcaacaaagctgcttccccaaaactctattccttcggtttgtttgctaggatctggttcaaagcccacacggtttactgctaccactggtaaaccatttgctacagcatgaccacgcattaccgttgtccaagcctctctttggcgttgttgttcttcctttgtgtcgctctttgcatagccaatagcagtaggatagatcaatatttctgcaccttgcatagccataaggcgtgctgcttctggataccactgatcccaacaaacaagaacaccgagcttgccgatgctcgtttggataggtttaaaacctagatcaccgggggtaaaatagaacttttcgtaataagcaggatcgtcaggaatgtgcattttacgatatttgcctgcaatagtaccatctttctcaaacacaacagcggtattatgatataagcccggtgctcgcttctcaaagagagaggtaacgagaacgatgcctagctcctttgctaacttagcgtaaagctcggtagaaggtccgggaatagtttcggcaaggtcgaaattgttaacatcttctacctgacaaaagtacaaagaattgtgcagttcttgtaaaacaacgagctgaacaccacgtttggcaaggtcgtttacatgctcggtgatatgctttatatttgtttctacatcagcgacattgtgaagctgaagcaaacctattcttatttcattcatatatttatatcttatttagagtcggttgcaagaaagccttctggcaattgcatggttaaacaatgaagcgaaccatgttggcgtaccaccgtttgtgcatcaataccaataatatcatagcttgggaaagcttgctttattatttttaaagccttctcatctttgtcgggttgggcataagtaggcactaatactgcaccattcaatattacaaagttagcgtatgtagcaggcaaacgctcgccatcatcacacacagcctccgtgaaaggtaaggcaagtaggcgataaggcttaccattgagtgtgcgaagagtctttaattgttcctctaatgccttgaaatcggtataatgggtatcattcttatcctcacactttatatatagtaaggtatcgttaggcgcacaacgcacgatagtgtcgatatgtccatcggtgtcgtctccctctagttcgccatgttgcagccatattacgcgctctgaaaagatattctggagtaagtattgggtaatatcttcttttgtaagtggctggttgcgatgtggtgctaacaaacaactagtagtggtaaagagtgtgcctttgccatcgctttctattgatccgccttcaagtacgaagtctttatgtctcacaaggtcagcattaaataagcctgccttagcaaccagagcattaattttattgtccttttcagccgaaaacttttctccccaaccattgaaacagaagtctagcatacgccttgacccatcctttgccaccaaactaataggggctacatcgcgtgcccatgtatcgttattatcacattcaaagaaaatgatgcgtgccatctgttcttttgagagtcgagcagataacaagtctttggtctcttctatatcctttgtcgtgagaagcaaatgctcgtattgggtaatggcatctgccatttgcacgtatgtctccgtgatttccgctagatagggcttccagtcagtatcttcatgcggcataatgagcataatagcactctgtttttcccattcagcagggaagcgataagtggtatctatatttttattcattcttcttttctatattcttatgcaaagatacgctaatcctcttaaaaagaaaagtttttcctcatattagctttctttccatctcttaccaataagttctacacacggcttgattgatccatatcaatgtaagcgattgatataagtcagctataatgattgacacacatcaaagcctttgatacgagtcaaaaaaacgtaacaaattagcgtaaaatcatctgattgtttggtgttcaacctttcggatttgtatctttgtactcgcaaacaggataatttataaaaaggtaaaagatgattatgaaagagaaattaatgaaattagagattgtaaaaaagatgattaactaccttacaaataccattagagcatacaatgaaggtcgtgtaaacagtatggcataagcctataaaaagtatttagagaggacatagatttaaaaaatatccattgagagatatacaggaaagggattgggaatgggaacatttctgatcccttttctttcacatctcttatatcgcttactaatgctgtcatttacactttctcagagagtttatgcttataaactattaaactatatgcaaagcatagataaactaatgtttcgtagagtatctatctaagtaattttaacctaatgtgaaataacagccttaaataatattaaatgatagtccttttgtattgctatttggtttaattgttgataatctgctataaaatatatacctttgtagtctaaaataattttatgcgtagcgtgaaaataaaggaagtaattgatgcccttgaacgattcgcacctctgcccttgcaggaaagctatgataatgctggccttcaagtaggattgacagaagtggatgtctcaggggctttattgtgtcttgacgtaactgaagccgttgtagatgaggcagtacgtaagggctgcaatcttattgtggctcatcatccgctcatctttcgtaagcttgcccaaattactgatgctacctatgtgcagcgcactgttataaaggccattcagaacaatatcacgattgtggcaatgcacaccaatatggacgctgccaaaggaggggtaaaccataaaatagccgaaaagctaggattgacaagtattcgcacctttggtaatatcaagcgagtattgagtcctattacgagtgaactagtagagggagccgaagggttaatgggcgattttacaacacctatcgcagccgacgaccttattattatgctcaaaaaacactttgatgtggagtgtgtgcaggcaaatcagcttctaagacgtgagataaaaacagtggcactatgtggtggtgcaggctctttcctcgtagaagcggctgtaaaagcaggtgctgatgcctttgttacaggcgatatgagctatcacgagttcttcggttatgagcaggttatacagctttgtgccatcggacactatcagagcgagcagtttacaagcgaaatctttaaagagattattgagcgcgattgtcagggggtgaagtgctttcttacagagattaataccaatcccattatttacttataacataaacgaaataaatacttaatatataaagaattatggcaaagaaagatccaaaggaattaccagtggaagagaagctaaaaaacctcttcacattgcagcaaaccctctcggctatcgacgaaaagcgagcattgcgtggtgaattaccactagaagtacgcgacttagaggacgaactagaaggtcttcacattcgcattgagaagattgatcaagacataaaagatttccaacacgctatcactcagaagaagggagagatcgtagatgcacaagcaagtcttgaacgttacaatcagcaactagaaatggtagctaacaaccgtgagtacgactctttgacaaagcagatagagttccaaactttggaaatagagctttgcaataagaaaatcaaggaggctcaatataaggtggaagagaagcaagccgacttatctaaagcgcgcgaacaacttgaagataagcaaaacgctttaaaagaaaagcgtagcgagctcgatgatattatgcaagaaacgcgtgaggaagaaacagagctaaaggacagagctagtgaacttgaaataaagatagaaccaagtttgctccgtagctttaagcgtattcgtaaaggtgcgcgtaatggtttgggtattgtttacgttcagcgcgacgcatgtggcggttgttttaacaagatcccacctcagcgccagctagatattaagatgcacaaaaagatcatcgtttgcgaatactgtggtcgtatccttattgacccagagctagctggtgttaagattgatgcgccagaggaaaaggtaaagaagcgcagaactacccgcaagaaggcagaagagagcgaggaagcatagttctcacgccacacacctattataatatcccccttactacttataaagataaggcgtaagggggatattttgtattaccgaaatactgaatattatttctatatctctacccataaagctagagttttagcacttaataagagcctcacgaaatcatacgatgttaagtattttcacttataccaatatagtatattaacaaaaaggcaacaacgtatctttatttgctttatattttgcaaaaagtcatcgaaaggcacaattacaagataactcattaaaaagttttgtgaaaatatggagatatggattatttttctttaatttgcagaactgaatatatatatattaattacttaataaatatcatacttttagaatggttttactttaatcaagtaaactccttaaccgttcaaatcatatattaactagtttttgaggaatggactaataaattatcagaaatgaaaaaaatattatctgcggtgttttttcttacactttgctgtagtgctgcaaatgcacattctgttaaggtaacattatcaaatggacaagttgtttaccttgagtctgacaattatcagagtgcttctgatatgatagcagatgttataaggttagagaaccaaattcattaaatcttttaaatgcatagatattattctgtttaatatctatacattattttgtatttgcaaaattatgataaaatcgtgttctctcatattagcctttataatgagttgttttattaatatgcattcacaaacagtaaatggagctataccttctttaaccttggtaaataaaacaacgtttgattctgcaaaagtacaaattttttatgagttttcttatttgcaagattccacagatatcgctaaacgaatcaatgggcaaactatgctaactatcggaaagcacatctgtggtttttgtgattatttttcgtggaaaaatgattctattaatgatgcttattatgaacaaggacgttcatctattgaatacttcgcagcagctatgtcattagaaaaaccgacctataactatcctcttgttaaagacatatctaaaaaggaagccacaatacagatagagggactcggcacgtatcagtatactcagactttacctgtgataaactgggaagttataggtgatgacagcatcatcaacaatataaatgtgactaaagccaaatgcagttttggaggtagagattggacagcgtggtttgctatggattatcccgttccttacggtccttatctgtttgatggtttaccaggactaatagtttctataagggactcaaaaaataacttttcgttcagacttaatggtataataaatgtatcagaagggatgcctatttatcttcataaaaacatcaaaataataaaaacaagcagagaaaaggcgcgtcaggcttaccgtaatgagaaggaagatccattgcgggctataaagatgaatatgcctggtgtgataattccacctgaaacagcaaagacgataaaacaaaaaccgtataatccgattgaactggaatgaaaaccagcctacgatatattttacttagcctatgtctttttatttcctgtcttatttacggtcaggggacagagagtaatgttcatggtatcgtgacagattccaagagcggtgccccccttatgtctgtaagctgtcgaacatacgataagaacggtaagttgcttacttttggaatatcagatgtggatggtaaatatatgttgcggctttctgccaattgtagttatgcagagttcaagtctattggatataagggacataggataagtgtagcatcactgcacgataattctgatgtggctttggaacgagacgcagttgctttgcaggaggtgaccgttaatatcaagccgatagaagttcataaggacaccatcaattataatattgcagcattcaaggatgtaaatgacagaaaattagtagatgtactaaagaaactaccaggtatagaagtggatgaagatggaagggttacctata

SEQ ID NO: 621 - DNA, 24452 bp, synthetic construct
  misc_feature 1..24452: note = Synthetic
  source 1..24452: mol_type = other DNA
tacgattaaaacaaactgtttacaatgccgcctaatccgctcaatgatttcaattccactaaggtacgattaaaactgccctttcgttactcataattttcctcctttctcatttcaattccactaaggtacgattaaaactcacgtctgacattcctttcagccgtcctgcaccaaatttcaattccactaaggtacgattaaaacgccgaaaccacccacttcttctccacggaagaagatttcaattccactaaggtacgattaaaaccccatagagaaaatatgcacaatacataataaacactatagtttttgttatgcaaagatataaaaaacgaataaaaatatgtcgatgctgaaaagaatgttttacttaagacttcgacaacttccttaaaacagaggcctcacactattaccggcatgcactttttaacccatttttttcatcgtgacatgagccaacaatgacatcgacaactttagaggaagttatctgtggacatccgttccttcccaagaatctccttactcatatgataacccatttgatttgaaaatattatcacactatcttcatttttatctataatgccattcaaccgtaattccagttctctcaactttacctctgataattctccttcaaacacagaattctgaatccaacacaaatattgtcgacatagtttaagcatcttagccacacgcttcactcccacatcataaatcaatatcacatacatatctctaccaatacatcttaaaaggtttgtactcttctattccaagaatatcttttaacaacttatagcattccagttttatcaagtgtcgatagcttacattacgtcctaatgaacgatgacgaaacgtttcattataccgttcttccattgctgccacaaatattttctttcctttatcgtttaaaagacaacgattcaacttattgtcaaaatgccccttctgaatcgcgtgtttatttaaaaccttaaaaatcactctatcgacaataatcggcttgaatatttccgatatatcgagacaaagcgaatatcgtcgttcacccggtgtatgcaagaaactgatagtcggatttaattgagtttgatggaccgctttcaatgtttcggtataacacatcatattaccaaacgatatcaacgcattcacctcattttcgggaggttgcttcgtacggactcccatattaaagtcatcgagtacaatatcaaaggccgaataataaatacgccgaatattaccctctatccccataatttcctctaccatatgagcttcatcgagcgttttagccaaagccttcatttccttaatacatccttccagatctttacctcttctattataatagttaaggttcatgatcatattccacacagcgccccgaatgaattttctcgccaaatccgtacgccgtttagtgctctgatacgccttagcctgagctatcaatgcttttcccgacaacaagccgtcacgaggcatgaaacttcctgtataattctcataataatcgaaaaaatgaacgggaacaccacgttgacccagaaagttgtataaagaactatttgctttaagacttccgaaagcatacaactctgtcacatcctctattggaataaaacgagcaggcaatttcacctcatttcccagctcgtctgtactgacagatgtaaacttcaacgtattatccttacgctccatcaatcctgggttaaacaaataaaagctccttttcatacttcttcctccatttcgtttgaataacagaactcataataactacaattcttacatatcccctttttaatcaatgatggacaagaagtttgcgtaatgatattgcctatctcctgttggaacaacgcaatatcctcacggtcgacatcagtaagaagcacttccgaagtttttcttaattccggatattccaatatacctttaacgccattgataccacgttgctcaaaaacatacatatagtatttcaattgccattcatgtgctttctctatcttattagacctcttaatttcatgaatgactttatttcttgcatcatagtaatccaccttaatgccatcaatctccacttcttcatatcttgatggacgttgaggataactgccctcatgtatcaacttaccttcatacaccaagtctgagttttgctccatattaataccattggcaaataaccatagcttgcgccgacaaagctgatagtaattaaaatgagtacctgtaatgatcataaaaaaacatctccttcctcatctattaaattgactcctatatcatctaaatagaaaccatctcgtaccacatctatgttttcaatgttatattcgcctatcttaattgattttgtatctatacgatgaagtttacgtcctttatctacaagatacaaaggaagttctatagcattttctaatttaaacttataaaatgaagaatagtttctaaaacttgggtatgagggttctcttacaaagacaaaagattggacttcaatatcacgacttttccaaaaattcgtatctatatcttctttatcagttttctctcttggtcttatcaaccaattataaataaaataagaacggagtgtttcagcattatcacgggcttttatagtaaatggtatcttatcattataaacgctattcaatatattaatcaatatattcatactatattctcctgtaactaatgatgaaacagttttatctaatgcagagcaacttttccatattttatctttacgatcatagcttccataaggagcaggatagagattacttttcttttgaggacaaacaacgtatagttgccctattttttttgcatcaaatctacataacctaccggcacgctgagtaagtctatcaataggacatatctccgaaaccatcatgtctgcacttatattaatactcatctcccctatttgagttaagatcgctatacctccagccattccattctgccaagcatctttaccaagcgctgaaagaagctgattctctttattcaacttatctaactctgtaaatctactatgataaagtaatatgggtaacctacttcctccatcctcaaccttctttacaacgtacctatataactttattgcattatcgacagtgttcatatagaaaatagcattaccactttctatcgccttttcaataaccctatctaaatcggacaaaatattataatcaaatatagattctatagcgaaacgaacccgattatagtctgacttatcttctaaaatatcagttacatgataccctgtctttttataagatcttattacagattctggtagagaagcactcattattaatacaggaacatgccaatagcttaaaattgtgagtaaaaaatttatattagcctgtgtaaagtcatcatagaagtctgcctcatcaataactaaacaggaatttgccatattaaaattaatgaggtgatggtcttctcttgttaaagttaatgacatcaaaagatgatctattgtacataccgttattggggtttccaataaccgtgccatatctaattcttttaatgcataagcaagactacttgacccattttctacattattattatatttagcaaaccatgcacttgaatgatatagtcccgttgcagacaatgtttttgatacattaacggataatgcattagacgtaaaccttgtcggcattgcaattatcagtctatcggctcttttattttcaatttgtttaagagcccataacaaagaggcatctgttttaccagcccctgtaggagcacgcaccaaaaggagttcctctttccaatgttcctctaccagtttttgtattcccctcttctctgaaaaggggaatacatactcaaaaggagttatcacaggtaaagattctccatcttcttttgcacttgcacgatgatcggcaagttgtagcatccctcttactccatcatattcataggcagaagctgctacacgattcaaatcctcactttctataatttcgttagaaacagattcaatcttattccatatatccttatgcccttcttgtatccaacgatctttgaaagacaagcctaatttcgtatgatgagcagcaatagcaacactgactggcattggaatatattgcatcttcttttccaaagaaactagttcgtgcctgataccacatgccctaaggtgttttcccccttcatgaaataagtaatcagcaatatctttggcagtaacctctgaatgttcttctctccaccggcaatagtccacataatcagcttgacatgctgtttgccattttatattttctttcccaatatcatggtataatgcagagatttctatacgcttccgtaaatcttttcctactatcttctgatatttatcacaagttgcaggaagactgtcacaaattgacattgcttccgataccacatcggttgtatgttgttccaatgtgataccggaaggctttgccaatacctttttacaaatactcattcttgagacaaacttgattgcccgtccgttttctctttcttttctttctttttgagattatcttttaaatatacctcttcaaatgttttcacaatagaatcgtctgcatcaaaagtaaacaaactattgttctcaagaaaagccaacgctttctcatatgcttttctcacactattctctgttttatcatccccaaggaaatatgtcgcttctcgggcttccagctcttcaataatattcttacgttcgattgcatctgcttcataataacgacaagctttccggctcaatactgtatcaaatacgataagaacttgctgtggttctccacatacagcatttctagcttgattagaataatcattcatatactgagttgcctgcagaaataactttgccctgcgctttctctctgattccttagcatgctttgaataaattgttgctatattaaaaccttttttataagaatatcctttatgaatactcaaagatgtaacgtctaagaagaagttcatcttcatcaagtcatattggctaaattccctggttgccaacgcttgttctgttgaatcagcacctgccgttgttttcaaccttacaagcaaatctctcccgatttcactctcagacatagctatagcaggtgtaacagatagcggtgctgtcctacgaccagaatattcgcctttagaagggtgcatgaatcctcccatatcggctctcaagtcgcaatcaaccatatccgtaacgccatctccattagatacaaatgtttttcccttgcaaggatcatcctcattaagtcgatttattgcagaaaacaaaacatgacgctgcatttgtccagaaatgtaaacgcgtccatcaggcctcctttttatagaagaagcattacccaataacttttcaccattgtttgccatgtggttctcaaagggagccaaagatgacactaaaattccttttatgaccataagtaattatattaaatgttagaataatcagtttcttgttcacttgcttgacccgaattatcagcaaactgctccgcactttcttctttgttttgccgtagccttaagaaagcaatcagtaggtttcttgctttacccacctccaactccccactcatggcttgttccataaatagggaagctgcgaaggacgcatctgaattagacaagcgccctgcccgcgttatgatttgagcgatcaaagcatctcctgtttttgcagcgagggcagaactttccaattcgacaaggaactttgcttttacctttcgtcgttcctcatcacccgattttccttcatctgtcaatgctttctttgcggcacgatacgctacggtgtttagccaccgaccaaattcttttgctgagttcacaacttttccatctatcttttccatgtcttcaaaatatgttgttaataataatcttaatgccgaaggatacgttgccctaaacgctaagaaatccttgaatgcaggcctattaaataactgaagaaatctacctgcaaacaaatcaaacgtctcgtatgcagtctccttttcattcttttccttttccgtctcacctggctcatccttctctctgtcgccgtaattataaagcgtacaccaataaatactatcgacgatttgtcgcaagctcccctcacttgccaaacgtataatataatgattataggtgaacacagaggcatcaccatatttgaccatatatatatttgcattctccaggctcttgataacttgctttgctaacggggaagtctcactatcttttatcatctcgccaatagttcccaacagtgctatactgcataaggcagaactccgaggaggattagggaaattccccttaaagatgttaggacgtttgggcgtataagttattttccctttttttcccttcatatttttcacgactttcccattcaatatatctgactccatattttttgtagaaagtattttgaaaagtctgataaaatccattagctcttttatttccaaatcaggaataatacatacattttcttttttcgattgtaaacaaggctttagatgagttagagatgttagagcagcaagacattcgttatagatagtggaagatggtttgcctcgtgatatattccctttttcagaaaaagcactaaactctcccgctataggcatagctgattgtggtattttacaagaagctgataaattcagcttttcgctctttagcttctgaagtaaatcatataattttgaagctctcatctctgtagaaataacattaggagccaaatagaagaaattctttgcatcattcttctctcgtgaatagccaaaatgcaccttttcttttccctcaaagtttcccaacggcttcaggctgaaatattccatctctctttgaagctcttgttttatgagattttctgtaatatcttctaatcctgtaagacgattgatttctacaagaagtgccttagcatatttgatataaggatgttccatattcattttaatttaatatcaacccaaccttcacttgttccgaggtatccaagattgttgctatttatattttgaaacaataaatcacgcaaatgtatatcaattaataacgaaatttcaaaaatcccatttattgctatgaactcacgagaagtgggacttgtatagaaacaaggaatggcacccatattatcactaaaccatttattcctttccttgtcagcatccttagaagatagttttttttcttctactaccttttcccacatactaaaaagcttacttttctcagccaaaatatctatatcaacatttctacaaccatttatatgcttataagaatcagatcttctatagcatctattccacaaatctttgtaaaaacaaagactttcgaatttcacctttggctttccgttgattgaaaaatagtccatgagaagaggctgataggttgagcctgaaacataatcatcaacctctatcttctgttttttccggattgctttatattctttgaaaatattttttctcaaagggagatcaatatgccaatctaagatattttcaaataaaccacaaatcatttttttatccgggtatttcatacttttatagtacgagccaggcatctcgctaaccatcgataatggtgctaacggtcgtatttccaacgttacctttgccgacaactctggaagttcctttaaaagggataaatctaaattcgtttgcatatattctttcctattttatttctataaatccaaaaccttgtgaacacaattcgcccaaaccaccgtcataagcgatcttcattaattcaatcggggcagttaagcggaaatcatagcggaagccacgaacacgagtttgatcgggagtaccggccttgatcgtaacaagcgtcgacttaggcttatccgtcatcaattcaaaatcaaacgaagagacatcccctgtaaaagactgaccatagaacgactcataacgagcaagaaggcctttcaataatccatcccgatagtggttgtccatgggagagagatactgtacgcggtcaccttgccgctcacgaatacatattgccgaattagccctgaactccatcttttcctctaaactaagagatggctgcgcctctatacctaccacatccaaagccactcgatagtctttatttccaaccacaacgtgttgattggcaaacaagccttggacaaactctgctgtagtttgttcgggtaagaaactaacgagccactctatcttattaccaattatattgatgcagccagccttgggtagtatacggtatttttcaaattgaaatcgtgaataacagaacaacttgaaatgctttccattatcaagcttgaaaccattatcatgaagccatgcagaaaactcggcattggctttcgacaatatcttgtatatcatggcagactgttcatattgataattaacgggtaagcagtcgccatatttgcggtctatctgaaatatgattttaaatctcatatctacaaagaattattgataaagaaataaattttcatggtaaaagaacttcatggtttagtacctgtaaagttattagttttttcaatataatcctaatttcatactgttttttacagctttctaaaagattactccaaatgccatcttcaaactcaacatttttcaaaaggtatcaatattgttgtggaaaaagattatattttcaatagtgtcctaaataatttttgtgaaaacgcatacaaagttgcatcaaatcatttgatttgacgtattttgttccaatggtaaagagcacataccccccttatgtttcaaattcgttctcaggcggtggtgtggacggcattcttgaaacggaacttacgtccggagaatcgaacctgcttctataaaaaaactgtttttatattcttgttttgttggctcaccggataatttgtggggacaagtctgcaaacgatgaagttattataaatctgtcaatcgtttatgggagagggagagacgcaccgatgatgaagtctccggcttcatcacttgtaagcccatccaatagattcaacgcttccatgatttgtcagaaaaaactacctgattttaacacttccgcaacgcttcatccggctgccggcatggcgaaaaaggccttcactttgccgattttgatacccttttatgctcaaagctatgcttttatcggctcaaagcatagcgattacactgtcaaagcatagcttttagtcgataaaagggccgcgattacggcctaaaagcatagcgattaacggtaaaaaagcgagagagaaatacccttaaaagtacaatatgttgataaccagcgttttataaacttgcgctacaatcgcttattttcgtccggttcttttctttttcaaaataatgccacttttttgatggtatatgtaaagataattcagggtgcggtagatatcattgatacttgtaaacctgtccccattaattttctactgaccccttattttacagtttttgattattaacaccgtttgcttgcccgaatcttttagccgtctgtcgcaaatgtcttctcagccgccgacaatatagatactttggaataacgatgatatccttttaaaaatatcgtgtttgaagatgggaacaagcgataaaatactatatttgtagaattaaaatgaaatgataataatcaataccgaaatagactacagattaaaaggtgctatattgcagagtctgagctataggctcgtataacataaaaggcgagttgccccgccttgattgtttgcacaacggaataatccttattgtgacttgcttgaaaaactgtggcaaatataaagaattaataactaaggaccaaataaaacagtaagaaaatgaaaacaattcttggattagacttgggaaccaatagtattggttgggctaaagtctctgttgatgacaatgggaattatttgcacgacattaagttgggtagtcgtattatccccatgagtcaggacactttaggtaattttgacaagggagtaacagagtcgcagacgaaaatccgcacgagcttccgcggcgtgcggaggataagggagcgttctttgttacggcgtgagcgattgcacagggtgctacatgtgatgggttttctgcctcctcattatgattcggccatcggatggaacaaagaagcccccattacttatggcaaattcctctatcacggcgaaccgaagttggcatgggaacggcaggaagatggttcgatgcgtttcctttttatggattcttttcacgcaatgatggtagactttgctcatcatcagccggcattggtcgcagacggaaggaaaattccattagactggacactctattacctgcgaaagaaagctctcacgcaacctattcggaaagaggagctggcgtggatactactcaatttcaatcagaaacgcggctattatcagttgcgtggagaagaggaggaagagaatccaaccaagcgtgaagaatactatgagctgaaagttgtcagcgtggaagccgcggaagaaggaaaaggaggcaacacatggtataacgtaaagttggaaaacggatggatatatcatcgtcccagcaagattgatttgagcgattgggtagggaagataaaacagtttgttgtcacaacggaatatgagaaagatggaataacactcaagaaagataaggatggagaagtaaaacgttcgttccgtgcacccggcgaggacgattggggactgcgaaagaaacggacagagagccagttggaagcgtcgggcaagacagtcggtgcctttatctacgaccatctgctggcagaaccgacggacaagattcgtggaaactttatccgtaccatcgaacgtaaatattataagcaggaattagaggctatcttgcgcgagcaaagcaagtatcacgaggagttgcaatgcaagaagatgctggaaaagtgtgcggaggaactttacagaagtaatcagccccatcgggacagcttgctgaagaaagatatggtttacctgcttctgacagatcttatcttctatcagcgtccgctgaaaagcaaaaaatcgttgatagccgactgcccttacgagcattatgaatatgtggataaagaaacgggagagataaagcgacagggaatcaagtgtatagcgaagtcgaatccttattatcaggagtttcgtttgtggcagttcgtccttaatctccgactgtatgacaggacagatgacaaggaagtaaccgctgagtatctgccatcaaaggaagattatgcccgattattcatttatttgaacaatcgaaaggatattactcaagaaactttgctgaaagattttttcaatttgaagaaagtaaagcgagggagcgagaaggagttccctgtccgctggaattacatcgaagacaaagagaaaaaatatccttgcaacgaaacacgccacgaactgcttatggcacttgacagggctggtatggaacgtagctggctcgacgatactgcacggcaatatcgcctttggcacttgctctactcggtggaagttaaggatgaggccgagggggcgttgcgtaaactgaaggacgacaaagagtttgtcagcgctttcttaaaagtgaaaccattcaagaaagattatggagcctactctgaaaaggctgtaaagaagctattggctgtcatgcgtatggggagttgctggcacgaagatgatatctgtaaagaaacaaagaagcggatagagcatatactacaaggggatgtagaagaaaaaatcagagaacgaatgaaccatacagcttattcgttaggtgaactgtccgatttccaaggtttacccgaatggttggcatgctatgtggtgtatggccgtcattcggaagctacagaaataaaacattggaaaactccggaaaatctgatggcatatatcaaaggctttaaacagcattcgcttcgtaatcctattgtggaacagtgcatcctcgaaacactccgaacggttcataatatatggaaggaagccggacgtatagatgagattcatgtagaacttgggcgcagtatgaagagtacatccgatcagcgtgcccgtatgacagagaatattcttagaaatgagaataccaatctgcgcatcaagaatctgctgatggaactgaaaaatgacacggacatcaaggatgtgcgcccttcttcgcccatgcaacaggaaatattgcgtatctacgaagaaggggcattgcaggagctgaccaaggaagacaatgattatgaggagatttccaagatatcgaagatgtcgcaaccttcggcaaaggagcttttgaagtataaactctggctggaacagaaatatcgttcgccttatacgggaaagcctatctctctgtctaaactctttacttcggcttatcagatagaacatattattccgcagagtcggtactttgatgattcttttaataacaaggtgatttgtgagtcggaagtgaacgcgttgaagagcaatatgttaggctatgagtttatcaagaatcatggcggggagattgttcactgcacgctgttgggtgatgtgaaggtgctgagtgaaagtgaatataaggctttcgtaacagatcattatgccaataataagtataaaaaggagaaactcttgatggaagatataccacaagacttcctgaaccgtcagctgaatgacagccgatacataagtaaggtggtgagaactttactttcaaatatcgtacgcacggaggatgaaatggaagcaacatcaaagtttgttgtttcttgtacgggtggcattactgacagattgaagaaagactggggattgaatgatgtttggaatagtattgtttattctcgctttgaacgtctcaatgagttgacaaagtcggatgctttcggccgttgggagaataaggaaggtaaacgagtcttccaaacttctgttccgttggaactgcaacgtggcttcaacaagaaacgtattgatcaccggcaccatgccatggatgctttggtgatagcgtgtgcctctcgcaatattattaattatcttaataacgagtcggccaatagtccgaagaagcgcgaagacctgcgacagcagctttgtgataagaaccgaattatccgcaagccatgggagagtttcacgcaggatactcgggcggcactggaggacgtggtagtcagcttcaagaactatgttcgcgttatcaataaagctaccaattactatgagcgatatgatactgatggtaagaagaccatggcaaaacagaaaaataaagagatgtgggcggtgagaaagccgatgcataaagaaaccgtctttggacatgtcaaccttcggcgaaaagcgtttatcaagctgaaggatgccttagagaatattccgtttatttgtaacaaggaactgcgtgattatattaacggcttggtggaaaggaatttcaataccaaacagttgcttgctcatttcaggagtactgattatcgttggaacaagcagaatgtggataaggtggaagtatggcgattcagtgatgagaaggaaccacttgtggcaacaaggaaaccgctcgacacatcatttgatactaaacgcataggctctattaccgatacgggtattcagaaaatattactcaactaccttgaagcgaaaggaggggatcctgcaatagcctttacaccagaggggattgccgagatgaaccagaacatagcattgtacaatgatggtaagatgcatcaaccaatattgaaagtaagaatctccgaaccgatggggacaaagtttcaggtagggcaaacaggcaataaagctgataaatttgttgaggctcagaaaggcactaacctctactttgcaatctatgaggatgaagacggaacccgaacttataacaccattcctttgaatgaggtggcagagagactgaaacaaggattgtctcctgtgccggagaagaatgaaaaggatgtttcattgaagttctatctctcacctaatgacttagtgtatgtgccaacagaagaagaaaaactgatgaaagaatgtaggttgaataaggagaggatttataagatggcgagttctacggggaaagaatgttatttcttgccttattccgtagtaaaacctctttatgataaagtagaatttgaatctatgaataagatgggccgagctttgactggtgaaatgataaaggctgtctgctggaaacttgaagtagatcgtttgggaaatattattagggttattaagtaattctttcttgcctatgataaagaagaccttatgcttcagcaatccaatttacctaagtttgcgaaatgcacaattagtattgcatttacctgaagtagaaagcaacaagacattacctgaggcgatgaaaaaagaagccgagcgcaccatcccgatagaagatatcggggtggtcatgcttgataaccagcgtattacaattacatcaggtgtgttggaggcactattgaagaataattgtgcagttattacttgcgatcagaagagtatgcctgtaggtatgctcctccctttgtgtggtaataccacccaaaatgaaagattccgttcacagttggagtcttctctgccattgcgtaaacagctttggcaacaaactataaaatataagattcttaaccaagaacatgtcctacgagtcaatacggacaaggaaaccaattgtatgcgggtatgggcaaacgaagtgcgcagtggtgatccggataatctggaggcgagggctgcagcctactattggcgtaatctttttatggataatcccgattttgttcgtgaccgagagggtacgccacccaacaatctcttgaattatggttatgccatcttgcgtgctgtgattgctcgggcgctggtggggagtggcttgctcccaactttaggaattcatcatcataatcgttacaacgcttattgtctggcagatgatattatggaaccctatcgcccatatatagaccaacttgttattgatatcattcgccgtaatgatgatatttcagagattacgaaagaattgaaaatgcaactcctgggaattcctatgctggatgtgattgtgaatggcaagcgtagtccgctgatgatagctgctcaacagacaaccgcgtctcttgcgaaatgctttgcaggggaagttcgtcgcattagttatccggaaatgtaaccgtttatgtccagcttcgatcgcttcagtgaatatcggattatgtggatactcgtcttcttcgacctgccaacggaaacaaagaaagagaaaaaagcctatattgatttccgtaaatctttgataaaggatgggtttaccatgttccaattttctatttatgtacgtcattgtgcaagtatagagaatgcggaagtccatataaagcgtgtccgggcatttcttccaaagtttggaaaagtcggaattttgtgtattacagataagcaatttgctaacatccaactgttttatggcgagaaaccgaagcctcctaacgctcccggtcagcaactggaactgttctaaacctcttttgatagaaaacaaaaatcccacccttgacgagtgggactttgtcttgtagcaccattttttattttttgtaatatctatgtatggtattggttatcactgttttatagatattgagttgttgttgatactacaaagatagttgttttcaagcaaatcacaacgatactgagccggcctaaatcagacggtaagttgttgttgatactacaaagatagttgttttcaagcaaatcacaacccactcttggaacagttccaccgaagagagttgttgttgatactacaaagatagttgttttcaagcaaatcacaacagcgcttaagtttttcaacacaggacgacagttgttgttgatactacaaagatagttgttttcaagcaaatcacaaccagtttacacgaactgctacgctccacctgttgttgctgatactacaaagatagtgataataatgccaaaattactttatgaatatgacaatacctatatgacatgacaactttctctatagatacccgaccatgccgtcagcatacgcgaaaccatcgacactttttacctactatactctccgtagatatcccacaaggtgtctgaaaagccccagccgcaatccgtcgcattgagcatttgctcaacgcgttctttgaagtcggcaagcagaccatattcagtaatgtatttcatggccttctcaaagttggtctcaagtgtgatgtagtattgttcccacatgtcgccgaaggtcatggtgtattcgcagccattctcaatgtaataaatcatgaggtcggcgagatagaaaggttggggcttcatcttcttgaaatctgagatggcttttctgcatgtggcaaatgacggcttttctgaaaatccccgttcgggaaagaactccttgcgaatgattttcttgaagcgtttgacctcttctgcgctgttgggcgtagtgtagaagtctaaatacatcttggcttccttgctggcgtcatagagagacatgatgatgttgatgacgttttcttttggaagcgaatcgagttttttccttaactttgctttggtcatggtccgtctgctttaatagtttatacgcttgaaagttcgttccagaaattcccaattctccgtgacgattttgtgcgcgtcggcttctaatcccttaggacaagggaaacggagatggggcagcatgtcatgcttgaaaagatattggagcatttcatgggtagaaagatggatgaacaagttccattgctcggcttgatctgtggtggcgacgtaatatggatttcgcttgtcacaaatacattgcgccgcattggaacaagtatcgaagcctttggtcggactcggaataaacactacgatgtttttaccgtcgccttggaacaagcctacatgcgaatcgacatttttcaatcccatatcttttagtaggaactcccgatattctttttcatctctgaagtagaaaagcggactgttgctggatagcttcattagttttttatagttaggaatgccgatatcggatgtttttccggtttcttcggatgattccgtttcaaggctgttgttatcgtttggaaccgtactcatgacaccgttcaactcccacctgtcctgatagaatacaagtgacatgatgatgtcgtttgtcttgccaatcatgcctcgcttaagatttagggccgtgtattccgcaaaccgttctttgccgtcgctcgatttgaagagtatgccctcatcctgttcttcgattactttataaaaatcgatattctcaaaaaccatgtccgagagacgccgggcatacctgttttgcccgttggcttttaagatgctttccagccattcatagggataaagtgcaagcgggcctattttaaacaggaaaacgcttaggctgtttgtcatatatctggcctgatctatatcggccgcttctttataaagattctcatatagctgttcctgtaaatcttgatacggggtactgatttgaggcgtgaaagtaaggtaacagctaaaaagcaaccattccagcgtgaagcgcatcgtgatgaagtcgttcatgaagtcgcaccgatggaaatagtcatgcaacgcttcgttgacaggcagcgtctcgaagtgatccaggcagaagttgaataaaacttgtgccgtatggagaataaacggattgatgggatgaataagttccccttcattaagagacaaactgttccaaataagaaattggatatcttcaacgttaggctcgttcataaaatatccgtcctcatcgatggaatagaaaggaagaggctttccgtaaagttcattatgcttcatgacaaagccgtgccacagcccgctctcggcaatgatatcttccatgtaaagcgtgatggtgatggcaatgtcgattctttcttctatactgttgttcggtagttgctgatcaagaatcgccagaacctgatttccaaaacgtgcatatacaaaatcggtattggaatcgagtcgcttggggtgtcttctcttaatgtcaagtgcaacaatctttgtcgtcataatccataaaattgatagggttggatattgatgggaataatttgtgtaccataaaaaggctgtctcctgaaagatatctcggtgagcacctctttaattctgtggttatacttttcgtaaatactataagattatttgcaaatgtagtaaatattcttgtataaagagctaagagaagcgaaaacaatcccataatgttcaatcttttaattacagacaggctgataaccatctttccatgtagttctgctttgccatctttttgcatacacgtcctcccttcctttgaacagactacgaaacagcttaaccttatcatcaagtgtaagccgtatggaaggaaagattattggagaataaagagaatctactgcctcatccttttttaaggtatattcaattccatgcacacgcagcaacgccttcagttcgtcattctctttttgtagagtttcgcagcgttggagaatttggtgatattgttcttcgtttatcataggatgcgctattgaatcagaacgagaaggctattccttaatcaatttggcacaagttagtggcgaaattcagaaaagagcaataaaagcgtttgatatacttcagattggttacggggaagcctttcgaggaagtaaactctgccttcagatatctactgcgtgtatcgaggaaacagcttccctaagtggtattcggcagcttctccattctcatccgccaatgcaggtgcaatagttcgctgtccacttgaacggaagcctttatctgactctgttgtatcctctctttggagatttcaaccagtccctgtattctccggtgtgaataacttccttgttctctgtttttctcataaatgcgatagaagtttttgcaaatataatcaaagtcctgtataaaagggagaagcaagaagaaaatcctttctcccgatgttcctcttatcattatttaccggggctccttcaagccccttcttgtaccatattttccggatgatcaggcagctaaataatttgcaagataccttcaaactccttcttacactatatttccccgtaaaaaaatatacaaatcactatcaaaatttgcttcgagaataaagttcgtgactaaaaacgtaggattttgaaagtttctataaaacaagcagtgctctgattatcaataaattatcaaaaaacgcaaagtcctttcttgttaaaaaacaacttgaaatgtcgaaaataccctttaaaagtagccttttgagttgctaaaagcatagcaatgaagaggtcaaagcatagctttctgtgtgtaaaagcagccctttgatctcgaaatgagttaaaaatggcatcgcataggggcataaagcgacctttcagccttatttttcgatctaactgaaagatttttagaggtcgtttttcttactactttctttacaaaagccaaaatcggagcagcaccatctacttttcatctcttcaataatatccttagtaatacccttagatgattcagaaagttctacttctactataggttcagttgcttttgtccattccatattattttaattctactataaatttattttacttcctcgaatataccctacactgcaattatattcggcacagcggaataattgtattctcatctatttgtgttatctttacagacagctaagttctgcttgaaaaaaagatatactcaacagcctatgaaatttgatgatgacaatatgaaatggacggtgctggcgacggagccaatcatctcccgaccttggctcaacgctcggcgcgacacggtacgactgcctgacggccgcatacacgacgaatactacgtgttgcattatcccacgtggattaacgtgatagccgagaccaccgacggcaagattatcctggaaaggcaataccgtcacggtctgggcgtgatgtcgacggagattcccgccggctgtgtggaggcgggagagacgccattagaggcggcccgacgtgaactgatggaggagaccggatatggcaatggcgtgtggacagagcttttgcgtgtggctcccaatccgggggcgatggacaatttctgttatagctactatgccaaagacgtggaacgcgtcggaactccgcatttcgacgctacggaagacctgaaagtctatctcgtggataaggctgaggtgctcgaaatgctgaaaagcggagcgtttctccaggtcatgatggtggctccgttgtggaaattcttctatgacttgaagtgaaaaccgctaccattttttcacgaagtcctttacaattcatcgggcactaaaaactgtatttcagttttacccatgcctcggagttctttccatacgcggcgaacttccccttgtcggcatggaaaaagtcgtagcctgcggtcagttcaatctggtcgttgagggcgtaggcagccgagaagcggttgaagacaccgccgtttgtcacgtcgatataggcgaaggtcgacagtttcaacgtgttgcgcagcagttctttgccgattcttgccgtggcgaggccggtgttgcggtagactgtggcgttatcggggcggcccgtcaaatgccgatgggcgtactgagcgctgacgttccagtcgtgacccggaaaccagtctatacctatgagcgcgtggagcacattgctgcgcagaacgtccatatccacggtagcttcctgaggctcatcgaagtagcaggctgtttcgccccgcagcacaaaccggccgatcggtaaggcgcagtcggcgcctatcatggtcatgcgccgatatagcccgtcgacacgcagcgaacgtccgtcgtcggctatatgggctgccacgaccggcattttgttccacgtgcgcaggccactcagcgagagatcaagtccgctgaggttcagggtcagccgaccgccaaactccatattggccagccgcttggccggtcgaccgctttccagatcaatggtatagggtaacgaagtggctgtcggtcgcagggcccatgggttgtgtgggtcggtgggcagaatgccgaacgcgccgacgggtatgcacaccgcttccaaagtgaggcttcgccacgtgtatcggacccgtagcgcattgacgggaatgcggatgtcgtcgtagtcctgtgccagaaactcggtgtagtccatcggcgacacgcagtcggtaatgcacagggcgtcggccacgccccacacgatgatctgtcgtcccacgcgcaggtcgacgttgcctttggcataagagaggtaagcctcgcgcagttccagtcccgtgcggtcgttcagcagggcgttgtaggtggcgttgagcgagaggaaaagcgaggccggccctttctcgagcgtcacttcgccgcgtgcccgtgtcctcgacgccatccaatcggccttaccctcagtcctgacggcgtggtaggtatcgagaaatcctttcaccctgacttgcagcgacgggtcgtccgaggcgtcggaggcttcccgttcgatggcttgccgctccatgtcggccgtcgtctgaagcagcgtgtcggtctgcgcgcgtgcccgtgccgagagcaacggcacaagcagcagaatccataatcgcagccgtttcatgtcagagtcctttctccaatttggaaacggtgaagaggttgggcgacaccttcacgttgaatttctgattgctcatgcggatgagggtctgatgccccgtctgcacattctccatctgcatggagtgcatcgtccagaagccctgtactttctctatgttggagatggtaagactgcggtgcagcttgttgagtttgtcgtaatattcggctttgaccggtatcagacagtcctgtcgaatccacgtgacacgtcgcgtgtagatgtcgtccttgccataaggcaccgactccaccacccagcaacggtgtccgtcgaacgtttcctctcgcacgaaagtatgcttttcctcgtccacactgcgggtgctcatgtcgtcgtaggtgaagtcgctgcccatgaagtagtcggtcttggacgactttccactgatgcggcgggtctttttcatggccggcagatagagccatttgtcgtctaccttgtccgtgttgtcgtaatcccaggtgagaaagcccgttcctttcacgtcgccggggtaggtgaaaaacatgattttcttggtgtccttaccgatgtccatggcccacgactccagtttgcgtacccgtttgtggccgcttttctgaataagcgtcatctcgatggcggcataacggctgtcgccgtcggcccggttttttactttctgcatgatctctcggcccgacagctgggctgcctgcgcgccgccgaccgccatcagggcgatgagcgatagtatgaaatgtcttgttttcattggatttgttatggaatgatgaatattgaatgattattttttaccgaacacgcggagatacttgaagaggatgggcgtgaggaaaaggtcggccaagagtgccgacaccatgcccgccacggccaggattccccagttgcgtatctgcgtggcgtcggagaagatgaatccggcgaacgtagccgagacaatgaccgtcgacatgacgatggccaggccttcggtgcggaacgtacggttgatggcttgctgatagtcgccgcatcggtcgtaggccacatggcagtggttgatgaagtggatagtgtcgtcgacggcgatacccagcaccatcgggatgagcgacgcggtcatcatgtcgagcggatagtcgagccagcccatcatgccgcccacgatgatggccggcgcgatattgggaatcatgcccacgaggcccactttccaattaccgaagatgagcacgagaatcatgccgatgaccagcaccgagagcaacatcgaccacatctgtccgcgttcgacgtattgctgcatggcggtgaactgcggaaggttgcccaccaccgttacatgggcatcgggaaacagcctgcgggcttcccgttccagcgcgtccatttccttttcggcctcattggagttgtaatctttcatctctaactgtaagcggaaccgcttgtaatcgtaatccatccagtattccgcctcggtgccgccggcgttttcgtagagcagcaacagctgcgccaccatgttggcgtcggccggaatgcgatagaatcgcgggtcgttgccgttgagcgtacagttcatgtccttcacaatgtcggtgatggagttatggcgcttggtcagtttgtagccgtcggccgttgctgccagccggtcgagtcgtcgcaggttctccggtttcttggcgtcgttgtcgtggggcagcgtaatcatgaggtcgtaggcatacatggtgccgagttctgtccggcagaggtcgagaaacttcttgacatagggaatcttgtggcccatcgtcttctcgatgtcgaaggccggttcgatgaagaagaggccaatgccgcagaaggcggtgagcgctgccgacgagacgatgacggagcggtggttgcgcatgatgaagttgccgaagcgctcaaagcggttggcgatgtagccctctaagcttttcgacatgttggcggccggcttgcggtctttgccgaacgacagcacgacgggcgtgacgaacagacaggtgagcagcacggccagcagacacagcgaggtgttgatgccgatggctttcatcggaacaatcttcatggcgaggaacgtcatcatggccgccacggtcgtgaggcccgacaggagcacgccccatcccgtctcgctcacggcttcgacgatggagagccggcggcggcccgtctctacgaagcgtgttttgaagaagttgtagagatggatgttgtaggcaatggagcaggcgaaggtgagaatcacggcaatcatggccgtggacatgtcgatatagagtccggtccacccgatgacgccgaagccgattacgagagccagaatcgaagtgagcagcggcgcgacaacaccccgcagcgaacgcgtgacgaccagcatgacgacgatagagaccatgaaggcgaagaggaacagcctgctcagttcgttttgcagatagatgaacttctcatagcccagatagggcatgccc

SEQ ID NO: 622 - DNA, 24452 bp, synthetic construct
  misc_feature 1..24452: note = Synthetic
  source 1..24452: mol_type = other DNA
tcttaagatagacctcaacgccagccgcaccgagagccgtgccaaaagcatacaatatatgtacgagggagtgcccaccacgcagagcggcactttcaccatgaccactatctcgctcaagggggctttcgagagcattggcaatgccggcaacggctatcgcagtaagaactttgaggagtttgtagcttcgttgccctctttccgagaccgggtggaagaccaataccgaggtttgcgctatccgcaaggcatggcctacgccggtcaggagttcgatgccgccaatggtggagtgaatacctactcgggcgacgtgatgattccggcattcctttctgcctacacgagtagcggtggcaacggcctgagcatcttccctgcgctgacgcgcctgctgcccaactggtcgctgcgctacagcggactcggaaaactcccgtggttccgcgatgtgttcaagagcttcaacatcaaccatgcctacaggagcatctatgccgtgggctcctacaacagttacagcactttccaagaagtgatgaacggactcggcttcgtgaacaatacggagggaacgcccattccgagcagcatgtacaacatctctcaggtgagtgtcaacgaggctttctctcccttgctcggtgtggatatgacatttgagaacaatctcacggccaagttggagtatcggcagacacgcgtgctcagtctgagcatgacgagcatacaggtcaatgaggccttcagcaacgactgggtagtgggcatgggctatcgcatcaacgacttcagtctggccaatctgctgggctggggcccccgtccgcgacgggccaagagcaatgccaagtcgcgaaatgccgacaaccgtaacggggcgcagaacaactcacgcaacgcttcgggcacctccaaccacaatctcaacatgcgtctcgacctgagctatcgccgacaagcggccatcacccgcgacattgcctcgctcaccagtgctgccagcagcggtaacacggccttcaaactgagtttcatggccgactacacgctctcgcgcttgctcacgatgagcttctactacgaccgtcagaccaacacgccgcttctctcctccagcagctatcccaccaccacacaagacttcgggctcagtgtgaagttcagtctcacgcggtaatggtaaaaaggggagaagtaaatactcacatatccctaaaaacagtctttgctggttgtcggatggtggcgaataatatcaacaaaaacgcatccgcagaaattctccaaccagggtgggaggccggccttaaactatcggaaaaatcctcttcttctctcattccggctttccgaacttgcgaaagagccacacttgaacgccgaaagggccacagttgcagcgcaactgtggccctttttcaagcctgttctggccctttcaggctcgtttccggccattaatatgtgtcagtaaaattcaaacagctgattatcagcatattgaaaacatcttcaaaatcgcttatttgcgccgagcaggttgttggttgcgaatatcgaaatatgagaagccgaaaacgaataaatagtttgacagttgtcgtcctgatttctcccccgccaagcaccgactgtcccctcgtctgtcttagagaaggtaggcacgcctgattttccttgtctttccccgtcttttatttggtagtgtgtagaatttacactatctttgccggcatatcgtaatctcgccatttaatgctgcgagtgcagcagacctaatatcaacaaaacaatgaacaaaaacacctgtaaacttttgattgccacgttgttgcttgtggcttctccagtccatgcgaaagcacagtctttgtccccacaacggtcgtggacagccgataacggcaacggcaccttcaccaatccgcttttctacgatgagttctctgaccccgacatcctgcgcgtaggcgacgactattatctggccggaaccacgatgcacaccgtgccgggcgtgaatatactccactccaaagaccttgtgaactgggagcagtggagctattgtttcgatcgtttcgactttcccgaccccgctttctccctccgcgacggcaaggaagtctacggacagggtatttgggcaccctgcatacgttggcacaaaggcaagttttatgtgttcagcaacatcaacggcaagggacttcaggtgtatgtggccgacgatgcgcgcggcccttggaagcacatcaacatgaaaggccgcatctacgacctcggtgtgctcttcgacgacgatgacaaaatctatgcgatccatggttatggtgaggtgaagtgcgtgcagttgaaagacgacctctccgaaccgatatacgaaactgagcgcaccatcattcccgagggcacaggggtgggcgagggccatcatgtgtataagatcgatggatggtactatctgatttccaccgactacgctccgaatggtcggacgctttgcagtcgctcgcgaagcatttgggggccttacgagaccatcacgataacagccgacgaaacctatggttatcatcctgcgcccatgacccgctggcaggggcgcatcgttaacgacggccatcccttccgcatagagccggcactgaccgatgccaccggctgcagcaacgcccatcaggggggcatcgtctccacgcccgacggacagtggtgggccctgctcatgcaggatttccactccattggtcgcacggtggatctcatgcccgtgacgtggaaagacgggtggccgatggtagggctggagggcaacctcggacgggcaccccgcacgtggacgaagcccgtgcagggacagcccctgcgcgccccatacgagcgcaacgaagatttcaacgggccgcggttggggcgcatctggcagtggaaccataaccccgacgacagcgaatggcagctcacgggagggcggttgcggctccacgccctacccgcctcacaactgatgtgggcccgcaacacgctcacgcagcgtgtcataggccccgagtcgacgaccacggtggaattgcgcgtgggccgtttgaaagacggtgatgtggccggactgggcaacatcaatgtgccttgttcgtgggcgggtgtcgtgaaagacgggaaacggctcacactcagatgcttccaacaggtggacaacgacacactcgacatgcccgtgcagttgaagggcgaccggatttggctgcgcttcaacggcgatttcgacaacgaccgcggccgctatgcctattcgctcgacggcaagaccttcaccgaccttggccgggagatgacgctcagctatcaactggttacctttcagggcagccgcatgggactttttgcgttcaaccacaagggcaggaagggcggatatgccgagtttgacaacttccgtgtggacgaaccgaaggccgaccgtagccgcaacatcccctacggaaagactattcgtattgtcaatctggccacggacaaacccatggaggcaacgaagcatggcgtgctctacgacaccggagccgacaaccaaggcttgttcacccgtttccggttggtggacaagggacagggcaaggtggtcttgcagtgtgccgacggccgctacgtgatgtcggccggttggggacttcccggcgatgtgcgcatgacgaccgatgccgacaaagccgaggtgttcatgtatcaggatttcctcgaccgtgagtttatgcttttgtccgtccgtacacatctttatataggtaagagtcccactactggcagtccctattcgcttgacttcaagggggccgaccccggaaggagaaacggggccgtgctgcgctgggagccggtagaggagtgacgacaggtccggttggttgaagatatcgtgctgttggttgaatgtttttgaccgttatggctgcaaatgttaattttgtattcgtatgataaagatgtctaacgcatttaaaacgacacgatatgaaaatctattggcaatcattcttttgggcatcggccgcccttttggccgtgtcctgctctgatacgagcgatttagacgactatgtgaacggttctaccaccacaaccacaccgaccggcggaggcagttctccctccaccacgacgcccaccacggccggcgacctgaccactttcacgatagcggtggattcgacagccttgtcggagaccgaaacgattccctccgacaatgaagactatgtggagaacaactctttcaccagcaccatcaatattgtgtatagcggaacgacggccacggtgagcggaagtgtagatggggtgagcatctcggtaagtggtgccgatgtcacggtgacttctacggccaagggggtgaactacgtgctcagtggcacggcgagcgaagggtcgttcaaaatggccgccggtgacagtgacaagaagtttcgactcacactcaacggtgtgagcatcaacaacagcgatggcccggccatcaacatacaagtgggcaagcgctgctatgtggtggccgctgacggcacctacaattcgttcaccgacggtacttcatacgctttgagcaccgaagaccaaaagggaactatcttcagtgaaggcgaattgctgttcagtggcaaagggcacatcaaggtgagtgccaacaccaaggccggcatcgctagcgacgactacgtgatgataaggcccaacaccaacatctatgttaaggccacgaagggcaatggcatcaagagcaaagacggattgctcatcaagggcggtgtggtgaatgtcgaaacctccggtacggcagccaaaggactgtccaccgacggctatttccagatggatggcggtcgcgtgacggccatcactacaggcggaggcgaatatgacagcgacgacagcgacgtgagtgcggcagccggagtgaaagccgactccaccttcacgatgaatggtggggccctctactgcaagagtacgggagccggaggcaagggcatcagcaccgaccagtcgctgaccatcaacgacggtgaggtgaaagtgatcaccaccggggccacctatacctatagcagcagcctcgactcgaaagccaaaggcatcaaggccgacggggctttggccatcaacggcggcagcgtgatggtgcgcgccaccggcggagagggcagcgagggcatcgagagcaagagcacgctgacggttacgggcggttccgttgaggtatattcctacgacgatgcgctcaattcggccagccatctatacatcaaaggcggctacatctacgcatacgccctcggcaacgacggtatcgacgccaatggcaacctctacatacaaggcggaacgaccgtggcctacggcacaagcagccccgagtgtggcattgatgccaacgaggaggagggctacagcgtgatagtcaccggcggtacgctcgtgggcatcggcggtggcacgtcctatccgtcgagccagtccacccaaccaagcattgtctatggcggaagtgtctccaatggctctacggtggcactgaacagtggttcgacgaacattctcgccttgacgatggggcgcagctataacggcaatgtctgcattctcttcacttctcccagtttgtcaaaaggcggcagctacaccgtctacacaggagcgagtgtgagcggaaccgactggcacggactctacgtcggggccaccgtgagcagcaccggcacatcggcagccaccatctcctcactctcgtcgccttattcctcggccggtagcaccacgggcatgggaggcttcggaggaggcggtcgcccgggcgggagatagcaaagacgggcaaagccacctcttggatttaagagaagatggagaagctaaggaatatgaggacaatggttttatcgcttgagcccgacaggtgtgcccaagaaataaaaccattgcctttttcccgccacaccgcacgatgccccttctgttgagcgaggcagatatcgtttcccctccactctttcggctcctccatctctcttggaatggtctccgggggcagagtcggccaaacccacttggcttgtataatatttccacgaatcaaacgtttaaaagaaaatcatgggcctatgaagagatttttacgcctgaacagagaaaacatcacctatttgggactttggcttcttctctttctgtctccgctgttgagcatgtgcatcaaggcggagtcgggattggtcaaggcattcagttggatggaggtgtttcatgtatggaaattcttcgtcgtctatctcgtcatgttccttgtccacaactttgtccttgcccccctgttgctctacaagcatcggaagacgatgtattttgccaccacactttgtctggtgatgatgttcgccttctatcagtgtagcaaccgtccccgtcgtcccatgcaccctatggagatggaaggacgaatgcgccacagacctatgcccgaaggggacagactgcatgaaccggggcgtgacaggatgaaagaccaccgcatggggcctccgctcttcttcggcgagggcgacttggtgagcaccatcacgctggtgctgctgttgggcatgaacctcggcatcaaactctatttccgatcggagcaggaaagtgccgagatgaggctgctcgagaaagaaaacctcaaccaacagttggagtatctgaagtatcaaatcaacccccactttttcatgaacacgctcaacaacatccatgcccttgtggacatcgacccggaaaaggccaagaccactatcgtggaactgtcgaaaatgatgcgctacctgctctatgaaggcaacaattcgttcattccgctgcatcgggaagtggaattcttgcgcaactacatcacgctgatgaagctgcgctacaccgacaaggtgaagatagataccgacattcctgtctcattgcccgacagggggctgccgccactgctgctcatcacgtttgtggaaaatgccttcaagcatggggtgagctatcgggaaccgagttttatcactatcggcatgagggtggatggcgaccgtttccacttcgagtgcgtcaacagcaagcatcgtgagagtacagccgagcatggtggggtggggttgaccaatgtgcgccgtcggctcgacctcatctatggcgacacctaccgccttgacatcgacgacgggacagatacttacacggtgaagttggagctcccgattgccacatgatcacatttctaacaccaagaccgctatgcttatgatcagagttttagccatcgacgacgaaccgctggctttgcagcagttgactgcctacatcggcaaggtgagctttttggaacttgcgggcgcgtgccagagtgcgctggaggcccgcaagctgctcgaaaaagactccgtggacgccattttctgcgacatcaacatgcccgacctcaacggcatggacttcgtgaagtcgcttgctgcgcccccgatggtggttttcaccacggcctacagcgagtatgccgtggagggctataaggtagatgctgtggactatctgctcaaacctttttcgctcgacgacttccgtcgggctgccaacaaggtgaaacggcagtatgaactggaaaacagcacccggcccgtagcatcaatacccgacggacaggccgatgatgtgctctttctcaaaaccgaacaccgtgtgttgaaggtgaatatcggcgacatacgctatattgagggcatgagcgaatatctcaaaatctatcttgaagggcagaaacctctggtggtgctgctctcgatgaagaagatggaggagcggctgcccgccatgttcatgcgcatacaccgttcctatatcatcaatctgaagaagatagccgaggtgaacaaaaaccgggtgatactcggcgaggatgcctatctgcccattggtgacctctatcgggatactttcgctaagtatcttgagacgaaattcttgggcaaataaaccatgggctcgttttttatttgtacttttgcaacatcagtaacacaacggatagcatgttgcaattagacaatttttataaagcacgctacgtgttgggcaaggttttgcgcaagacggagcttatccatgcaggcaaaatcaacgacgatgttgacgtgtaccttaaacccgaatgcctgcaaaagaccgggtcgttcaagatacgcggtgcctactacaagatttcacaactctcggaggccgaaaagcagaagggcgtgatagcctgttcggccggcaaccacgctcagggggtggctcttgccgccacggcaatgggcgtgaagagtctcatttgtctgcccgagggggctccaatcagcaaggtggaagccacgaagcgcctgggagcagaggtgaagctcgtgcccggtgtctacgacgatgcctacgccgaggccatccggctgcgcgatgagtgcggttacacctttgtccatccctttgacgacgagaatgtgatagccggacagggcaccatcgggctcgaactgctcgaccagctgcccgatgtggaggcggtcgtcatccctgtcgggggcggcgggctcatctccggggtggcctttgctctcaagagcctcaatccgcgggtgaaggtctatggtgtgcaggcagccggagcagacggtatggtggagagcatccaccaacatcggttggaaaaactggcttccgtgtcgactattgccgacggcatcgccgtgaaagagcccggacagttgaccttcgaggcttgttcaaaatatgtggatggctttgtcaccgtgagtgaagacgaaatcagtgcagctatcctgcggttgatcgaaaccgagaagatggtggccgaaggagccggagcagccggtgtggcagcagtaatgtttgataaattgcccgtgaagggcaagaaaaccgtgtgcgtcgtgagcggaggcaatatcgatgtgaccatcctcaatcgcgtgatcaaccgtggactggccaaaacaggtcgcctttgcgccctcgaaatggaactcgacgacaagcccggcaaactcgttgaggtatgcacggtgatagcccggttgggcggtaatatcaccagcgtgcatcacgaccgctcggccaaccgcaagaaagtggatgcctgcatcttgcgggtgatgatggagacccgcaatcaggagcatatcgaccagatacgccgggcactcgaagagaaaggaatcacgatactgaacaattcaatccttaaaatagaacattagacttatgcaagcaattcacacagacaacgcgcctgcagctatcggaccgtatagccaggccatcgaagtaaatggttttgtatttgcctcggggcagattccattggatcctaagaccgggacttttgttgaaggaggcatcaaagagcagacccggcaggctctcaccaacgcttccagcattctgaaagctgccggaaccgaccttgcccacgtagtgaaaaccactgtctatctcgacagcatggacgatttcgccgccatgaacgaagtgtatgccgagtttttctcgcatccattcccggcccgttcggccgtggccgtgaagaagttgcccaaaggcgcgctcgtggaagtggaggtgctggccgccaaataacgtgccgaaataggggatagaggacataataacttgtttacaggtacgtatggttctccttggacaaaaggagaatgatatgtacctgtaaacatatatttttataaaatgttgaccaaagcttttgtaaaacaaatcataattcgtaattttgggcaaacaacaaaacagagcgagttgccccgctctgttttgttgtcacaacggaataatccttattgtgacttgcttgaaaatttctgatgcaaatatagcaacttaataattgatatccaaataaaaagtagaaaaaatgaaaacaattttaggattagacttgggaaccaatagcattggttgggctaaagtctctgtggatgactatggaaattacctgcatgacattaagttgggaagcagaattattccgatgagtcaggatgtacttggcaacttcgacagtggggtgacggtatctcagacggcccaacgaacggagtttcgtagtaaacgcaggttggtacagcgcaatctgcaacgtcgtgaaaggttgcatagagtgttacacgtgctggactttttgcctgctcattatgatgcagccataggctgggataggacagaggctgtaacttacggaaagtttcttaatcatgctgaacccaaattggcatgggaggaacttggaaatgggaaaagaagattcttatttatggattcattccatgagatggtagctgattttgcacgttgtcaaccggcattggtggcagatggaaagaaaattccgcttgattggactatctattaccttcgcaagaaggctcttacacaagctattacgaaagaagaattggcttggatattgcttaatttcaaccaaaagcgcggctactaccaattgcgtggcgaagaagaagaggaaaatccgactaaacaagaagagtattacgaattaaaggttgtaagtgtagaagccactgatagtcggaaaggcaatgacacgtggtataatgttcatttggagaatggatggatttatcgccgtagtagtaaaatctcgcttgatgattgggtggggaaagtgaaacagtttatcgtgacaactgaatatgagaaagatggtacgactttgaagactgataaagaaggcaatgtgaaacgttcgttccgtgccccgaacgaaaatgactggggactgcggaaaaaacgtacggaaaatctattggaaatgtcgggtaaaacggtaggtgcatttatctatgaccatttgctgcaagaacctgcagacaaaatacgaggaaacttcatccgcacaatcgaacgccactactataaggctgaacttgaagccattttggcggaacaatgcaagtatcacatagagttgagggataaagagatgttggaagcctgtgcccgagagctttatctgaataaccttccccatcagcggagcctgatgaagaaggacatgacttatttgcttttgtacgatttgattttctatcaacgccctttgaaaagcaagaaagcgctaatagccaactgtccatacgaatattatgaatatgtagataaagagacgggcgagataaaacggcaaaacattaaatgtatagccaagtctaatccatactttcaagagtttcgtttgtggcaatttgtacttaatcttcgtctattcgatcgtgtggaagataaggaggtgacggcaaattatctgccaaccgcggatgaccatgcccgattgtttacttatctgaatgaccgaaaggaaataaaccaagaaaccttactcaaagattacttcaaattgaagaaggtgaaaattggtaatgagaaggaataccctattcggtggaattatatagaggacaaagaaaagaaatacccctgcaacgaaacccgttacgagttgctgatggctttagatagagccggtatcgaacacaaatggttagatgacaataatttggaatatcggttatggcatctgctctattctgtggaagtgaagagcgaatcggagacagcactacgcaagttgaaaaatgatgatgcctttgttaattcgtttttgaaggtgaaaccgttcaaaaaggagtatggagcctattcggaaaaagcaatcaaaaggctgttggccgtcatgcgtaaaggctttttatggaacgagcaagacatctgtgatgaaacgcgcaagcgtattgaaatcattataaaaggagatgttgatgagaaagtcaaagaacggatggggcatgcggcatattcgtttgaccgagtttccgattttcaaggactgcctgagtggctggcttgttatgtcgtgtatggcagacattccgaagcgatggatattcaacattgggattcacccgaaaggctcatagcctatattaataatttcaaacagtattcgttgcgtaatccgattgtagaacaatgtattcttgaaacattacggacagtacatgatatatggaaagaaaccgggcagatagatgagattcatgtagaattgggacgtgaaatgaaaagtacctctgaagagcgtgctcgtcggacacagaatgttcttaggaatgaaaataccaatctgcgtattaagagcttgctgatagaacttaagaatgatacggatatatgtaatgtacatccctattcgccgatgcagcaagagatattgcgcatctatgaagagggggcactacaagaattgaatagggaagacgaggattttgaggaaatttccaagatttcgcaaatgtctcaaccttcgggaaaggagttgaacagatataagctgtggcttgagcagaaatatcgttcgccttatacgggaaaagccatctcgcttgctaaactttttacaccggcctatcaaatagaacatgttattccgcagagccgctactttgacgactcgtttacgaataaggtgatatgtgaggcagaggtaaacactttgaagtctaaccttcttggttatgagtttattaagaagcatggtggtgagattattcattgtaccacgttgggcgatgtaagaatctttagtgaaagtgaatataaggcttttgtaatggatcattatgccaacaacaagtcgaaaaaagataaattgctgatggaggatattccacaggaattcttgagtcggcagatgaacgatagtaggtatattagcaaggtggtaaagacgctgctttccaatattgtgcgaatggcagatgaatcggaagctacttccaagtctgtgattgtatgtaccggaggtgtaacagaccgcctcaaaaaagattggggactgaatgatgtatggaacagtattgtctattcacgctttgagcgactcaacagacttaccgggacggaggctttcggacattgggaaaataaggacggtaagcgggtgttcccgacttctatgcccttggaattgcagcgtggttttaggaaaaagcgtatagatcaccgccatcatgcgatggacgcccttgtaattgcttgtgcctctcgtaacatcgtcaactatctgaacaatgagtctgccaataacccgaaaaagcgggaagatttgcgtcgtcagctgtgcgacaaaaacagagtcattcgcaagccttgggaaacattcacgcaggatgcctataatgcattgagaaatgtggtggtcagctttaaaaactacgtaagagttatcaataaggcgaccaatcgttatgaacactatgatgagaatggtaaaaagaggtttgtgcaacagaaggggagtgaactgtgggccattaggaaaccaatgcacaaggagacttactatggtcatgtcaatctgcgtcgtaaagaacttgtcacacttcagaaggctctcgatgatattccgtccatttgtgacaagaagttgagagactatatcagtgcgttggttgaaaagcacttcaataagcgacagatgcttgcccatttcaagagtacggattattattggcagaagcaatatgtaaataaggtgtatgtgtggacttttagtgatgatataaagcctttggtggctacaagaaaattgcttgacacttcattcgatgccaaacgaataggcactattaccgataccggtatccagaagatacttcgtaattatcttgaagcaaaaggtggcaatgcgaccttggcttttacgcctgaagggattgcggaaatgaatcagaatatctcaaagtataatgatggcaaaccgcatcagccaattttgaaagtgagaataacggagccgatgggagctaagtatcgagtagggcaaacaggaaataaaatggctaaatatgtcgaggctcaatcgggaacgaatctctattttgctatctatgaagatagcgaaggtaaacgcagttataccacagttccattggatgaggtggcggagcgtctgaagcagagactttcgccggttccggagaaagatgaaaacgatgtgccattaaagttctatctgtcgcctaatgatttagtgtatgtgcctactgaagaagagttgcagctacgtgagtgcaagttgaataaagataggatatacaagatggttagctcgacaggaaacgaatgtcattttataccttattatgtcgcgaatgtgatttataacaaggtagaatttgaggcaaagaataaaataggaagggctcttacgggtgaaatgattaaagctgtctgttggaaacttgaaatagaccgtctggggaatattctaaaagttataaaataattctacaccatgatcaaaaagacactttgctttagcaatccaatttatctgagcttgcgagatgctcaattagtgttgcatttgcccgaagtggaaaaagacgaagctttaccagatctgatgaaaagagatgccgagcgcaccatcccgatagaagacatcggggtggtcgtacttgacaaccgacgtatcaccgtcacatcaggtgtcttagaggctttgttggaaaataattgtgccgttatcacttgtggacagaatggtatgcctattggcttgcttctccctttatgtggtaataaaacgcaaaatgagcggtttcgtttacagttggatgcttccctccctttgcgtaaacaactctggcaacagaccataaaacagaaaatccttaatcaagcgcatgtactcagaaccagcactggcaaagaaactaattgcatgaaagtttgggccaatgaagtgcgtagcggtgatcctgacaatttggaggcaagagccgcggcttattattggcgtaatctctttcccgcacttccctcatttgtgcgtgaacgggaaggaatgccacccaacaacttgttaaattacggttatgccattttgcgtgctgtcatagcaagatcattggtggggagtggtttgttgccgactttagggatccaccatcataaccgctacaatgcttattgtcttgctgatgatattatggaaccatacagaccgtatgttgatcagttggtaattggtattatgcatcgtacatctgatatatccgaaataaccaaagaacagaaaatacaacttttgggtatcccgatgttggatgtggtcgtgaatggcaagcgtagtccgttgatgatagctgctcagcagacaacatcctcacttgctaaatgcttttcaggagaggtgcggcatattagctatcccgaaatgtaacctgttatgtctggttttgacagatttagtgaatatagaattatgtggattcttgtattctttgacttgcctacggatacaaagaaagagaaaaaggcctatatcgatttccgtaaggtgctgattaaagatggattcacgatgttccagttttccatttacgtgcgccattgcgctagtatggagaatgctgaagtgcatatcaagcgtatccgcaataatcttccgaagtttggaaaggtcggaattttgtgtataacagacaagcaatttgccaacatacagttattttatggggaaaggcctacccttcctaatgctcctttccaacagctggaactattctgaacgtattgtatagaaagcgaaaatcccattcgttgcaaatgggattttgctttgcggtgtcattttatttttcttgcaataacaaagtatctatttgtaattcagtgaattatagatatcgagttgttgttgctaccgcaaaggtacaaattttcaagcaaatcacaacccttatccgacttattcagcatctcattcgttgttgttgctaccgcaaaggtacaaattttcaagcaaatcacaacgagaagagataggacgggacttatctaaggttgttgttgctaccgcaaaggtacaaattttcaagcaaatcacaactcagagcagcgtcgtaagcttcttgagcagttgttgttgctaccgcaaaggtacaaattttcaagcaaatcacaacggggaggcctaccgggtaaattggccgattgttgttgttgctaccgcaaaggtacaaattttcaagcaaatcacaaccacggtgaaatccctcacggcccggtctgcgttgttgttgctaccgcaaaggtacaaattttcaagcaaatcacaactattgatgagatccgcataaaactcaccgagttgttgttgctaccgcaaaggtacaaattttcaagcaaatcacaaccagagatatttatagggaagttggggctgggttgttgttgctaccgcaaaggtacaaattttcaagcaaatcacaactatcggcttattctcctccgtctttccttgttgttgttgctaccgcaaaggtacaaattttcaagcaaatcacaaccatcattgaactacaccgacaccaaatcaagttgttgttgctaccgcaaaggtacaaattttcaagcaaatcacaaccaaagaaaaggagtatctctactccattttgttgttgttgctaccgcaaaggtacaaattttcaagcaaatcacaacctgaatccgaatgataatcatataagtaacggttgttgttgctaccgcaaaggtacaaattttcaagcaaatcacaacaggcttgcccgtaggcagctacgttccgtgttgttgttgctaccgcaaaggtacaaattttcaagcaaatcacaactaaagagataatcacgcttaccgttttttggttgttgttgctaccgcaaaggtacaaattttcaagcaaatcacaacgtataggaatgacccctgccgagatttcagttgttgttgctaccgcaaaggtacaaattttcaagcaaatcacaactagtcagaccgttgttgctgtaaatcttggttgttgttgctaccgcaaaggtacaaattttcaagcaaatcacaactatgggcaaggttgaaagaaaggccaaggcgttgttgttgctaccgcaaaggtacaaattttcaagcaaatcacaaccatgattggtcaggtgaaaagtgcgggtgcgttgttgttgctaccgcaaaggtacaaattttcaagcaaatcacaacaacacctatttacttttattcaaatttgcgttgttgttgctaccgcaaaggtacaaattttcaagcaaatcacaacacgctcatccgcattatatttaccaacacggttgttgttgctaccgcaaaggtacaaattttcaagcaaatcacaactgacaaccaaacccaactgttcatattgaagttgttgttgctaccgcaaaggtacaaattttcaagcaaatcacaacggatgttccgtcactgtatttgacaacaggttgttgttgctaccgcaaaggtacaaattttcaagcaaatcacaacacaatttcatgtcccaaaaccctttgtgaagttgttgttgctaccgcaaaggtacaaattttcaagcaaatcacaaccgtaatgttggtttggatatgcttactaagttgttgttgctaccgcaaaggtacaaattttcaagcaaatcacaactaatgctgttatgcaggcattgcaggctgagttgttgttgctaccgcaaaggtacaaattttcaagcaaatcacaacggtgtcttgaattccgagattactcgtaagttgttgttgctaccgcaaaggtacaaattttcaagcaaatcacaaccaagagcaaatgttgtggcagcagcaagggttgttgttgctaccgcaaaggtacaaattttcaagcaaatcacaactcactgccgttcgtgagcttgtagtatttggttgttgttgctaccgcaaaggtacaaattttcaagcaaatcacaactaggtgtctttgatggcagcgataccaaagttgttgttgctaccgcaaaggtacaaattttcaagcaaatcacaacagcggcccaagaatggagacaaccgcccgcgttgttgttgctaccgcaaaggtacaaattttcaagcaaatcacaactccattgatgcaatcacctgcagtttgtcagttgttgttgctaccgcaaaggtacaaattttcaagcaaatcacaacggtaaccgtgtcaatgatgttgaccgtttgttgttgttgctaccgcaaaggtacaaattttcaagcaaatcacaactgaccgcttgttcggtctttccgtaacgcggttgttgttgctaccgcaaaggtacaaattttcaagcaaatcacaacattggattgtgattgatggcagccggcaacgttgttgttgctaccgcaaaggtacaaattttcaagcaaatcacaacaggaaaaagaaagggagcggaagataatcggttgttgttgctaccgcaaaggtacaaattttcaagcaaatcacaactggaactgggaaagaagctcggtgccgaaggttgttgttgctaccgcaaaggtacaaattttcaagcaaatcacaacgtgtctccttattggtgcagcgttagtaagttgttgttgctaccgcaaaggtacaaattttcaagcaaatcacaaccgaatgagatagaagtggtcacgcacacccgttgttgttgctaccgcaaaggtacaaattttcaagcaaatcacaacgcatcttgcttaaactaacttctcgatactgttgttgttgctaccgcaaaggtacaaattttcaagcaaatcacaaccgatgtttatgtttccactttttccacgaggttgttgttgctaccgcaaaggtacaaattttcaagcaaatcacaacgacggagagcagcaggtcgggattgttgtcgttgttgttgctaccgcaaaggtacaaattttcaagcaaatcacaactgggcaatatccttatgtcttgtaccgcatgttgttgttgctaccgcaaaggtacaaattttcaagcaaatcacaacagtcgattgtgtcctttgacttgtcgagcggttgttgttgctaccgcaaaggtacaaattttcaagcaaatcacaaccgcactccatgcaggaatgcggcaacggttgttgttgttgctaccgcaaaggtacaaattttcaagcaaatcacaacggttgcttgaatgtctcctctttcctcgatgttgttgttgctaccgcaaaggtacaaattttcaagcaaatcacaactgcttgcaattccaccaccacgctgaccaagttgttgttgctaccgcaaaggtacaaattttcaagcaaatcacaacctaaagcaccatctggtaatctcattgttagttgttgttgctaccgcaaaggtacaaattttcaagcaaatcacaaccctctcctcaagttcccggatgcgctccttgttgttgttgctaccgcaaaggtacaaattttcaagcaaatcacaacagccaattcgacatacttttcccaatattcgttgttgttgctaccgcaaaggtacaaattttcaagcaaatcacaacgatacttggtatcactcatcataaatgtaagttgttgttgctaccgcaaaggtacaaattttcaagcaaatcacaacggtagaaagtagaagctaaagcgtcagaccgttgttgttgctaccgcaaaggtacaaattttcaagcaaatcacaaccatcttcggttgaagtgttgtttgtttcctgttgttgttgctaccgcaaaggtacaaattttcaagcaaatcacaacgttggaacgaaggcaatctaagagtaaacagttgttgttgctaccgcaaaggtacaaattttcaagcaaatcacaacagctaaaggtggattagcttctattggaggttgttgttgctaccgcaaaggtacaaattttcaagcaaatcacaactctcctccgcagctttggagatggcctcctgttgttgttgctaccgcaaaggtacaaattttcaagcaaatcacaaccttagggagatagacctttccctcgcctcgttgttgttgctaccgcaaaggtacaaattttcaagcaaatcacaactcagtcctttagcaactgttttgacccccagttgttgttgctaccgcaaaggtacaaattttcaagcaaatcacaacgtggcaggcaaagtgcttggcttgtcgctggttgttgttgctaccgaagataattataaaaatatatctgtctgaaaataaagaagttaccttgtttgtacaactaaactggtaacgatttggaaacgagcgaactacttggcttcgctgttttctgcctaacaaagaacgcttgttattctgtttgcaaagataatactttgttaccgaatagcaagcgtttttgatgagatattctttattatgcactttttgtatgctatgtttatattccccttccacgtttcttctttctgttagcttggtatctgagtttgcgctgccatgcagcttcggttaagtcattgccttgtgtacttggtgtaattaaatcgcctaacccttccaccacttcatcggctgcgctaacgatggtgtctgccactgcaccaatgggattctgcacttgtgaggtatcattgtctcgtgagatagaggagcggcttggaggtacaagttggtagcctgtatcagattgttctttcttttctgtaggctcttgtactgttagatgtggtttccttgattcttccttgttggttgtttcaaagttcttctgcaaggaatggtagccgaactccctgccgatttcggaagccttgaaggattgccctgcgtatgagaacttcaagccatataccttgccctgcttgttcttcatacgctttatggtaatgccgtttttgttcaattcataaaggaacatggaatgccccgtgacgcctgttcctttgtacttgtcaagcaaggtgtagcaaatcttctgcacctgctgctttgtttgctctcttgtagggctggctttttccttttggtgtttcctttctgccttgacctcttttgcaatggtcaagcctttctccctgctgatttcctctgccacccttgcagccctattgctcacaaaggtggtatcatagacttctccatacagactgatacggttagcaattatgtgaatgtgtctattatcggtgtccttgtgcgttactgccacccattggtggttgtcaagtcccatttgcttggcaaacaaatgtgctatccacatatattcggacacagacagctttttctcgtcctgcggtgcgatgccaatttcgatacggagaaacttgttcctgcaacggctgttgtagttactgaccactttcatttcctcatagatagtctttggatctctgctgcaaagattgtggaatgcaagccgactaccgagtttgccttccctgaaaatatagtccaaagctgtgcttccgtgcgctatcgccttgcatttacctatcatttcttgttagatttaagaccttatatatttcatcatccacccgaaaatgcgggtcgtaaaaccgcttaaatgcctctttggcacatagcgaaaggttcttggtgatatgtagccaatcctcgtccttgagcttgatgagattggaaatctgcccatagaaccttcctgtatgttggagaatggcaatggcttccctctcattgtctgtcatcttgggaacggctgttacttctccgttaaggagtatttcccgacaataatcggagaatttccgtcccgtgctttccgcccttgatttgatacgtttcttctcttcactggtacatcttaccttgatgaactccgttttgttcatccgctgttcttctttatcctgttgctgccatcgggcagcttttcctttatatctgttcatataagtttccttgaaagtttatcattgtagatgatttattaccttaattcctaaatactgaccgatgagaacggagtgattacggtcttatctccccgatagtctgacgaggggagcaagggcagtttgtgggtacaaactgacgtcttgcaatatcagctaacgaaacgtttacgcacaaggcgttttgctgcttgaaagtgaatgctgtgcattccgtgtttaactgtgttcgtggtgttctcatcattcagtatgtttgacaaatttctgttgctatgttctctaaaaaagggttgagagttttgagtggaataatagccccttttcccaaaagtcctcgacccttttcctgtgatttataatctcctccatttatctatgtcctcaccgtactcttccaaatggagacgcacgatgttctccacgaaacttgaaaggttgctgcccctgtcgcctaacctgcgcacgatgaagtcggcatgctcctgcgtttctcggctcagatagaccgcctttcggttgcacagtttggttggcacaagataggcttgcttgtaggcttcgagtgttttcttcctcattttggagctgatgcgtctttgaacagccatattctcagtatgccgtgtatgctcggatttcccagaagtgatatccgcttctccttgagtaacactgtcctcatttatttctacgtccgttgttatttcctccataggaacgggttgtgcttccgtctgtgggattacctcattgtccattttatcatcttggcattccaagaaccatgaaaggtctttgtcattcatcattgttttctttttcatttctctatctcattttatgtttgacttgttttgatttattgctttgattttgttctgtaaccgacatgtgtgccagtatctgctctttatgattctgtcgctcacggacacgactgacatgaaaatcgttgagatccttgaagtctttgtaatgtatgttcatgtcctcaacatggaagcctgcctttatgaaatcttgaacagccctccgcccagcatcgtcattatcaaggaaggtacgaatggaagatattccctgcgcattcatataccgaattgctttggcggtattgctcacggagtttagcacaaggcaggcacttgttacttcttctttcattgaaagaaaagaaagaaaatccataaatccctcgaacacacaagttggctgtatttggtttattatcttgtcggtgaatataggagtaatgtccttcggagctatcgttcccttgaacgtgccattgtcccgaagttcatgccctcctgattgattggcaaagccgatggattgatagcgcctgccccttacctcatagctgatacatttaaggaaaggctttgccttttccaaatcaatgcagcgtacctttgtaagatactcctgcaaatgtggcggtagggtgtctgatatacttatcagtttccttgtctcgtttgcagccatcgttggttggagattgttttgtgagaagtctttgtgagaactatatactgtattatcgggagcgttctgccccaagtggtggatggcttccgatagcgtgcagccctccaaacgcatacagaggtcgatgatacttccgcccctgcattcggcatagtctatccaaaggttcttctctgtgtccactttgaaactcggatgtgtttctgcacgcagcggtgagcggtacaacgcatagactgatgttctgcgtacaggcttgatgcctttactttcaagatactccacgatgggggatcgcttgatgcgtgataaatcttcttctttcattgtgatatgttttaattgaatgaattgaataatttgtgtttgaatgacaatggtgtatttgaatggtaggtgaatgattattgaaagaaaatctcttttcagaagtttttcccctccaaactttttcatctttcttcttactacatactattttgacataagtagttgatttccaatattttttttgtagtaccaagtcatacagccaacctactacatgtgcctactacatctgatagttgcaactgcctaataaaggacagggcaatatcttccttaccttatatacatatatgggactgccaccctctcgcctcttgctcactttctcaaagcctgccattttcagggcttcgcccatgtgctttaaggacaagggatgatgcgtgtaaagtcccaagtaggtgattatctctgtggtagtcatataggtacagttgggactatcctccgtaggtttctcaaaacagcgcaacagtagttccatttctgccgtctgtacttggaaatcctcactctccctgtatagttccgttatctcttcatcgtcaaaccaatagcggaaacctatgctcagcaaggctttcgcttccgcatagacattatccatagaaacagcctttgctctctcaatatctatggaaagcacttcaaagggcagaaaccgtctgctgcc

SEQ ID NO: 623 - DNA, 24452 bp, synthetic construct
  source 1..24452: mol_type = other DNA
  misc_feature 1..24452: note = Synthetic
tatcttgtttcattttagtttcaagtgtttttccaatagaggaatcaactataatcctttgaaaggtaattttgcgagcacggcaagttggtgcggaagttgataagaatcccctatgtggcagttgacataatctttcggctcgcaataattgacctttcgtaaatgaaaagctaagttatcacagtgtaaaagatgaccttttggaaattggaatatatcgcactgattattagatgtttatgaagaggtgtttgttggcctcttgtgggtgatactaacttgctcaaataaattgaaaaagtgctcatgtgagtcaattacagatgatgttattacagaatctattgatgttttaaaatttattcgtgaaaatttcatctaatttgatgagtttcatataattcttttattatctttgtattatgtatcattgcgttcattaaaacagtaagaaatgacaatagaaagtataaagcacttctttaaaataggaatgtggaagaaaaatgacaactcctcacatcatagaaacttgcttttgcgtatgttacaaaaagtttatttggcaattatctttttctttgagagaggccatattggctatgcaacgcaattatcttttagtacaatactggcaattgttccattggtgtccatgatttttgcaattgccaatggctttggttttggaaaatatattgaggaagtttgtcgtgagactttctccggacaaccagaggttgcaaattggttgatacaattggctaattcctatcttgtacatgcacaaactggtttatttattggtattggcctgatatttatgctttacagtattatctcattgattaatactgtagaacaagtgtttgattcaatttggcaagtaaagggcgcccgtccattgcggagaatactgacagattatacctccatgatgtttttagttcccattgccattgtcatcatgtctggtttgagcatattcatttatggatttgctgaccagttaaaggagtattgggtcttggggtcaatggccagattcttaattcactatattctgccttggtttgtcatgtcgatgatttttgtcgtattgttcattttcatgccgaacactaaagtaaaggtgtctaaagccataggaccaggtgtgttggcaggagcacttatgttaggtctgcaatgggtatatattcatggacaaattttattaacaagttataatgccatttatggatcacttgcggctctccccttatttatgttatggatgcaaatatcatggtatatctgtcttttttgtgcggaattatgttacaccaatcaaaatttagaattttatgaatatttgattgaaaccaaagatgttagccatatcaacagaatggtgatgagtgctgtgattttaagtcatatatgcaatcgttttgctcgtggccagcgtccgtacacagcgttggaattaaagactttatcaaacatacctattcgagtgaccaccgatatactgtataatctttgcaaagtaaatctgattactggaaacaactcaatggattcaaatgaaattacatattctccaacaagtgacacagataaaataaccattggaaagatggttactctattggaatcacacccgaaagacaaatatgaaaatctcggtttggacataagcaagactgtctgtaaagaggtgatggatagaatgcgagatgtgagatgcgaatatattaaaagtttagatgatttcccagttaaagatttggtgaaatagtctgattttccgttttggggggcataaataaaacgtaaaatatcattccaaattgtcagtattggtaaaaaaagagtatctttgcattgtatgtgatatccctatatataatggatgtcgagaaacactttagatactctattattttaataatagaaatctgaagacagcttggtaaaagctgttgcgggaattccataactgtaatgatattgaatttaataaaatgaaatatgcaataatcgcagctggtgaaggttcgcgtcttgttgaggaaggggtgaaatccccaaaaccattagtaaagatcaatggtgagtttcttattgaccggttaattaggatctttcttcagaatactgcttctgaaatatgcgttatctgcaatagtgcgatgacagaagttgctgaacatctgaatgaagttaaaaaccgcattaaagacaatggacaagttacacttaatttgatagttaaatcgactcccagttcaatgcatagcttttttgaattgagtaagtttttaggaaatgagccatttgttctaactactgtcgataccatatttcaagaagaagaatttaaggattatataaaatcatttcatcgagcattacatgaaaatgttgatgccttcatgggagtaacagattttgttgatgacgaaaaacctttgtatgtaggggtagagaaagaattgatagtcaatggtttttttgacaaaaatgatgcagactataagtatatatctggaggaatttatggtctgactccacgcaccattaccactcttaaccgttgtatcagcagtgggagaagtaaaatgcgtaattttcaacgcgctcttttaagcgacggtttaacggttcatgcttatcctttctctaaagttttagacattgatcatgctcaagacattattaaggctgaggatttcttaaaacaatgaaagtagtagggattcagcgagccgaatgtttttcaccaaattcagttgaaaacgacaaagctattctcctgatggttttggagcgctttcgaggtgtgatgataccagaggcgaatcttgcaattgattgtctccaagacgctgatgtcattttgaatatgggaaggtcatcaaagacattggagctgttgaagagtgactctttggggaatgcattgataataaatccagctaaaggagttgaacattgtcgaagaggtaatctgcattggttgatgcgtcagtttaatattccgtcacctccagaaattggaaataatggctattgggtgaaaagaggcgatgcatctgcacaatcaaaagaagatgtaagatattgcagggacaaacaagaacttgaagaagtcaaggaagcattcgccaacaggggaatcaaagatattgttgtccaagctcatataaatggagatttaatcaaattttatggaatagatggtgcggacttttttaaaatatattatcctggtgatgatggaatttcaaaattcggagatgaattgatcaatggtaaaccgaggcatatttattttgaatgtggggaactcaaaaatgcggcaggacagcttgcacgagttgtaagcacaccaatttatggtggagatgcaatagtgaatgatgatggtgattatttcatcattgattttaatgactggccaagtttttcacgctgtagggaagaagcagcctctgcgattgcaaattacgttatgaaatatgatggaagataagataaaaggaagaaaaataaaagaactgttagcagcatcccttaagtctaaggatacggaggagtggttggatgtacattttacgcgtccgataggtttgacatttgccttactttggcacaaacttggtgttgcacccaactacattaccgttctctctatgtttttaggggtggcagcaggagtgatgttttattttactgatttcttgcataatttgtttggagtcatgctcctgatgcttgcgaatttttgtgattccactgatggtcaactggcgagactgacaaaccagaagtcaatgattggccgttgtcttgacggttttgccggcgatgtttggttttttgctatctatttggcaatcgtgctgcgtatatggaaccaaaatatgcccggaacatctgagccatggggattttacggcttggcccttgctgccatagcaggaatagtaagccacatgcagcaaagttctttaagtgactattatcgtcaaatacatctctattttttaaagggtgatgaaggctcggagctcgatacatatgaagctcaacgtgcagaattagaaaaattgaaaggtaaagaggatgtgttttgggatagagctttttattctaattatcaaaattattgtaaaagtcaagagaggcggaccccagagtttcaaaaactccgcaaaacaattgagacaaattttcggaccttggagaaaatgcctgaggaatggaaagaggaatttctgaaaggtagcaggcctttaatgcccatgacaaattttctaactttcaattcacgggctatatttatttatatcacttgcttactgaatattccgtgggtttattttctattagaaattaccctctacaacattatttatatctacatgcataaacgtcatgaagagctttgtgaaaagatccgtttgaaattataagaaaaattattctatggaatttaaaggaattatatttgattacggtggaactttggatactggtggctgtcattggggaaagatgatttggcatgcttatgaacgaaacaacgtaccagtttcagaagggatgtttagagaggcttatgtttttgcagaaagaaaattgggtgcaaattttattattcagcctgattattctttctacaaaacattggagataaagctcactttagagtttgaatacttatcgaccaaggggtttctgtcggctacaggcttctccttagtgagtatgaaaaatgctgtgctcacagatttgtatgaagacgtaaaaaagcatacagcccatagcagagaggtccttttaaaacttaaggaaaaatatcccctcgtgcttgtgagtaatttctatggaaatatttcggttgttctcaatgaatttggatttgacagcttatttgtcgggatagttgaaagtgctgtggttaatgtgcgaaaacctgatcctgcgatattccaattgggtgtaacagctcttaatatgacaccagaagatgtcgttgttgttggagacagttatgcaaaagacatcgttcccgctcatagtatcggatgtaaaactgtatggatgaaaggtgaagattggataaacgaagtgtatcccaagagtgttgcagatgtaattatccaagacattgcccaattacttcaaattgataaataaagagatttttaaattaaataataaataggcgcaaaatccgttttataatgaactaaaatactgtattgaaatgaaacaaggaaaagtagctcccgcagagggtaaacttggaatcatggtcgttggctgtggagctgttgctaccacatttatgactggagtattcatgacacgtaaagggttggcaaagccaataggttcgatgacccaatacgacaagattcgtgtaggtaaaggtacggacaaaaagtatcttcactacaaggatatcgttccattagctgatctaaatgatattgttttcggaacgtgggacgtatatcctcaaaatgcctatcaggcagcagtttatgcagaagtattaaaagcaaaggatatagagcctgttcgtgatgagcttgaagctattaagcctatgaaagccgcttttgataagaactatgcaaaacgccttgacggtgacaatgtaaaggattgcaagacccgttgggacatggttgttgaattgaaaaaagatatccaaaactttaaaaaagctaataattgcagtcgaatagttgttatctgggcagcatctacagaaatatacgttccttacgatgaaagatatcataaaaatctagcacagtttgaagaagctttcaagtcggatgaccgtgagcatattgccccctcaatgtgttacgcttatgctgcattgacagaaggatgtccgtttataatgggtgctcctaatacaacggtggatattcctgcaatgtgggaactttctgaacaaactagaatgcctatttcaggtaaagattttaaaactggacaaacacttgtcaagtctggttttgcccctattataaagacacgttctcttggattagcgggatggttctcaactaacattcttggtaatcgtgatggacttgttctcgatgagcctgctaacttccatacaaaggaagtaagcaaactttcaactcttgaaacaatttgcaaagcagaagaacaacctgacttatacggaaatatatatcataaggtgcgtattaattattatcctcctcgcaatgacgataaggaaggttgggacaatattgatatttttgggtggatgggataccccatgcagattaagattaatttcctatgccgcgattctatccttgcagcacctttgttgcttgatctcaccttgcttagcgatttggctgctcgggctggtcgctatggaatacagcgtttcctgagtttcttcttgaagagtccaatgcacgattacactaagggtgaggaggctgtaaacaatctctttgagcaatatacgatgctcaagaatgcaatccgcgaaatgggtggttatgaagcagatgaagaaatcgattaaatttttatctttatttttatttttctggacattggctgtttgtgccaatgcccagaatttacaatgtaatgttgtagattcacagtcaggtgacagcatttcctatgcaaatgcaatttatagtaaactgaaaataggcgcttcaagtaatgcctcggggcagtttgttattgcaaggatcaacggagaagtcttgaccgttacagcggtagggtataagccacgtaaaattaagattacgaaaaagacgcctgatgtgttagagattaaacttattaacgacacaaaacagttagagggtattgtcgtaaaggcaaaacgtcgccataagtattcaaggaagaataatcctgcggtggaactgatgaaaagggttatagccgcaaaggaacaaacccatttggaaaatcaccaatattaccaatttaataaatatcaaaaggttacaatggcattgaacaatcttactcctgaggatatggaatcgggagtgttcaaaaaggcaccttggttaaaagaccaagttgaaacatgtccttacaatggaaaactgattctgccattctctgttgatgaaacccttacccaacatatttaccgcaaggaaccaaaggacgaaaaagatatcattaaaggacagactaccaagggcatatccaaactaattcaaactggtagtacgttgaatacaatggtaaaagatcttttcaaggatattgatctttataatgatcagatagaacttctacaatcacggttcccatcaccaataggttcaactgctatttcattttatcatttctacatagacgacaccgtgatggtggataacgaccaatgcatacgtttgcaatttatgcctgcaaatcaacaagactttggtttcagaggagaactatatgtcttgaatgatagctcattgcatgtgagaaaatgtgatatgcagcttccagctaatacaggtgtgaatttcgtagatgcaatgaaatttcttcaagaatatactaaacttccatgtggtgagtgggtattaaccacagacaatatggtagctgaacttgaattgacagaccttttgagccgagtcatagtcatacgtacgacaggaatgcatgattacgcttttaaccctattgacaatcatctttttagaggcaaagctaagctggcctatgacccaaacgctagaatgagggatgatgcatattggagtcaacaccgtacaacaagtttaactaagagtgaggccagtatagattcctttattgcaaaaatggggcagacaaagaatttcaagtggttcatgtttgttactaaggctttgcttgaaaattttattgaaactggaactgcagaatcaccaagtaaagttgatataggtccagtaaatacattcatttcgaaaaatttcattgacggaattcgtttaagagttgctgctcgtactactgcaaattttaatccgcattggttctttgatgggtactatgcttatggcacgaaatcaaagagtcattattacggagcaaaggtgatatattctttcaataaacctgagtatcagcctattgaattcccaatccgcactctttctttagaatcatatagagatattgaatctccttcagataaatacctcaaacacaataaagataatatttttatgacgttcagacctatgaaggttgaaaaattgtatctattcgaacgacagatggtaaatttcatgtgggaaacagattatggacttgcaacaagttttaattttaccacagagggtaatcgtccgatggggaggctaatttatcaaaaaataaatggaggtatcatagataaggtcaggatgtcttctataacttttggactcgattatcgaccaggacaaagttatattaactccaaacagcaacgtatagaggtaaaccttgatgcccctcgatatactcttacccatacaataggaattaaagaattattaggttctgattttagctataacatgactgaaatatcagcttataaaagattttggcttggcagttggggacattttgatctaagacttaaagctggagcacagtggaataaagtgccgtatctccttttaataatgccccctgttaatacttcatatttcgaacaccaagggtcattcaacttaatggaaaatatggaatttttaaatgaccgttatgcacaatttaatatggcatggaatttagagggaaagattttaaatcgtattcctttaattagaaagatgaaatggcgtgagtattttgcttttaaaggaatgtggggacatcttacagataaaaacaatccactcttagacaagaatagtaatgatccgaatctttaccgttttcctgaaggtacaagcgtcatgacacatgatccttatttagaacttgtcgtgggtattcacaatatattgaaatgtctggaaattgattatgtgaaacgtcttacctatacacatgcgccaggtatttcgaaacagggaataagatttggatttaacgttgttttctaaacgtatacgatttataattcgataaatcctaaatgctgtttataatacattttttaggacttatcatttgacatataatgacttttgtcttctctatagcttttttagaataacctaaaaatcatgtcggttaaataaataatgataaatattaatgacactattaatattaaaaagattacaataaagaatccactctgtacggctttcttattaacttctctaataatctgttcattaccttcaacaaatcctgttatcaatctcatgttctgagtgttggatttatgaaaaaaatctataacgttgccaatataaaacgggataagtccaagaaagacatctcgtagggagttatttaatattgccagtgttaggggtaaacttttgactttcccaaaggcgaaccaaatatacaacaacccaaatattgctgttagcaaatcaccgataccatacggtattaatcctattatgccgtcaagataatattcatctaagatttgttgtaggtgattcatcgttcggaatactctgttatttcgtatttgctcttgtgccttaattcgattcgcttccttcatttaatattgttaattgactatattgttgatgtttaaaacttatatcatgaaaatgatatttctatgtataattatagattttcagcttttgtttagcagatagtcatatatttatcggatttatacaaattatgaaaaattattcatacctttacaaaaaattatatcctgttattggaaataaaataaggcgagttgccccgccttgtttgttttcacaacggaataatccttattgtgacttgcatgaaaattcttttgcaaatttagcaactaaaaaattaataaccaaataaatctatcaaaaagatgaaaacaattttaggattagacttgggaaccaatagtattggttgggctaaagtctctttagatgaaaatgggaattatctgcacgatattaaactcggctgccggattattccgatgagtcaggatgtgttggacaattttggtaagggtgttaccgtgtcgcaaacttctgttcgcacagggtttagaggtgtgcggaggataagagaacggtcgctgcagcgccgcgaacgcttacatcgggtgttgcatagattaggatttttaccacaacactatgatgctgcaatcggttgggacagagattgcgctaaaacttatgggaagtttcttgacaacggtgagcctaaacttgcatgggagcggcaagatgacggcagtatgcgtttcttgttcatgaactcgttttatgagatgatagcagattttacgagccatcagcctgcattggtagctgatggaaagaagattccacttgattggacactctattatttgcggaagaaagcactcacgcaggctataagaaaagaggaattggcgtggatattgctcagtttcaaccaaaagcgtggttattatcagcttcgcggagaggaggaagacgaaaatccaaccaaacgtgaggagttttgtgaactgaaagttgtagctgtggaggctgctgaaaaagggaaaggtgatgatgtatggtataatgtgcatttggaaaatgggtgtatctatcgacgaagtagtaaaatttcacttgatgattgggttggaaaaacaaaacaatttattataacgacggagtacgaaaaggatggtgtaacgccgaagaaagacaaagatggaaaggaaaaacgatcgtatcgcgcaccgaaagaagatgattggggattgcgcaagaaacgaacggaaacagatttggaagcctcgggtaaaacggtcggggcatttatctacgaacatttgctggcagaaccttccgataagatacgaggaaactttattcatacgattgagcgcaaatattatcgagctgaactcgaggctatattgactcagcagcgtaagtatcatgaagaactgcgaagtgagcaaatgcttgctgtttgtgcagaagaactttatcgtagcaatctgccccatcaacaaagcttgctgaaaaaagacatggtgtatttattattgtctgatcttatcttctatcagcgaccgttgaaaagtaagaaatcgctcattgccgactgtccttatgaatattacagatatgtggacaaggaaacaggtgaaatcaagaagcaaggtatcaagtgcatagccaaatcgaatccttattatcaagagtttcgtttatggcagttcgtcttgaatcttcgtctatttgatcgtatgactgataaggaagcaacggccgactatttgccgactaaagaagactatgtgcgattgtttgattatctgaacaatcgcaaggaaataaaccaagaaacgttgctcaaggatttctttcgattaaagaaagtaaagcgaggaagggaaaaagaatttgaaattcggtggaactacatagaggacaaagagaaaaagtatccttgcaacgaaacccgatatgaattgcttgtagctcttgacagggcaggcatagatcggagttggatagatgaagacggacgacaatatcgcctttggcatttgctttattccatagaggtaaaagcagaggcagagagcgcattgcgcaaattgaattctgatgacgcttttgtgagttcttttctaaaagtgaaaccatttaaaaaggactatggtgcttattcggagaaagctgtaaagaagctgttggcggtaatgcgtatgggtagtatgtggagtgaggctaatatctgtgaagaaacacgaaatcggataagctgcattattcgaggcgacatcgaagagaaaatcaaagaacggatggggcatacagctcgttcatttaatcagatcgatgattttcaagcccttccggaatggttggcatgctatgtagtgtatggtcggcattccgaggtgactgatatacaacactgggaaacaccagaacaattacaatcttatatcaacggcttcaaacaacattcgcttcgtaatcccattgtagagcaatgtatccttgaaacgcttcgcaccgtacacgatatatggaaagaagccggacatattgacgaaatccatgtggaattaggacgtgatatgaaacggacagcagaccaacgtgctcgtatgacgaagaacattctgaaaaatgaaaataccaatctaaggattaagagcttgctgttggaactcaaaaacgacacagatatcaaggaggttcgtccgaattcgccaatgcagcaagaaatattacgaatttatgaagaaggtgctttgttgcagttgaagagagatgatgaagcatttgcagacatttctaaaatctcgcagatggcacagcctactgcgaccgaattgcgtagatacaaactgtggctcgaccagaagtatcgttcaccttatacgggtaagtttatttcgctttccaagctatttacttcagcttaccaaatagaacatgttattccgcagagccggtactttgacgactcctttagcaacaaggtgatatgcgaagctgaggtgaatagactgaaatccaatatgctcggttatgaattcatcaaagcacatggcggagagattgtgcattgtacaatgttgggtgatgtaaagatattaaacgaaagtgaatataaggctttcgttaacgagcattatattaaccatagggcgaaaaaagaaaaactcctgatggaggatattccacaggagtttctcaatcggcagatgaatgacagcagatatatcagtaaagtggtgaaagccttgctttccaacattgtgcgaacagaggatgaaatggatgttacttcaaagtttgttattccgtgtacgggtggtattaccgaccgattgaaaaaagactggggcttgaacgatgtatggaacagtattgtttatcctcgttttgaacgtcttaatcgaatgacgggaacagaagcattcgggcattgggaaaacaaagaggggaaacgagtattccaaacctcagttcctatagaattgcagcttggtttcagtaaaaaacgcattgaccatcgtcatcatgcgatggatgcacttgttatagcctgcgcatcgcgcaatattattaactatctcaataatgaatcagcaaacagtcagaaaaagcgagaagatctgcgcagactgttatgcgataaaaatcgcatcatccgtaagccatgggagagttttacacaggatgcccgtgtagcattgcaagatattgttgtaagtttcagaaattatgtacgtatcatcaacaaagcaacgaactattatgagcgatacgatgagcagggaaagaagacaacggcagaacaaaagagtagtgagatgtgggcaatccgcaagccgatgcacaaggaaactgtcttcggacatgttaatctcaaacgtaagactactgttaaactgaaaaatgcgctcgagaatattccgaatatctgtaataaggagctggaagcgtatatcaatgagttggttgaaaaacatttcaataccaaacaaatgcttgcacatttcaagagcattaactatcgctggaatagacaaaatgttgagaaagtggaagtgtggcaatatagcgatgaaaaagaaaggatggcggcaacaagaaaaccacttgatacatctttcgacaaaaagcgtattgagacgatcactgacacaggcatacaaaagatacttctcaattatcttgaagagaaagacggtgatccaaatatagctttcacaccagaaggcattgccgaaatgaataagaacatttctctattcaatgatggaaagcttcatcagcctattctgaaagtgagggttgcggagccaatgggtgcaaagtatcaagttggactgactggaaataaagcagcaaagtatgttgaagcgcagaaaggaaccaatctctattttgctatctatgaaaatgaagagggagaacgaagctataacacagttccgctgaatgaagtggcagaacgattaaagcaaggtatgtcgcctgttccagagaaaaacgagaaagatattccgttgaagttctatctgtcgcccaatgacttggtgtatgtgccaacggaggaagataaattgtcgaacgaatgcaagttggataaggaaagaatatacaagatggtaagtgcaacagggaatcaatgtttctttattccttgtcgagtagctacaagtattgccaacaaaaaagagttctctcccttaaacaaattggagaaggctatttcaggtgaaatgataaaggctgtctgctggaagcttgaggtagatcgcttagggaagattctcaaaattataaaataaaaaaccatctacccatgataaagaaaacactgtgcttcagtaatcccatctatttgagcttgcacaatgctcagttggtattgcatttgccagatgtggaaaacaacgacacgttgcctgtagcaatgaaaaaagaagctgaacgtaccatcccgatagaagatatcggggtggtaattctcgatcatcgacgcatcactattacttcgggcgtattggaagcattattggaaaataattgtgcagtaattacttgcgatcaaaagagtatgcctgtaggcttattgctgccactttgcggaaacactacacagaacgagcggtttagaacgcagctggacgcctctctgcctctgcgtaagcagctgtggcaacagaccgtaaagcaaaagatactcaatcaggagtatgtgttgaaaaacaatacggataaggaaacaaactgtatgcgtgtttgggcaaacgatgtgaggagtggagatcccgacaatttggaagcgagagcagcagcctactattggaaaaacttatttaaggattaccctgattttgtgcgcgacagagaaggtacaccacccaacaatcttctgaactatggctatgctattctgcgtgcagtgatagcaagatctttagttgggagcggactcttgcccacattgggtattcatcatcataatcgctacaatgcctactgtttggcggacgatataatggaaccctatcgaccgtatgtggatgaattagtattggacctcataaggcaaaatgaagacatttcggaaatcaataaacgattgaaaatgcaactgttgggaataccaatgttggatgttgttattaatggaaagcgcagtccgctgatgatagctgcccaacaaacgacagcatcgctttataaatgttttgctggagagatgcgccacgtcaattttccggaaatgtagccattatgactaattttgaccgacttagcgaatatagaattatgtggattcttgtattcttcgatcttcctacggaaactaaaaaagaaaaaaaagcctatacagatttccgtaaagccttgatgaacgatggatttacgatgtttcaattttctatctatgtacgacattgtgcgagtatggaaaatgcggaagttcatatgaagcgtattcgtaacaaccttcccaaactcggaaaagtcggtattttgtgtataaccgacaaacagtttgccaacattcagctgttttatggtgaaaagcccaaaccaccgaatgcaccatatcaacagttggaactcttctgatttgcctgtctatagaaaacaaaaatcccatccagtatggatgggattttgttttgcggcatcattttatttttcttctacaactttgtattgtacttattaccagcaatttgtgcgatttcagttgttgttgctaccgcaaaggtacgaattttcaagcaaatcacaacaacaaagtatcattttcacctatgtaaatgttgttgttgctaccgcaaaggtacgaattttcaagcaaatcacaactgcatcagtgtggatgttttgtccgacttagttgttgttgctaccgcaaaggtacgaattttcaagcaaatcacaacaatttactgcctcccacgtgttaccagaagttgttgttgctaccgcaaaggtacgaattttcaagcaaatcacaactatcactgatgtccttgttattgtactcatgttgttgttgctaccgcaaaggtacgaattttcaagcaaatcacaactaacatctacggattcaagcggaaagacggttgttgttgctaccgcaaaggtacgaattttcaagcaaatcacaactattagcagccataatacttttaatgatggttgttgttgctaccgcaaaggtacgaattttcaagcaaatcacaaccagctggcacaggtatgacacgcggctttggttgttgttgctaccgcaaaggtacgaattttcaagcaaatcacaacacgttaataatgtgaaaaatacgctctatcgttgttgtttggaacaatgtttctatcgtcaggctatgagagtttaacaatagcttatccaaagctgacctttcgcgcaatgatagctcacctatcttattataaaagtttaccttttggaaacggaaattttttgttctgattttcagctatttagattattgtttaaaaagagtggaactctcatcgcaaccctgacttgttgtttgcaaaaacaaaggaatgtatgagacttccacattttggtggtaactgccaaaacgatatttctattttattcgtaatgcatcgattttgcaggatttatgtggctgataaaataacttggtgcaatcaatacgaatacacatattaataatgttgaaagattcaatgctattatgagaggaatgttgatttcaactggtacagtacttacataataggtctgtggatcaagtttaaatagccctgtatattgttgcagcaatatgagacctataccgacgacatttcctattattaatccttttccgataatgaaagtggcaaaccacaggaaaatatgtcttatctgccgatttcttgctcctatcgccttcatgaggcctatcatttgtgtgcgttctaatataatgataagaagtccagatatcatagttacaccagctactgatatcatcaatgccaaaataatccaaacattcaaatccattaggtcgagccatgagaatatctgtgggttttgttcgataacagttgcagaagaataggtgctgccatatttatcaaccttgttcttcacatgtcccaaaacattaaaagccgtattatccaataagttgaaatcttttacttcaagttctgcaccactatattgatctggttcccaaccattcaatttgttgacggtgtataggtccgtcatacatatttgcgaatcgaattgtttcaggtttgtttcatagattccacacacagtgaattttcgggtacgtacaccttgttcattgacaaaataggcaaaaatcttttggccaaccttcattttcaatttatcggcaatggttttggataggatgattttttgttgattcgaattgtctgagaattttggaaaactccccgccaccatattattgtgaataaacgttgagtcaaattctggaccaacgccctttagtgtgacaccaagaaagtcgtcatcggtttttaaaattccctgtgtataggcaaatctctgaacgtgtttaacaccttgtatcttatataaggctttcagtaagctatcgtttatcgttattggatatagctcagaattttgcaatgacataaaatcagcaaccgtaatatggcttccaaaaccaataactttatttcttatggtgtgtttaaatcctaatacaaccgatacagaaactatcattactgcaagtcctattgccactcctatagtggcaatgcggattgcgggttttgataccctacgtgttttgccagaactattatatattttttttgcgataaataatgggaaattcatctttattgttttattctgtatttattcttcctgggtaagattccaaagtctttttcagtacaagtattttaacatatgcaggttcagggatgataacttcatagccagggtttagtcacgacatgaaagaaaaaggtacagcttctgatcctcttgttgtaatgatgatgttctcaggctctacatcaatggagaatttcttgtaataatcgcacagcttttctctgtaagcaagaatatcctgtgagggggaatattcgagtagcgttgggttgatatttttcactgtgtcaagactgcattggggtgggggaaggtcaggttgtccaatgttaagttgatactctggtaagccacgattttgttcggcaactgccaatgatgacaactttcttgtgggagattctggcatctctaatcctcgaattgaaatttctggcataattctttcttttacctttttgaacccaatatgtgctgagaacttacacccttagcactttaacccataatgcaaagttaaatatattttttattttatagcaaaaaaatcctattaaacgagagttttttactacttttgcataaagaatgaatattgattttttgtcgttattattcattgcaagtgtagaattatcaataaaaaatatgagaagtaaaacaagttcttggtttgaaactaaggttcgttatgagaagttgatggaggatggtcagaataagaaagtaatcgaagcatatactgttgatgccttgagcttttcagaggccgagtccaccattacaaaagaaatgtctaattatattagtggcgagtttgaggtgaaagcaattgcaccttctgcctatcgggaaatattcttcagtgacgtggatgccgatgataagtggtttaagacacgcctatcgtttattaccattgacgataagacagagaaagagaagcgctctatcgtcacctatcttgttcaggcacattctgttaatagtgcagttaagcatgttgacgaaatgatgggtaatactatgattgattatgaaatagtttctgtgaacgaaacaaaaattatggatgtctttgaacataagtatgaatcgagcgaagataaagaatgattttttatcatgtgtatttacctaccttatgcaattaaaatagattgaatatgtttgatgtatcgataaatttacataaagttcttgaacaattacctgatggtgtgaaactgattgctgtcagtaaattccatccaaaggaatttattgaagtcgcttataacgaaggccaacggattttcggtgaaagtcatgagcaagagctttcggtaaaggtaagagagttacctcaagatattgagtggcatttcattggccatcttcaaactaataaggtgaaatacattgctccttacatttcaatgatagaggctgttgataccttgaaacttcttaaggaaattaataaacaagccctcaaaaacaataggatcatcaatgttcttttggaattgcacattgcagaagaggaatcaaagtacggatttacttttgatgattgtcgtaaactgcttgaaggagatgaatggaagcagctgaaaaatgttcatatatcgggattgatgatgatggcttccaatacgacggataaggtccaagtaaagaatgagatgttgttagcagcagatttctttgacgaaattaaggagaaatattttaaagatgatcctgattttaaagagcgttcatggggtatgagcaacgattatcccatagcacttgaggctcgctcaacgatgattagggtggggacagccatttttggtcctaggatatattaattagagatattctttttcttcgtttaaacaatctgaagcgctaactgtataaaattaaaatctatatttattgattagggaaatttgatcattattaaaatctgatagtcttatggtgaagtataatataacagaaaaaaaagagaaaccagccgtatatcgtagtttggtcagtcctcaattaatggatgaactgaaggacaagattttgaacattatacttattcaacaaaaatataaggataaaaatttttcagcaaagaagttagctgaagagcttcacaccaatacaagatatatatctgctgtcattaatgtcagattccacatgaattatacatcatttgtcaataaattccgtgttgatgaagcaatgggattattggttgacaagagatatcaggatttaaatatggaagatatcagtgccatggtaggtttttctaaccgacagtctttttattcttctttttataaaataaacggaatcaccccaagagaatataagttgcgccatactgttgctggtaaattggaaaagatttcttcaaaaaagtaaacttattctccaagacaaaaaatttaatatcggtgtagaattattatgttagaagattcctttaaatatacagatgagacatttgatgacattcaaatgttgagatacaatttaaatggttttgaagatcttactttaaaacaaaaaaaatatatttattgtttgtcccaggcaacactttacggtagagatatcacatttgatcaatttggaaaatataatctcaaaatccgaaaggccttggaagctatctatctttcaaggcttggtgatacaagtgaagatttcaaagccttaaaactctatttaaagaaagtctggttctccaatggtatttatcaccattataattcagataagtttgttccaggattctctgaagattattttgtcaacgcactcaatgagattgatctttcgctgcttggcttagatgtcaaagagcgtgctgatgactttgttaagacaattaccaaagtggtttttgatccattattcttgcctaaaggagtgaataaaaaagacggagaggatatcattcgtacttcagcttgcaattattatgagaatgtttctcagtgtgaggtagagagattttattctgataaaaagtctggatgtaagatggaaacgccttcgtatggtctcaattcaaagctgattaaagtaaatggcgacattaaggaaattgtctggaaggaagatggattatatggagctgcaattaaaaagataattgaatggcttgaaaaagctgagaaatatgcggaaaatacggctcaagtcaatattattcgcctgttaattgcttattataagtctgggaatcttcaggattttgataaatattctattgcatgggttaaggaacaggatggtcaggttgattttatcaacgggttcattgaagtttatggtgacccgctgggctacaaaggttcatgggagggtatagtacattataaagatttggaagagacaaaacgaactcaacttatttctgaaagtgcacagtggtttgaagacaactctccgattgatgttagattcaaaaaatcgcaagtgaaaggtgttactgccaatgtggtttgtgctgctatgcttggcggtgatgaatatccctcaacagctattggtatcaatcttccaaataccgattggattcgggccgagcacggttcaaaaagtattactatttcaaatttaacccatgcatacagtgaagcgtcaaaaggaaacggaatgttggaagagtttgttattgatgcgcaaatgatagacttaatcaaaaaatatggtgatgtaacggataatcttcatacagatttgcatgagtgtcttggacatggcagtggtaaacttctacccaatactgatccggacgcattgaaaaattacggaaatacgattgaagaagcgagggcagatctctttgctctttattatatatctgattcgaaattacaaagccttggcttgttagactcgcatgatgccttcaaagcccaatattatacatatatgatgaatggcttaatgacccagttggttcgtattaaacctggaaagcaaatagaggaagcgcatatgcagaatagggctttgatcgccagatgggctttggaacttggaaagtctgatagcgttgtagaaatgatttctaactgtggcaaaacctttataaagataaataactatgaagccttgcgtgacatttttgcttatcaattatctgagattcaacgtataaaaagtgaaggtgattatgaaactgggcgtcttcttgtggagaggtatggtaaatcgattaattataatctgcaccaagaggttctgtccaggtatgagaaattaaatattgctccttataaaggttttctaaatcctaaatttggaattatttatggaaatgaaggggaagttatagatatagttcttgattattccgaaggatatactgagcaaatgttgagatattctaaagattacagtacgctataattatgaataccaaagataaattaaaagaaatcaagcagtcatttagactttttatgaatggcgcaacatcaagctctatgcgaaaaaaaggcttgaattacaagattaactggggcgttcctttacctattttacggcaaaatgctgagaaatatggtaaagattatgaattggctatagagctttggaaagatgatattcgtgagtgtaagattatggcaacctacataatgcctacacaaatgatgaaacgtgagcaagttgataaatggatggagactgttagaaatcaagagttagcagaattaatatcctttaatttattgaagaatcttgccttttctcaaacattggcctttgactacatatcatcaaaagataatatatatcaaatttgcggctatcaattgttggcttcattatttgttgatgggcatattccaaatgatcttctcatcaataaattcttgactcttgtacagggagtattaaaagaaggagagctaaatgttcagcattcagcttttaatagcatcaataaattctgtgatttaggggaaaagtaccgttcgttggtagtaaaagcgcttccagagcttgattttttgtaattgatatgaatataatatgccgagtcaaaagtgtcctaactattactttcgggaattcgtgaaacatcgtgtaactcataagacctaacgtgttttctttctaatcatatatggcatatacctccaattcgtattcaggaggtggtaaacatacgcatcatagcgaacattcgacctgatcaacaccattaaattatattacaataatctgcgttgaggatatgctttgtaatctattgataatcagaatgatattaattgagattcaaaagcttatcttttgcattccaattcatgacctattgcagcgcaaaaggtaagcttttagaaagtaagagctaagcttttgtgtggaggaatgaagacatatttatgacactattgatgccgagtattgctttgactttcttttaacttttttttgtcagtgtcttgagtttatgtacctaaaaaagattaactttgtagaaatttaatcagttagtcgtgactaaagaatctgtcaaaacaaaagttaaaggcatccttgaagggtatctcgaaatgaataatcaccgcaagacttcagagcgattcgcaattcttgatgcggtatatgacatgcaaagtcatttctctttggatgatttgggtgcaaagatggaagctattaatttcagagtatcgagggcgacactatacaatacaatgcgtctcttcattgagttacgtctggttgtaaggcatcgttttattggtcaaacgaaatatgaggcttgttttaacaatgaagaccatattcatcaaatttgtacggtctgtggctcagttacggagattgaagccaacgagataacagatgctattggaaatacaaagttgcatcgttttcgtaaagatggtttttctctctatttatacggtgtatgttcgcgttgtcaggctaaaatatcccgtcagcgtaataagataaaacaaaagaaacaaggtaaatctaatgaaaacaggtaaagttgatgtccttttgggattgcaatggggcgatgaaggaaaaggcaagattgtcgatgtgttaactcctcgctacgatgttatagcgcgttttcagggtggcccaaatgctggtcatactttagagtttgaaggacagaaatatgtactgcgttctatcccttctggcattttccaaggtggtaaggtaaatattattggaaatggtgttgtattagcaccagacctttttatgaatgaggctaaagaactggaaagctccggtcatccgttgaccgaaaggctatatatttcaaagaaggcccacctaatcatgcctactcatagaatcttggataaagccaatgaagttgccaaaggaaaggaaatggtcggtacaacagggaaaggaataggtcccacatataccgataagacaagtcgtaacggcttaagagttggtgatat

SEQ ID NO: 624 - DNA, 24443 bp, synthetic construct
  source 1..24443: mol_type = other DNA
  misc_feature 1..24443: note = Synthetic
aaagacaggcacggcagggaacagacggatatgttcggagtgatatacacataccgctgtatccttaccaacaaccggacatctgccgggaaggacatcatcacattctacaatgaacgtggagcgagcgaaaagaacttcgacatacagaacaatgacttcggatgggcacatctgcccttttccttcatggctgagaacatggctttcatgatggttaccgccatgctgaagaacttccatctctatctcgtccgtaatatcagcgagaaggtcaagccgttgaaaaagacaagcaggctgaaagcctttatcctgcatttcgtcatcgtaccggcaaaatgggtgagaacaggaaggcgaaacgtcctgaacctgtatacaaataaaacatactactctgaagtattccttgaataagctgcatttctttgtggttatcatattccccattggtttgggtgggggatttcatgcccaggcaagacccaggaagccccgaagagccttatatcagcatatagagcctcaaaaagacatctcaacatataaaatcgactcacaaggaaaaacgctgcggaaatgaggcattagaatacagtggggatgaactcttgttcttctccacttcttttatataaaaaagccccaccgacgcaatcaactacgccagcagggcccgctaacaagtatgtgatagaaaataaatctactttaatccataacctcgctgcgactcttgtacttcagctgaagacatattcctgtcatagctgtttgcagctgccgacctgttttcgtcatactttctcaacaccgcatttgcaagcgtgttcaaaggtatagcttttttttcatatgcgtcaatagcttggtcggaaatattaatgacgactggcagattgtcaatatctgctatcatcgaacgccctcttatggctatattgtttaatcgtggattgagaggttcgtcagcatattgcttgtatttccttgatggtgcggcgggtgtggaaacacctaatatctcatgaccggcattgttcaagagattcatgcctccgaatcccatgaacatgagctttaaaagtgggttcttgctgaacagtcctgccgctatcgccgccagtggcagaatattgttacccaccgtaaacgaagaggtcttgccggtgaacattccgataagcatgtccggcaacatggcaatgacatagcccaaattcttggatatgtcgctaaaaccattcatcccagcattatccaagtaagtcccccacccagaggtttccggcttaggtataggaggttgtagcatcccacttgatgcattgggagtgtttgttatcatgccctgtggagttgtgatttgcttgaaaatcgtaccattgcagtatacaaaacaacaaattgagaaaatttaaggagtggtgattagttgtgatttgctgtaactattcagcgataatcgatatatacagtgcatatcaatttatcaaaccttaaataaggcttgaatcgcattatatggagttttgtcgtgcttcttagctgtttctacaatcgaatgaagttcaaggaaagcgtctgctccgaagtctgaacgaaaagcacaggagttcttcagtttgatttttagcttgcgtattcctctttcgcttccattattgtcaaatggtatcatcgaattttcgaggaaattgaaaatgtaatctctgcatttgaccaagccttttctgaacgtaataaactttttaccaagctcctctatattctgtttgagtagattatccaaacgttcaatccatgacaccttgtctatgacgtcgttcggattggcgttccgctcgtgaatggcttcacggaacagactggttacattcccggaccactcctgcccggtgttcaactctgaaagatattgcagttcgcgaagcaagtgggcaagacatacctgatgattgaggaaatggagtgcaaagtatgcgctatggcggtcggtaacggcagtcattcgtccaggctgtcgccaaacctgtctgccaacaccttcgatcctcttccgtcagcacggaaaagcagtgtgtaataaactgtctgtgctatccaggcccaatcgggtcttttgttacagtacaaaccactctcatcgaaaccaactactgctgatgacttgatatgttctttgatcttatcaatcacaggttgcgcatttctccttgcctcattcacccagttcaccagcgagccttcacttggagtgagaccgaatacctcacgcaaaagacttgctatacgaccgtatggaagaaattgcacgacactcagataaaccaccagagcctttacgcttgaatcatataccacgttgtttgaccgccgtccggatacgttcaccacagttcttgcataccatcacatagtgtcggatttccttgattacgggcttcaactctggaatggaaacaacctgcgtaacataatcaagtacacgctctgcgtctgataaagattctccgcaacgagtgcaatagttgggtacctcatcaattatctcgtcaggtacggaagagcaagacaacttatgcccatcatgtcccttttgtcctcccggcttcttaccacttggcttacggagacttcttgttcttctgacaacctcatccttcatatgctccctgactggcggagtgctgctgttattagagttcttgtcagggttttcatacttggccaagcgttcccgtaagtttgtaagttccgtatctttcttgcggatttggaggttcagagcatttatgttacggttcaatttgacattctcggcatactgccggttgacagtttcacgcaacaaccgcatctcttccgtcatgtcttgtaacacttttgatatgtccgtaacttgctctttcataggtataaaggtacaaagaaaatctgaaatacgcaagaaaaatgagcatctttatagcctttatacgaagattttagaggagagaatacagactgggcaatactgctgaatagttacttttcaccattccgttctctgacatcagttacgcagcctgttatactccttcttcatgctggcagactgtctggaaatcaggcttaaacatgttggcagttaactgatgtggcgtatccacctatatatcaaatgtctttccttcctgtgagagaaaggtattggggaacacctctcttgcttcctctagcagtttctcctcattgccatagcgtgcagaataatgccccagaaggagcttgtctacagcagcatcacgggctacctgtgcagcttgctgcgacgtgctgtgccagtagagacgtgcacgatcagcatcctcggcagcgtatgtgctttcgtgatagagcgtgttgacgccttgaagcaatttatgtagggttttgatgtaccgtgtatcagaacaataggcataactgcgagcaggtgcagcaggtgttgtaagacgattgttgggaatggtatccccctctggtgtcgtccagtcagccccagccttgatgttgttgatttggctaacagggatattatagaagtcaatcatgtcacgtcgtatgtgtggcagaatttgtttttcccggaaaagatatccgcaacattcgattctatgctgtaaaggaattgtttcaaccgtcagacttctgtcttcataaacaaccttgttttgtgttgtgtctacagaatggaaaactacttcaaactccaagccctgacaaaagaagttgagcgtctgcttgagcactggctcaaacgcagcaggtgcatagatatgcaaaggagcagttcgccctgtcataccaaaggttgaaatcatgccgggcagaccaaagcaatggtcgccatgaaggtggctgatgaaaacagagataatctttgagaaatgtacgcgcaggcgacggagttgaatttgtgttccttccccacaatcaatcatgaagagcttgtccctgagttcaactacctgagaggaaggataatgctgtaaggtaggcaaggcactgccacaaccaagaatacgtactttgaaaggttccatacatgtaaaaatcaaatagccgaccacgcattgatgctcagaaaaagggagcatgaaatcttattcctctccagacagagagggattttgataaagggaaatcccctgttgtcagcaaagtgtcagcaaataaaattctgttcaatccacctcgtcttgggaaaggtatggctgtcggagaagaaacttccgccttatttccctcttgtaaatacaaagataccagctttgttctccaaggccagagagtcagcaccaagattttcaacagtgaatgtgtcttttgacagaattagtttgccattccatactttccaggcagtccaagggttcttctccgactgaagcgtagagctgaccgttccaccttcttttatctcgaagttgcggtcaaggcttgtccagttacctaataacgaagtaaggttgatagctgaacgcatgaaataatcgccatattccttatagccgataatagcaaagcggtcgccattaatcttgccacccttgacaacttcgagggtatcgtcagggtttacaaggtattcaacagtgtcgccattgtcagtaagtaggatgatagagttcataccaccatcaaccatagtaccatatatcgtactatcgtttgtagatactgagtcttcagtcccgtttatctgagacatgacagacttaggtttgctatccttgcaagagattgctacagcaagaataaacaaagacatgataaaataaaaggtctttctcatatttatattccttaatttctatagtaattttatttattgacagccttagcttgctcccacagttcatccatttcagcaagagttaagtcttttattgtaactccttttgccttagcagtttcctctatataattaaatcgtttgatgaacttctgattagtatattcaagggcgttgtcaggattcagatgatagagtcgtgctgcattgatgagagagaacaggaagtcgccaagttcttctgttgaacgttgcttatcttctttcttcaactcgttctttaactctcctaattcttcatagaccttgtcccaaacctgctctttttcttcccaatcaaagccgacatttcgcgccttgtcttgaatgcgataagccttgataaggctgggtagagagtttggcacaccagagagtaccgaggtgttaccgtcacgttcacgttgtttacgttgttcccaggtagattccacttgggaagcagtgttgggggttgatgattgtgtgttgttgatggacgattcttcatccttgtaaacgacttgtccagaagcattaacaaccatgtcagaacgtgtcacactccaacctgtccagtcgataaaatcatgtctgaacataagtttgtcggattgagcattgcagacatcagcaacgtcgaaatcttctttttcttcaccaagcaatgaatagaagataacgtgctccatcacgtcaccaagttccttacagatatcttttgagtcatttttcaagagcgcatctgccaactcaaatgtttcttcaatcgtgttgggacggaggctttcgttggtctgttttctgtcccacggacattcctttcggagtcgctcttgaatgtctaaaagtcgggcaaaagctttcagtttctcttctttagtatgcaatgtcttgatgtttaaagttaaagataaacgttaaagtactcatcagtgtactattattgatgcaaagatacactttttaggcggattttttgtacttttgcatcgcaattttaaagataataaagaaataataatatacgagacaatggaattagcaagcaagtatgatccacagattgtggaatcaaaatggtaccagtattggctggacaacaagcttttcagttctaagcctgatggccgtgagccttacaccgtggttatcccaccaccaaacgtaacgggtgtgcttcacatggggcacatgctgaacaatactattcaggatattcttgtaagacgtgcccgtatggagggcaagaatgcttgctgggttcctggtactgaccacgcaagtattgctaccgaagcaaaggtggtgaaccgactcgctgagcaaggtgtaaagaagaccgacctcacacgtgagcagttccttgaacatgcatgggattggacacacgaacatggcggcatcatcctcaagcagttgcgccgacttggttgctcatgtgattgggaccgtacagctttcactatggatgatacccgcagcgaaagcgttattaaagtattttgcgacctctataagaagggttacatctatcgtggtgtacgcatggttaactgggacccacaggcgcagaccgctctttctgatgaagaggtgatttataaggatgaacattcaaagctctatcaccttaaatattatgttgcagaagaagaccagacaaaggttgaacgtaaggatgaaggcaacgtaatgcacaaggatgagaagggctactatgctgtagtagctactactcgaccagagactatcatgggtgactcggctatgtgtatcaatccagaggatgttaagaatacatggctgaaaggtcttcgtgtcgtagttccattggtaaaccgtgtgattccagtagttgaagactcatacgttgatatccaattcggtactggttgtttgaaggtaactcctgctcacgacgtaaacgaccatgcgcttggtttgaagcacggcttagagacgattgatatctttaatgataacggtactatctctgaagcagctggcatctatgttggtcaggaccgtatggatgtacgtaagcagatctcaaaggacttggaagctgcaggcttgatggagaaggttgaggactatgataataaggtgggttactctgagcgtacacacgttcctatcgagccaaagctctctactcaatggttcttgaaaatgcagcactttgctgacattgctcttcctcctgttatggatgatgatattgagttctatccaaagaaatataagaacacttaccgtcactggttagagaacatcaaggactggtgtatcagccgtcagttgtggtggggtcatcgcattcctgcgtattacttcaaggatgctgagggaaagaatgctaccgttgtagctgaaactactgaggaagcattgaagttggcacaagaaatcaatccttctgttgcagctgccgaccttgagcaggagagtgattgtatggacacttggttctcaagttggttgtggcctatctctgtgttcgatggtatcaataaccctgacaacgaagagattaactactactaccctaccagcgacctcgttacaggtccagatattatcttcttctgggtagcacgtatgattatggcaggctatgagtatcgtggcaagttcccattcaagcatgtctatttcacaggtattgtacgtgataagctcggtcgtaagatgagtaagagtcttggtaactcaccagacccgatcatgcttatcgagaagtatggtgctgacggtgtccgtatgggtatgatgctctctgcacctgcaggtaatgatatcctcttcgatgagacactttgtgagcagggacgtaacttcaacaataagatttggaatgctttccgcctcgttcagggttgggatacaactgatgcagagcagccattggcaagtaagattgctgttgaatggttcgatgctaagttgaaggaagtgaatgcagagatgaacgagcagttcaagagctatcgtatatcagaggctttgatgacagtttaccgcctcttctgggacgagttctcaagttggtacttggagatgattaagccagaatatggtaagccaatcgataagcagacttacgaagcaacgctgaagttcttcaatgcactgttaaagatgctccacccattcatgcctttcattacagaggagttgtggcagcacatctacacccgtaaagacagcgagagtattatgcgtgatgaactcaagctcgatgctccaagcaaggatgagttgactcttatcgaagcaattgagcaggttaaggcgattgtcagcggcgtaagaaccgtacgtaaccagaagaacattgctccaaaggttgaactcgacttgaacgtaatcggtcagaacaactatgaggcttataacagtgtaatcatcaagatggctaacttgaaggctattgaagtggtaacagagaagagcggtgacgcatctggtttcatggttggcaccgacagtttcgctgttccagtgggcgacttgattgatgttacggctgagattgagaagcaagagaaggaactcaagcaccttgaaggcttcctcgcaggtataaagaagaaactttcaaacgagaacttcgtggcaaatgcccctgcagctgttatcaagcgtgagcgtaagaagcagagcgactctgaggagaagattgctactttgaaagcaagtcttgctgaattgaaaagcaaataagaaatccaagtagaggattatagaataagagtaggaagaagactatcaggttttcttcctacttttttgtaccattgcttaggaatcaacagacagctaatactgacaatatgggttatttcaccttgataccactgcttctgaaatgactttcgtcttgaatgtaatattcatgacagcatcaatcttcatcgtgtgctgtctgaaaaaggaaagtacagtgtgtggcttatgcaaaataaattcattgggcttgaacgccattgatgattgcttgcatccaaactaagcactaattaaccttcaagtaagcatctattggatgacaattagtgcttaattaggattcttccgttaaatgcatagattgcatctataaaggcttatacacttgcatggtatgactatcccaaaatagatggtcttacaaaggggaacaagttacaagatgttatgtagaaaagacaaataaaaaattttgtctatctactaacaagttttccgtcatctataacctatccccatactaaccgatgtttgtaaactattttcgtgcggctcaaaaccaacacatgctcatttggctttgaaaagacgcccaattgacttgcaatagatgcccttttgagaccttagtaacgcccttttgaagtctaattaagcaccttttcttgcacgactttataaccaactgatttactgctggttgcaaacttgctttttacacgtgtttttacctttatctgtagatgttttatccgaaattatgtcatgatttttcaatatcttatctgcaagttctcgaagcgttaacatgaaaaggttttctgtgtcggaggatgataataaagtagacagccaagaccgtcttgactatttttttgtttaatgaacaacttcggttcttccgttaaagctatacgaaaagtgtacacgcatttaacggataaaccttaattagagcccaaatagccaccttattcttgtgctacgttgtaatcatttgattaactgtgtattgtacgccttctaaataaatgtgttttatgcatatttccatactaacaacgcacttgtttctgcaaggatatttcgcacatcattgtgatagggagaatgtagtcgtatggaaacacagaaatgcaagttgtaaggagtaacaacggcttacttatatcgagaaggaacattgctaacagacgcttgacaggtgattgttatatttctttcttagtctttaggaaatattgacaatatactttggtgattaaaaagattaatagtatctttggcactataaaacaaaaaaagagcgagttgccccgctctgtttgttttcacaacggaataatccttattgtgacttgcttgaaaaaatcttctgcaaatatagaaagaaaataactaagaaccaaacaaaacaagaaaaaaatgaaaacaattcttggattagacttgggaaccaatagtattggttgggctaaagtctgcgttgacaacgacggaaactacctgcgtgacattaaacttggtagtcgtatcatcccaatgagtcaggacacgcttggcaattttgacaagggagtgacagattctccgacggctgcacggacaggattccgaggtgtaagaagaatcagagaacgtgcactgcaaagacgcgaacgcttacacagagtgttacatgtaatgaagtttcttcctccacactatgaaaatgccattggatggaatcgagaagaagccacaacgtatggcaagtttcttaatcatggagagcctaagttggcttgggagaaacaggaggatggctctatgcgtttcctctttatggattctttccatgagatgatggctgactttgctgaatctcaaccaggactggttgctggcggaaaaaagattcctttggactggacactttattatctgcgtaagaaggcacttacacaagctatcagaaaagaagaattagcttggatactgctcaatttcaaccaaaaacgcggctactaccagttgcgtggagaggaagacgaagagaatccagctaaacgtgaggaatatcatgaactgaaggttgtcagcgtggaggctgccgaggaaggaaaaggtggtaacacgtggtataatgttacattagagaacggctggatatatcgtcgacagagcaaggtagaactgcatgactgggttgggaaaaccagacagtttattgtaactacagaatatgaaaaagatggagttaccatcaaaaaggataaaaacggagaagtcaaacgttcgttccgagcaccaagtgaagatgattggggactgcgtaagaaacgaacagaaagtctcttagaggattctggcaagactgttggagcttttatctacgaccatatactctcggaacctactgacaaaatcagaggtaactttatccgtactattgaaagaaagtactacaagaaagaactggaagctatcctgctcgaacaaacaaaacatcataaggagctaaaggatcaaaatacgctaattgcctgtatcaaagaactatatcaaagcaacaagcctcatcaagacagtttgatgaaaaaggatatgacctatcttttgattacagacttaattttctaccaaagacctctaaagagcaagaagtctctgatagcagactgcccatacgagtattatgaatatactataaaggagacgggagaaatcaagcggcaaggtatcaaatgtatcgcaaaatcaaatccttattatcaggagttccgtttatggcaatttatcatcaaccttcgtctttttgacaggacagatgataaagaagtcacctctgagtatttgtcttctatggaagactacaccaagctgtttacatatctcaacgacagaaaagacattaatcaagagaccctattaaaagacttcttcaaacagaagaaagtcaaaatgggtatggaaaaggaatttcctattcgttggaactatattgaagacaaagaaaagaagtatccttgtaacgaaacacgtcacgaactgcttgctgcattagacaaggctggcatagaccatagttggttagatgataaagaacgattctaccggctttggcatcttctctattccgtagagtccaaggaagaagcagaaggagctttgagaaaacttaaagataatgatgactttgtaaacgctttcttaaaagtaaagccatttaagaaagactatggtgcttattccgagaaagccgtaaagaagctgctggctataatgcgtatgggaggtctatggaatgagactgatatttgtgaacaaacaagaaataggattcaaagcatcataaaaggggaaattgatgagaagataaaagaacggatgggtcgcactttctgtcaattatccgacttccaggggcttcctgaatggttagcatgttatgttgtatatggcagacactccgaagctacagatatacaacgatggacaaagccagaaaacctgatggcgtatatcaatggtttcaagcaacattcacttcgtaatcctatcgtcgagcagtgtatccttgagaccctcagaacagttcatgatatatggaaagaagcaggacatattgatgagattcatgtagagttaggcaggagtatgaagagtacagctgaccagcgtgcacgcatgtctaaaagtattttgcaaaatgagaataccaacctgcgtatcaagagcctcttgatggaactgaagaatgcaaaagaaatcgagaatgtacgcccctattcaccaatgcaacaggaaatcctaagaatatatgaggagggagccttgcaggaattaacgaaagaagatgcccaatatccagagatatctaagatttcacaaatggcacaaccttctgccaaagaattacttaaatatagactttggctggagcagaagtattgttcaccatatactggcaagcctatttccctgtcaaaactattcacatcagcttatcaaatagaacatattatcccacagagccgttactttgatgattcattcacgaataaagtaatctgtgagaccgaggtaaatcaactcaagagtaatatgttaggctatgaattcatcaagaagcatagtggcgagattgtgcattgtacgactataggtgacgtaaagatacttgacgcaaaggaatattataacttcgtaacagagcattatgccaataacaggcgtaaaaaagagaaactcttgttggaagatataccgcaggaattcctcaatcgtcagatgaatgatagtcgatatatcagcaagaaagtgatggcaatcctttctaatatcgtacgtgaagaagatgagcaagaaactaactctaagtttgtagtttcatgttctggtggcataacagaccgtctgaaacaggattggggactgaatgatgtatggaacagcattgtttaccctcgttttgaacgcctcaataaactcacccagacagaagcctttggacgctgggagaacaaagaaggaaaacaggttttccagacatcgctacccttagaactccagagaggcttcagcaagaaacgtatagaccatcgccatcatgctatggacgcactcgttatagcctgtgcatcacgtaatattatcaattacctcaacaacgagtctgctaaaagtcaagagcagagggaggacttacgaaagaaactttgcgacaagaatcgtattatacgtaaaccttgggaaaccttcactcaggatgctcgcactgctcttgaggatgtagtagttagttttaagaattatgtccgtgttatcaacaaagcaacaaactattatgagaaatatgatgagagtggcaagaaaggaatggcagaacagaaagggcaagatatgtgggctattagaaaacctatgcacaaagagactgtgtttgggcaagtcaacctccgacgcaaagttactgttaaactgaaagatgcacttgagaatattcctgctatctgcgacaaggcactacgtgactatgtcaatgatttaatagcgaaaaagttcaatacgaaacaaatgctagcacacttcaaaagtatcaattatcggctaaatatgaaatctgtcaataaggttggcatttgggttttcagtgacgagaaagaaccgatggttgctactcgcaaggctatcgacatttcatttgatgctaaacgcattgatacaattaccgatacaggaatacaacagattctctgcaaatacctgaagtcaaaaggcaatgatcccaatgttgcttttactccagaaggaatagcagaaatgaataagcatatcattgattataacaatggtaagcaacatcaacctattctgaaagtaagagtttcagaacctaagggggctaaataccaagtgggagaaactggtaataaaacaaagaagttcgttgaggctcaaaaaggaacgaatctttactttgcaatctatgaagacaaagacggtaatcgatcttacaacaccattccattaaatgaggttgcagaacgattgaagcaaggtctatcacctgtgccagagaagaacgaaaaggggatttcattgaaattttatctttcacctaatgatttggtttatgttccaacagaagaagaaaagctatcaaatgaatgcaaactcagcaaagaacgaatttataagatggttagttcgactagtaacgaatgtcatttcataccttacactactgcaaaacccatatatgataaatttgagtacgaggctaaaaataaaatggggcgtgccttaactggcgaaatgataaaagctgtctgttggaaacttgaagtagaccggttaggcaacattcttaagattataaagtaaaatccttttgcttatgataaagaaaaccctatgcttcagcaatccaatctatttaagtttgcgaaatgcacaattagttttgcacttacctgaagttgaaagtaataaaacattgcctgaagctatgaaaaaagaagcagaacgtaccatcccgatagaagatatcggggtggtaattctcgacaacaggcgtattaccataacctctggagtaatggaggctttgcttgagaacaactgtgccgttatcacttgtaacccaaaaagcatgcccatagggctacttcttcctctaagtgggaacaccatacaaaacgaacgcttccgctcacagttagaggcttctctacctttacgaaaacaactctggcaacagactataaaacaaaagattctcaatcaagaacatacattgcgcataaacactgataaagaaaccaactgtatgcgtgtatggtctaatgacgtacgcagtggagaccctgacaatcttgaagcaagagcagccgcctactattggaagaatctctttacagaatatccaaactttgtaagagaccgggaaggaattcctcccaataatctcttaaactatggctatgctatacttcgagccataatagcccgagcattggtaggaagtggattactacctactttaggtatccatcatcataacaggtataacgcctattgccttgctgatgacattatggaaccttatcgcccttatgtagtcgttccttaaaaagcccattttgtcgaaaagtcaaccaaaactgacttttcgatgatagtttttgtaaagcacaaaagagctctcatagctcttctgaagttatatgctgcagctgccagcattatattcatagcatcccctttcacacctttataaaagttgcgagataatctgtaatcacttttaagatgtcctatggtaggctctattcctgcccgcttgcaaaacagtttgtgtttctttttcttttgatagtaactatctttgtctttaggggcttgtggtatgagtatttttgttgttccaaccagatctgttcctctatatcctctgtctcctgccaagttatcaatgcgcttgcctgtcattctttcggtttgttgtaaggatgcttctatggtatgcccatcatattcattcctaaaagaaacggcagcaagaataattcctgatagcgaacggataaaggaagctttgttgccaaactcatacttcttatgttccttacccttactgatgcattgtacttcaggctcgtgaagagaatatatcttattacgactgttacgtttttgagaaaggaccttatagaagagctcaaacatcttttcatagcctttcctgtcaggaagattacggtcaggttctctgaccaaacgaccggctatggtgcgcagactccggtcagccttgacagccttcctgtgactcctggggtgattgcgaaaacgttggttgcgagagattgctttcagtgtcctttggtagctctgacgtaaaggaagtttcttctcacgaacgattttgagcactcgattgattatctttttatgcaacttcgcatccgttgggtaagtgatattcttctcctgtaccgtagaatctataaaagctgtgttaaaatgatcctcattatcattctcagtattgacacggatgctctcagcaagaatgacttcaattccttcttcgcctatacgattgcggaagtgaaccaaatcagaagcttcgcaaggttctttaggaagaaactccagttgaccacagaaatactgataataagcattttcactccactgtaaaacaacactttcgtcagagatattacgcaagtgtttcaagattaaaagtccgcacatcaaacgaataggatgcgcagggcgaccatttgtactacaatacaaacgagagaaggagttttcaaatctacgccagttgattttattaccaagcgtataaagggggtgattgtgattgagcatatcctctaaggaagagaataatgataattgattagaggtcctttttaacatatatttctgcaagttttatactgtaaaggtacaaaaacttgcagaaatatacaaataaatagagagataattaactgtaaatcagtataatataatgtatttaaggaacgactaaatagcgacggtggatgtcttttattatatcaggacgtgtaaggttcaacatgtcattgttaccttgataattgagcatctgcaaaagttcaaggttgccacggaaatccttctccgtcaagtcatatccttgaatcatggtacccattgcaccatccagaatcagaatcctctcttttatgttatcccttaacctcatctttcatcttttaataatgttttcttgcccgatccatttcccgccggtcttccttttccttcagcgtctgccgtttgtcatattccttcttaccccttgccaatgcaatatcaacctttgcgcgcccattctcatctataaagataagcgtggggataatagtgtagcctggagtcttcgactcagcttcaagattgcgtatctcttttcttgttaacaggagcttacggggacgtttggcttcatggttggcgtaagagccatagaaataaggagatatattcatcccctgcacccacatttcacctttatttatataacagtaagaatcaaccaatgaagccttaccggcacggattgacttaatctcggtaccagtaagaacaattcctgccgtaaatgtatcgacaaagaaatactcaaatgaggctttcttgttccttatctgtacaggtgatttcttccgtctttcttgttgttccttattcattcttcaattgttgcgaaatactcaatatggtcatcaatataagctgctatcatttctgtccaacgctcctcattaaccacaaattcatcatcaaactcatcaaactcaggcatctgctcgtataaagccatgaaatcttcatcagattctactgcttcaatcgcctcatgatacttttcgtaatacttctttccatgacggatatgtgtgtatagttcacgaacgccccagttacgcatagcaactgcaaaaggattcttgaagataaatgctccataaccattgtatatcagttggacatacccaccatccatcacttcctgatgaagatagctccatgccagtaacgttatctggtcagcactgagctgctgcattgtttccaaagccagtttaccatctattgctttatcaatagcatcaatgaagacctggacaaagctatccattccttcttcaacggctttgcgtatatcgctatcttttactttgacttctatcattgccatatcattttattatctatatgtgagattatgaacgaactggcaaagaaaatttgttttctatttgccgaacgcagcttattttctacaaaaataatgcaagtgagagcaaagaaaacttgttttctatttgccgaacgtagcttattttctgcaaagataacttttttttctcgataaagtctttttgatacattatttctttcgcataagcctgaaggcagaactataaagagaaagcaataagatgattctttcaacggcatccctcattaattcatattgaattcagggaaagataccatacggttgtacatgaaaaatacttacataactttaaaggtttattgctaaaaaagcgattaaaaaaggggttctgctggatttagtgtgaattaacttatgtctagcccaccgtagaaaaatagaatagcaatcctgtatctctcggcagttccatatcctctgccgatggtctttatctcttgaatggagccgttggttctttcggctttgccgttatttgcacctgtgaccatggctctgacaatgcctttaaggtgtctcttgaacatgaagaccaccccgttgatttcctctatgttgtaccgcaatgcatcatccatccggcgcagcaacattccgtaagtttccatgtcaccatggtacttgagatgtaggaggtcacgaaagagttctttgactttccaagcctgcgaaacctcatattccgcatcttcaagcttgttgaaacgagcctggtcgttggtggtatatttggactggtcctttaaccacaaatatttggtgtgtctcagttccgggaagtgcctgacctcacgtttgcgaactttgtcaacggcgtcgttcagataggtgacacagtggtacatgtcgtggcagtggctggcgttagggaagtacttcttcgctccgtcaatgaaggcgtcccacatgtccgtgcatacggtcttcacacctgccctctgctcttcagtgagagccttggagcacagattctcaacacttttcctggtgcgcccggtctctacttcgatgacatttcctgtatctccgtcatagagcatactcacatactcatgcccccgtcggattgacttctcatccatacagacatgctcatggatgtgcctgtcgtcacgccgattcaatccccgttcaacagctcgctgcatcactccatgcacttggtcaaaggacaggcgaagaagacgtgcagtctttgtctgattcttggtggacagtaacgtttctaccgtttttttccatcaaccaagacagccgggagttcggcattgcccacggaacggggacgctcttgatcccatctccatcccggtatcgggggactcgggcttcaagaatcgtcttgtactgccacatgtccaagtgcctccaactccgttcgtggcggaagtcaaatatagggaattccttcccatcaacatggatggtgtcatggcgatatttgagggtgatgtgtatctcatcagcggagtcatcacatgtcacacgatcgatttcccagtcatcattgttttggaggagcagcttggtcaagatgtcttctggtctcttcataatgaccacaaagatacgaattccgcgctgttttatgcaagagacggcatgttaattcacactaaatccagcagaaccaattttatagacaagtcagaaggtacaactttttcatttaatgatacaactgatagtaagaaatatttttattcccgtgtggcgatagactactttagagagaaacaaggtacatttgcaaaacgaaatgaatatattttagtcagtgaggtgtataagttacttgataaaatggttgatgcagaaataaagaatcctgatttaatccttaatggaccattctatgattgttctgaaacaaatcaaatgcccagcacggataatggatttactagcacatactatctggatacattttatagacgaaagggacttactggtaatggaccagtatcagttcatatctttattatgcagaattatgataagatggtaaaaatgatgatttcgtatcatgacaaagattcactcacttttaataacctcttccagtctataaaaacctttaaatggaatgagtaaacagagattttaatcaaaatctaaacaagttgttagaaaaatatttttgttttctatattggttagttttatgttactatgaatagttttctttatcatagtagacacaataggcataaaatcttttaaagatatttgtttgtatgttaaataataaatcatgatggtaatacttaaagaaattgagttctgtgaacacaagggctatatgcgacatcataaatatggttctgctggatttagtgtgaattaacatgccgtttcttgcataaaacagtgcggatttcgtatctttgtggtcattatgaagagaccagaagacatcttagccaagctgctcctccaaaacaatgatgacagggaaatcgatcgtgtgacatgtgatgactccgctgatgagatacacatcaccctcaaatatcgccatgacaccatccatgttaatgggaaggaattccctatatttgacttccgtcacgaacggagttggaggcacttggacatgtggcagtacaagacgattcttgaagcccgagtcccccgataccgggatggagatgggatcaagagcgtccccgttccgtgggcaatgccgaactcccggctgtcttggttgatggaaaaaaaacggtagaaacattactgtccaccaagaatcagacaaagactgcacgtcttcttcgcctgtcctttgaccaagtgcatggagtgatgcaacgggctgttgaacggggattgaatcggcgtgacgacaggcacatccatgagcatgtctgtatggatgagaagtcaatccgacgggggcatgagtatgtgagtatgctctatgacggagatacaggaaatgtcatcgaagtagagggcgggcgcaccaggaaaagtgttgagaatctgtgctccaaggctctcactgaagagcaaagggcaggtgtgaagaccgtatgcacggacatgtgggacgccttcattgacggagcgaagaagtacttccctaacgccagccactgccacgacatgtaccactgtgtcacctatctgaacgacgccgttgacaaagttcgcaaacgtgaggtcaggcacttcccggaactgagacacaccaaatatttgtggttaaaggaccagtccaaatataccaccaacgaccaggctcgtttcaacaagcttgaagatgcggaatatgaggtttcgcaggcttggaaagtcaaagaactctttcgtgacctcctacatctcaagtaccatggtgacatggaagcttacggaatgttgctgcgccggatggatgatgcattgcagtacaacatagaggaaatcaacggggtggtcttcatgttcaagagacaccttaaaggcattgtcagagccatggtcacaggtgcaaataacggcaaagccgaaagaaccaacggctccattcaagagataaagaccatcggcagaggatatggaactgccgagaggtacaggattgctattctatttttctacggtgggctagacataagttaattcacactaaatccagcagaacctaaaataaaaatgatattcgcagaaaaagaggatagtgaagagttatatacattttactcaactattgaagtacagtattgtacaaaagaagaattagaaaatggtagtttgtcagactctttgatagaaaagaaaaaagcttttgcagaaaaacaaataggtaaagcatttgaaattaatctttataagtttactgtaagagagctgacaaacgataggtatattgccttcagggtttcagaatctcgtgactattatgatttggacgttcaaattgatgactattttatagcttcttatatgactaagcaagatgtgataatgggaattaagtattccattacaatgaaaggactaaaagggcttgcatctggcgttctacaagattattcaacagaaaaaataacggaagagttattcttttccaagccaatccctgaaaaaccccactttgatatcccttataacaaatattcgaatctgacagatagttatataattaacgaagttgctatagaagacgtacgtaaaggctgtaatctcgcatatctaatagaagatagagaaatctcacattatgaatttgatatgtatattcaacagatagaggattatcgcttaagagtaagaaaaactaaggatagaaatgaatctttaagaaagaaatttttcttttgggaacctaaagaaattgttgaagaattagaattaaattcagaagttattgtattatttagagactgcattattcttggcaaaagtaatcctaccgaatgtatcaaagcagattttgcatatatggaagaatgtgagaaaaggctaaagaaacgctatatgggtgaagatatggttaaaatagaactccgagatgattggaaggagtttatactagcacttggaaagaaatataagggaaaaaaggtgataaaacctgttataaaaaatgatatttaatgtctaaggattagtcaacgttcaacagtgtcatattgctttccgttagggtttaacctcggtcgtcaggatgtgatttataattgcgtttcgttgacgagaagcctacggaatcgcaaagttacatgttcttgaaacgttttccaaattttatacttaactgttgaactgttagttcatagtttggcaatggctttgtccatttctttcgaatattgcaataggcaagatatactagtttgtgtagtgcatgatctgtcggggagagtctttttgtctttaggatagaaactttaacccaaatcattaaaccacaatgttccaaaactcttaattttgtattgtttcctagcatctattattttcttttcggcaccttgtctgtcttcatgacttggcgtagcccgctacgcctgtgttacaaaaacagtcaatctgttcgacaatgaaaaaatcttttagactctaatgacggatttgggtttatttctgatgtaagacctcaattccgcagcgtttttccttgtgaggcgattttatgtgttgagatgtctttttcggctctatgtgttgttatgaggatttttcggggcttcctgggtcttgccgaagcatggaatcccccacccaaaccaatgggggatatgagaaccacaaaaaaaatgctgcttgttcaaggaatacttcagaatagtatgttttgtttgtatacaggttcagaacgttccgccttcctgttcgcacccattttgccggcacgctgacaaaatgcaggataaaggctttcagcctgcttgtctttttcaaaggcttgaccttttcgctgatatggcggacgagatagaagttcttcagtatggcagtaaccatcatgaaagccatgttctcagccatgagggaaaagggcatatatttcagttattcacattggtgtttccgtcacggttctcacctccgactatgatgcccccgatggaagcccagcccgggaaataaccatggtcctgcctgtaggaatactttgcatcgaacttgtgggcaggaacaaactggtggtaaaagtccaggtcaacatgactgcccgcctttataaggctctcccgttaaatacgtagataggaaacagaacaaaggcttatacacctgtctggtatgactatccaaaaatagacggtctcacaaaaagggatagagcacaaaataaaaatgcagaaaaggcaaacagataccgtgtctttccgtcttctacaaacaacttattcccatatcaatcaatgtttgtaaactattttcatgcagttcaagaccaatacatggtctcttggcttctaaaagacgcccaattgacttgcaaaagacgcccttttgaggtctaactgacgcccttttgaagtccaattaagcaccttttttgcactaccttataactgattgatttactgctggttgcaaacttgctttttacacgtatttttatctttatctgttgatattttatccgaaattatgtcatgatttttcaatcccttgtctgcattttcaaagtatttacatgaaaaggttttctgcatcggaggatgataataaagtaggtagacaaggcggtcttggctatgtttttatttaatgcataacttcagcttcttccgttaaagctatacgaaaaacatccacgcttttaatggaagaaccctttataagccccattctccgtatcatccgtaaaagtaaggtgttcagcttctctgcagtgttgaaactataagacctgccggaggtttcgctcttatagacaatattctcttcggcaagctccttcagtccgcgccccacggtgtcggcaccgggtaacagcgtaccaggtctctgcttgaactgcccaataagcgcattgatgtcctcaaggcaatccccaccacaaaggtagctgaagaagagagagcctggaatgcttccatggctgaatgccttgccgctgcatccgcgtctgcccaacacggattcggt

SEQ ID NO: 625 - DNA, 24443 bp, synthetic construct
  source 1..24443: mol_type = other DNA
  misc_feature 1..24443: note = Synthetic
gaatagacatacgcaccttcgttgatcttgggtatggttatgcaaaagatagatataacgtttattttgaaggacagattcttccattcgttgacccaatgaccttccgtcttaaggtaccaggaagtgtttaccaaggtggctatccaggcgattattctgacgactatccagttaatccgcgtgatgggtacgacccttattataatgaaggttacgtcgttacttctaatgcagttctttacaatggcagaaagattagcgccagcgcaagaagcttcaaggacttaggatggggttatgggaaggatgccttcgatgtctattatatgggtgacaaggtaagtggcgccagcagttccagcttcaaagtactcaaagatggctatgcagaagatgcatttgacacctattatcgtggaaaagtagtaagataatgattcaattatgatagatcagatactttcttataacaaaaggtttgtggctgaaaaaggctacgaaccttttattacatctgggcaaccagatatgaagttagctattgtcagctgcatggacacccgtttgacgaggttgctacccaatgcactcggcttaagaaatggtgatgcaaagattattaaggttgctggcggaaccattcttaccccctacgactctgtaatgcgctcccttcttgtggctatctatgagttgggttgtcaagaggttatgattatccatcactctggttgtggtgcttgcaacatgaatgccgatcattttcttcacctaatgcgcgagcgtggaatcacggacgaagctatcaaagaggctgagcagcagattaatctaaacgaatatttggacggttttcatgatacagaggcaagcgtacgtcgtacggtgagcactgttcagcaacacccactcgtaccaaaagacattattgtacgtggctttatcatagactcacgtacaggcgaactaacacccgtcgactaacaaagcatcaaaatagctgagacccttgttgataatcgcatatcacacaagggtctcatcaattacatacttgacatttagatgtcactgagaattctcccagctgcttgtagattaagataacgtttacatagttagttttaatgtcatctccgacattctgatgcaaaggtaaatatttctgttagaacaaccaaaaattatcctatttttgttatattttagtaaaaatattacatcagaacctctttaattcttaaatttctacataaaatacaataattattcattctatgtataaataaactcttttcgtcatttgagtatcctatttaattacatcttacactgaaatatgtaatactcattattctctattatttaagaaggaaatatagtctaagaaaaaatacacatattagttacccattagccacttacgaaccttcctaataataaccacaacgcctctctgtgcttatttttaagccacgtgatagtagtccgcacatgtcgtgctgatgctccgcacatatggtgctaatggtaagcaccattggtgcgaagtactaaataccatgcaatttattaccgatgtggaacaaacttattgttagaagcaagcatgggtaaccatccacacatttaagtaaagaaccagaaaaaactgggacacacaaaatattgtgcatcccagcaatataaaccatcaaagaatactatactttacacctatatatattctacttcgagcctaaggagaatttaacaggtaacgtatactttgtagcaaccttcttattaccatttctacctggattccacgctggcatctttgacactacacgaagggcttccttatcaagagaaggactaacagaacgtacaatctctggctgaataacctcacccttagccgttatgataaactgtaccataacacgtccttgctcttttctacttactgcatctttcggataacgaagattctttgatagccattgatataaattacctttaaatgtaggcatgacttctgtaactataaatactcgttcagactctttcgttggcttcttttgaagttcaacacttgccgtaagctttgttacattacgtgcaatagtctcgatattacttaccgccaatagcattgcaaccaatggaatataaagcgcatacttagcttttaaaattccctttgtttcttttttgttcatcatcttgattcgttttttaataggtaaaacattaaaattatttgatattgtagctacattcttcctatatgttagtccaagcagatggtactgatactctttattatccttaccattagcaagtacgctgttatcagcaagatattcaagatttaatcgcacttcacgtttgagcaaccaaacaaaaggattaaaccaaaagataatacaaaatagttctgaaaagattatgtctattgagtggagttgctggcaatgtgtcaattcatgcatcattatctcctctatctcatcgctcttatgccgctctgggttgatgaatatccaatcaaagaaggagaaaggaccttcgtcatcggttaacagataaacttctgtatcacatatataagaactttgactattgttctttagcaatataatagaaaccaactgccacaaaaaacgtagtagtaagacacaggcaacaacactatagacaatcaacactatcaattcccatagtaggacttcaccaccctgcgaggaagtagacacagctggtaaaacgactgttgcatattcattggcaatggatgtcatcccttcgctgttgcttagccatactgaaaaatccattactggtaccaatatggcaacaagatacattccgataagcgtagccctacgccatgaaaagaaggtatctcctgtgaacatcaatttataaaagctgaaaagtaaaataagggcaatatttaatttcaataaatacattatcataatcgtcaaaacgttaagttattgttgttagagaaaagaaaaaatacgtatttatcggctaatcctctttccccttttcaatctcatttataatatctttcagttcttctggcgagatattatcctcctttgcaaaaaaggaaaccatttcacggaaggaactcttaaagtacttatcaacgaagcctttcatgaagtctgacttatacttcgtctgttctatcctcggaacaaagtgataagtcaatccatgctgctcggcgattacataacccttgcgcttcagattgttcatgattgaagccactgtagtataaggaggtttaggatcttccaacttttgcagtacatctttgatagtgcaagtttttaaactccatacctgcaacattatttcttcttcttgtttagttagtttctccataaattatatatctaaaagttcacgccacaaagctacgaataattcgtaacaaagtcaagcattagatagtaaaataaagttaattagatgatattttgtattatatttcaatgcaatacgaaatattagtaataacacatgataagtaaaatgtcagcttttacattaggtttaccctgtaaataataaagttgttcctttggaattatcaccctctattaataagaaagttatcgtttttattcaacatctcttgtctttatgcttgtaaaagtgtacatttgtacttacatattaagcgtaaaacaaaatgattaaaaaactatataccttccttgtcgtggctgcctttacgttgagtgcctgtaataaagggtcacaagataaaccgaaagcagacagtcatgacattaaaactatcccgacagagataactgacaatggcgatcaggctgtaaagaatgcaaacaaaagggatgctggctttatcagtaacagagcaaacgaggttacactcacgattccttgtttgggagttgtcaatatggatgcccttgacctacttccgcctcctaatgagataagcaagaaggattctaccatcattaaacaactaaataatggagaggtattcttattacaaccaggaactaaaggtatcatgctaacggacgcaggatcaaagctattagttcgcttccaaatgggcgaattatgggtttggaagtcggctacaaaatgagtacgaccgttctatcggtcctcgatagaaatcctttactacttcctatcattagctaagcctaactatcaggctaactattaacctaaaatatacaaataaatcaccttatcaaaagatgaaaagaagcctttttcttgttttcttattgctgacatttatagctcatctatatgctatcacagtaaacaaccctgttgattacgtaagtactttagtgggttcagcctcaaaaccagaactttcaacgggtaacacctaccccgctattgccctaccatggggcatgaacttctggactccacagactggaaagatgggagatggctggacttacacctacggagccgataagattcgtggaattaagcagacacaccaaccaagtccatggattaacgactacggacagttctctgtcatgcccggcgtaggtaagaaagtctttgacgaggaaggacgtgccagctggttctcacacaaagctgagactgctactccttattactataaggtttatttagctgaccacgacgtcactgcagaggtgagtcctaccagtcgtgcagctgcaatgcgcatcacctatccacaaacagaagaagcttatttcgttgtagatgcctttgacaaaggttcttccgtaacgattatgcctgacaaacgtactatcataggctatacaaccaagaatagcggaggtgtaccagcaaacttcaagaactattttgtactgcgtttcgaccatgatttctctttcgttggcagtattgaagatgggaaactatcagagggcaagacttctgcaaccagcaatcacgccatggctgttgtcggattccgcaccaaacgaggcgaacgagttaatatacaagtagcctcatcatttattagtaacgaacaagcacagcgcaatctcaaggaagttgagggcaagacattcgacgaggtgaaggcagaaggtagaaaagaatggaacaatatcttaggacgtatcgaggtggaagacgataatatcgaccatcttcgcactttctatagttgcctctatcgctcagtacttttcccacgttcgttctatgagtttgacgaacagggtaatcctatccattatagtccttataatgggaaagtactatcgggctatctctttaccgacacaggtttctgggacactttccgctcgctctttccattgctcaacctcgtctatccttcaatgaatgagaagatgcaggcgggcttagtcaatgcctataaggagagtggattccttccagagtgggcaagtccggggcatcgtgattgtatggtgggcaacaactcggcttcggtcgttgctgatgcttacatcaagggattgcgtggctacgatatagaaacactttggaaggctgttgtgcatggtgcaaatgctgttcacccaacggtcagctctactgggcgcaaaggcgttgactattataatcgcttaggttacgtaccctataacgtgggaatcaacgagagtgttgcccgtaccttagagtatgcctacgatgactggtgtatctatcagttaggactaaaactcggaaagagtactaaagagctcaaaccttttaaactccgagcaatgaactatcaaaacgttttcgacaaggaaacggggctgatgcgtggacgtaatgaggatggtagcttccaatcgccatttaatcctttcaaatggggtgatgccttcacggaaggaaacagttggcattacacgtggagtgtattccatgaccctgcaggattagcaaagctgatgggaggatacgataagtttaatgcaatgttagacagtgtcttccaactcccacctacctttgaccacagctattatggctttacaattcacgagatacgtgagatgcaaatcatgaatatgggtaattacgcacatggtaaccaacctatccagcacatgatttacctttacgactacagcggacagccttggaaggcacagtattgggtgcgtgaggtgatggaccgactctatactgcacagcctgatggctattgtggcgacgaagataatggtcagacatcagcttggtatgtcttctctgctctcggcttctaccctgtttgtcctggcagtacacaatatatgattggtactccttactttcgtaaagtcaagatacagttggagaatggtaagactgtcacaattcgggctgaaaagaataacaaagacaatcgcttcattcagcatattacaatgaatgagcagccttatccacattattatcttgagcatgaacagctaacatcaggtcctataatcgacttcacaatgggcgataaacctacgaaataagaagctaccccatcccttttgcactcagttaacagattttgtttctatttgaacaaatctgttaattaagaggctgtctgttaatgaattctataaaatcatttaaagcggtataaacacttccctgctattataatttctttacgtatatttgcaacatattaatccaaaaatgaatatataacaatgaagaaaaactttttttctaaccacgctttatgtgctggtttagtattaggtggactgtttacattttccagttcatacgctgcaaacaatgaagtaaaggataataacaacgtagtagctgctgcacctacaaccaactctcagattgtgggtacttgggagcttacaaataagggtagctatgccattgtgcgcaatccaagaacacataaggaatataaggtaggtttcacgattgacagatacgatgactataagttcctccctgttgacttcgctacaggcgaaccagttaatcttcgtacgcttgttggtcacgatgataacgacctcgatgatgagttgcaccgtttcgatttctaccatgatggaaccatgagcgttatagaaagagaagacaacggcagatggaagcgtgatgacgatatcggtgtttatggtttccgccgtaatggtttctttatgaaaatagacggtaagatgcgtaagaacctccaaattagattcttgaacaacaatgagtttgagctaactcagaccaaattcaatgacagcgacttgagaagagtagtcgttaagaaggttatgagatatgttcgtgttacaaggaagtaagacataacaaacacaaacttataatatacaccccaattaacagttgcttgaacttatataaagctctgttaattgggatttcttcttttgtgcttcaagataaggaatgataaagtaaacccctattacataacaaatcacacggagaataaagtggacagtgctaaaaataacacccgagaacacctctgttagctacatatttttagtctaaaagccaaagaaatatattgacaaaacatttaaagaaaaggtaggaaaatggattaaaagtgactcatttcttcacctttgtaagttacttgctatcaagtagttgaaaattaagatttcaaaaggtgcctaataagacttcaaaagggcgttagtaagtgttttaaagggcatcttttagaagcctaaagggcgttaattgcaagccattttgtggtctttacaaaatcagtatacgaaaaattaggacaaagaggagtactcagaaacttgaagtaataaggttttccttttgcatttagaatcttaagagaaatcacacagagagaagggaatagctgagaattgtcaaaacaaagcgatagaagttaccaaagcaacgtcgatgcttgaaacaacggaggttgtttgcgagttttatgtacaaagcatgaattcctttaaggtatcaagaatctatacgcatcacctctgcctctctttaagccatcaccaactccatgattttgagtttagatccttccgctctatttctccgtgtgacttattacgtaatagcttcactttactactccaacttctggaagaaccaaaaatatagctcaaaaagccccgaaatacagtttttttgtgtaagtttgtacagcattttaaaactgagttaaaaataacataacacaaacaacaaaatatgaaacgtaagacatggcttaaaagccataagtggattggcatcatcataacattcttcttagtaatgttctgcctttcaggtattgtcctcaatcatcgtcaactcttttctgatattaatgtaagccgtggaatattgcctggtcagtatgaattcaaccaatggaacaacggattactacgtggaacattacgctacaaagataataaaaacaaagataaagtgttcatatatggcgcagcgggtgtcattcaaactgatacaactgcttctcacttcaccgaatataaccaagggcttcctgctggtgctgactatcgacagatgcgaggaatggctaaaaccccacaaaatgacctatttgcggttagcgtcatggacttatataaactggggaagaacgcatcttggcaaaaaattgatttaccaaaggaagaggatgacgaactattgacagatatcaccacccatggtgacacgctcatcgttctgtctcgctcccacctctactatgctacagccccttataagaagtttacttgtctcacactacaagctggtgaggggaatgaggggaaggtatcactgttccgtcaaatatggttattacatagtggtgcactgtttggaaccgtaggaaagctcattgtagacggaattggaatcgtcttaattatcctttgtgtgacgggtatatggtattggattcgtcgtaaaacagtatcaatggtcgtttggcatacaaagattgggcattacacattcgccttaacgctatttatcgcaataacgggatgggctttacgtcctccactgatgattctccttgccacaaacaatacgaaaccattgcctggcacgactttagacaatgataatccttggaatgataaactaagaatgattcgatatgatgagcaagctcacgattggctcatctcgacttcggaaggtttctactctcttaagaatctctcttccaagccaacacctatcaccacagcacccccagtgagtgttatgggacaaaacgtttggcaatatgcaaacaacaaatcatggatagtaggctccttcgatggtctgttctactgggatcgtaagaataacgtcgtactttactacaatgatgctatggtctctactccccgcataccgggcactgcaccagacgaacagacaatctctggctatagttctgatttcacaaacaaggaatgtatagcaacctatttccaaggttcatccttcgcaaaacagccagaagaattgaaagataaacccatgtcgctttggagtcttgctttagaggtacacacaggtagaatctatgccggtgcattaggctccttcctcttcattttcgtcatcggtatcctcatcatcttcaccctcgtgtctggtaaaaaggcatagagattattgctaaaaaattttgattgcattgcgattaaacccaaatcggtcattagtggctaaacatattgtggtctaatgagcgatttgggttaaaattaattgcaatgtgattaatttatacataagattgaactcgataataaactaacatagaatccttttcaactaaaagatggattcatacgcttgcgcatactaaaataaagacaaatcacttgcgccttaagaaaataaatattaactttggcactataaaacacaaaaaagagcgagttgccccgctctgtttgttttcacaacggaataatccttattgtgacttgcttaaaaatctactgcaaatatagaaagaatataactaacaaccaaataaaacaagaaaaaaatgaaaacaattcttggattagacttgggaaccaatagtattggttgggctaaagtctgcgttgacgacaacggaaactacacacgtgagattaaacttggcagccgtatcatccctatgagccaagacacactcagtaactttgacaaaggagtaacagagtctcctacagctgcacgaactggattccgaggtattagaagaatcagagagcgtgcattgcaaagacgcgaacgcttacacagagtgctacacgtgatgggattcttacctctacactacgagaatgccataggatggaatcgagaggaagctacaacgtatggcaagttccttgataatggggaacctaagttagcatgggaaagacaagaggacggttccatgcgtttcctctttatggattctttctatgaaatgatggctgattttgcaaaaaatcaaccgggaatggttgctgatggaagaaagattcccctggactggacactgtattacttacgtaagaaagctcttacacaagctatcagaaaagaagaattggcttggatactactcaattttaatcagaaacgtggatactatcagttacgtggagaggaagaagaagagaatcctactaaacgtgaggagtattatgaactaaaagttgtaagtgttgaggctgccgaagaaggaaaaggaggtaacacgtggtataatgttacattagagaacgactggatatatcgtcgacagagcaagattgaactaaatgactggggcgggaaagtaagaccatttattgttacaacagaatacgaaatagatggagttaccatcaaaaaggataaaaatggagaagtgaaacgttctttccgagcgccaaatgaaaacgattgggggctgcgtaagaaacgaactgaaagtctcttagaggaatcaggtaagacagttggagcatttatctacaatcatatactttcagaacccgctgataaaatcagaggtaattttatccgtaccattgaacgaaagttctacaagaaagaactggaagccattctacgtgaacaatcaaaacatcataaagaattaaaagacatagatacgcttatagcctgtataaaggagttatatcctaacaacaagccgcatcaagatagtttgataaagaaggatatgacatatcttttaattacagacttgattttctatcaaagaccgctgaaaagtaagaagtcactgatagcagactgcccatacgagtattacgaatacgttatcaaggaaactggagaaatcaaacgacagagtatcaaatgtattgcaaagtcaaatccttattatcaggagttccgactatggcaatttatcatcaacctcagactctttgatagaaataatgataaagaagtcacttctgagtatttgtcttctatggaagactacaccagactgtttacatatctcaatgacagaaaagacattaatcaagagaccctattgaaagacttcttcaaacaaaagaaagtaaagaggggtatggaaaaggaatttcctatccgttggaactatattgaagacaaagagaaaaaatacccttgcaacgaaacacgtcacgaactacttgcagcattaggtaaagctggcatagatcatagttggttagatgataaggaactattctaccgactctggcatctactctattccgttgagtccaaggaggaagcagaaggtgctttaagaaagctgaatgataatgatgattttgttaacgctttcttaaaggtcaagccttttaagaaggaatatggtgcttattcggagaaagcaattaagaagctattggctgtgatgcgtatgggagacctgtggaatgagactgacatttgcgaacagacaagagatagaattcaaaacatcataaaaggcgttattgacgagaaaattaaagaacgaatgggtcgtactttcagtcaattatccgattttcagggacttcctgaatggttagcctgctatgttgtatatggacgacactcagaagctacagatatacaacggtggacaaagccagaagacttgatggcatatattaatggcttcaagcagcattcactccgtaatcctatcgttgagcagtgtatccttgaaactctcagaacagtttacgatatttggaaggaagcaggacacattgatgagattcatatagagttaggaaggagtatgaagagtacagccgaccagcgtgcacgtatgtctaaaagtattatgcagaatgagaataccaacctgcgcatcaagagtctcttaatggaactgaagaacacaaaagagtttgagaatgtacgcccatactcacctatgcagcaggaaattctgagaatatacgaggagggagccttgcaggaattaactaaagaggatgcccaatataatgagatttctaagatttctcaaatggcacaaccttctgcaaacgaattacttaaatacaggctttggttagaacaaaagtattgttcaccctatacaggtaaacctatttctctgtcaaaactattcacatctgcttatcaaatagaacatattatcccacagagccgatattttgatgattcattcacaaataaggtcatctgtgaagctgaagtaaatcagcttaagagtaatatgttaggttacgaattcatcaagaaacatggtggcgaaattgtgcactgtacaatggttggtgatgtgaagttacttgatgcaaaagaatattataacttcgtaacagagcattatgccaacaacagacgtaagaaggaaaaactcttaatggaggacataccacaggaattccttaatcgtcaaatgaatgatagtcgatatataagtaagaaggtgatggcaatcctttctaatattgtacgtgaagaagatgagcaagaagcaaaatctaagtttgttatcgcatgttcaggaggcataacggaccgactgaaacaggattggggactgaatgatgtatggaacagcatcgtttatccacgttttgaacgtctcaacaaactcaccaatacagaaaactttggacgttgggagaacaaagaagggaaacaagtattccagacatcagtacctttggaactacagaagggctttagcaagaagcgtatagaccatcgccatcacgctatggatgcactcgtcatagcttgtgcatcaaataacattatcaactacctcaataatgaatctgccaagagtcaagagaagagagaagacttgagaaagaaactttgtgataaaaatcgtattattcgaaaaccttgggataccttcacacaggatgcacatacagctcttgagaatgtcgtagtaagctttaagaattatatccgtgtcatcaacaaggcaacaaactattacgaaaagtatgataagaatggaaagaaagaaatagcagagcagaaagggcaagatatgtgggctataagaaagcctatgcataaagagactgtgtttggtcaagttaatctccggcgcaaagttaccatcaaactaaaggatgcacttgagaagattcctgctatctgcgacaaggaactacgtgactacatcaacatattagtagcgaaacagttcaataagaaacaaatacttgcacatttcaaaagcatcaactatcgtctaaatatgaaatctgtagacaaggttgacgtatggcagttcagtaacgaaaaggagcctatggtcgctacacgcaaatctgtagacacatcatttggtactaagcgcattgcaaccattaccgatactggtatccaaaagattcttctcaactaccttaaagcaaaaaacaatgatccaaacattgcctttactccagaaggaatagctgaaatgaataagcatatcactgaatataataatggtaagcaacatcaacctattctgaaagttagagtctcagaacctaagggagctaaataccaagtaggtgaaacgggtaataaaacgtcaaagtttgttgaagcacaaaaagggacaaacctttactttgcgatctacgaagataaagaaggtaatcgttcatataataccatccctttaaatgaagttatagaacgattgaaacagggattatctcctgcagaagatttgaataaacaaggagaaaagttaaaattctatctttctccaaatgacttggtatatgttcctactgaagaagaaaagctatccagtgagtgcaaactcaacaaagaacagatttataagatggttagttcgactgggagtgaatgctactttatcccttacactgtttcaaacgtaatatttaataaagttgagtttgaatcactaaataaaatgggaagagccctaacaggtgaaatgattaaatctgtttgttggaaacttgaattagaccggttaggaaacatacttaaggttataaagtagaattcattgcctatgataaagaaaactctatgcttcagcaatccaatctacttaagtttgcgaaatgcacaattagttctgcatttgcctgaagtagaaagcaacaaaacgttgcctgaagctataaaaaaagaagcggagcgcaccatcccgatagaagatgtcggggtggtaatcctcgacaataggcgtattaccataacttctggggtaatggaggctctacttgagaacaactgcgcagtcatcacttgcaatcaaaagagtatgccagtagggttacttctgccactatgcggtaacactacacaaaacgaacgtttccgctctcagatagacgcctccttacctttacggaaacagctttggcaacagacaataaaacaaaagattcttaatcaagagtatgtgctacggacaaatacagataaggaaaccaattgtatgcgtgtatggtctaatgatgtacgtagtggagaccctgataaccttgaagcaagagccgcagcctattattggaaaaacctctttataaattatccaaactttgttagagacagagaaggaacccctcctaataatctcttaaactatggctatgctattcttcgtgccataatcgctcgagctttagtaggaagtggattgctaccaaccttgggaatccatcatcataataggtataacgcctattgtcttgctgatgatattatggaaccctatcgcccttatgtcgatcaattagtgttagatatcattcaatgcaactcagaaatatctgatatcacacgagatttgaaaatgcaacttctcggtattccaatgttagatgtagtgataaatggcaaacgcagtcctttaatgattgctgcccaacaaactacagcctcgcttgcaagatgttttgcaggagaaaacaaacgcattagttacccagaaatgtaaaagtagtatgacaggctttgagcgcttcagtgagtaccgaattatgtggattcttgtattctttgatctcccaacggaaacaaagaaggagaaaaaagcctatagtgatttccggaaatcccttatcaaggatgggttcactatgttccagttttccatctatgtacgccattgcgcaagtatggaaaatgcagaggtacatataaaacgagttcgaaccatgttaccaaagttaggaaaagtcggaatactctgtataacagataaacaatttgcaaacattcaactctactatggcgaaaaagaacaaactcctaacgcacctggacaacaattagaacttttttgaactttataccctaacaattaaaaacaagcattcaatatcctctcaaccaacttaaaacttatccttctcagcatagtcattaaagtaaaaaatcccattctaaacgaatgggatttcactttgttgtatcaaattattttcgaataacaaacttatatcttgttgttagccaataaattaaacaacatcagttgttttagataccacaaaggtacagattttcaagcaaatcacaactgttgctgccatcttatccttaccaatcttgttgttttagataccacaaaggtacagattttcaagcaaatcacaacaacaagcagatattgcagagtgtcctttgcgttgttttagataccacaaaggtacagattttcaagcaaatcacaacaggatacaaagatgttgaaatcaggtctttgttgttttagataccacaaaggtacagattttcaagcaaatcacaacaggtgaaaaggttcgttttggttctgaaacgttgttttagataccacaaaggtacagattttcaagcaaatcacaactgcttatcttctgaatgtgatttaaagttagttgttttagataccacaaaggtacagattttcaagcaaatcacaactcgataacgagattttaacgtctcaaattgttgttttagataccacaaaggtacagattttcaagcaaatcacaaccgagaatgtccgtaaatatcgtgaagaagtgttgttttagataccacaaaggtacagattttcaagcaaatcacaacgaagaactttattcttaaatctcttgatggttgttttagataccacaaaggtacagattttcaagcaaatcacaactatttactcggtttaaaagttcccatttctgttgttttagataccacaaaggtacagattttcaagcaaatcacaacagatgttttgcgacaaaataaggctcgattgttgttttagataccacaaaggtacagattttcaagcaaatcacaacactttatcaataatggacttaaactgtttagttgttttagataccacaaaggtacagattttcaagcaaatcacaacatgagtcttcggctgttgataaaattttcgttgttttagataccacaaaggtacagattttcaagcaaatcacaactactcttagagaatgtaaaggggctattaagttgttttagataccacaaaggtacagattttcaagcaaatcacaacgccacgctaattgcgcaacataggggaattgttgttttagataccacaaaggtacagattttcaagcaaatcacaacgtgggtctttttctttcttcttttttgtcgttgttttagataccacaaaggtacagattttcaagcaaatcacaacctggtaacggaatggtttctaatggtacagggttgttttagataccacaaaggtacagattttcaagcaaatcacaacctgaataactctgttatatcacatccgattgttgttttagataccacaaaggtacagattttcaagcaaatcacaactactgccatattcgttattagttatgttacgttgttttagataccacaaaggtacagattttcaagcaaatcacaactattccttattgctttgttacgtatttcagttgttttagataccacaaaggtacagattttcaagcaaatcacaacagtctgctgcgtctaatgctgcgtctacttgttgttttagataccacaaaggtacagattttcaagcaaatcacaactgtattaacgtaaacatatcattaaaacacgttgttttagataccacaaaggtacagattttcaagcaaatcacaacatcagatacaacaacataaggtttagacggttgttttagataccacaaaggtacagattttcaagcaaatcacaacatataatatattattatttaaattatttatgttgttttagataccacaaaggtacagattttcaagcaaatcacaacatcattaccaatttctacccacgtgtctttgttgttttagataccacaaaggtacagattttcaagcaaatcacaactaagtcactgcatttatacaacctattactgttgttttagataccacaaaggtacagattttcaagcaaatcacaacaaagctcatcgaacaccgcacgactgatgagttgttttagataccacaaaggtacagattttcaagcaaatcacaactctcaacctaataactacaccttagagcaagttgttttagataccacaaaggtacagattttcaagcaaatcacaacgtatctgcgctaattgataaactatgtgatgttgttttagataccacaaaggtacagattttcaagcaaatcacaacatgttagtttctttgaagccttaataacggttgttttagataccacaaaggtacagattttcaagcaaatcacaaccggcttcgactgccaactcgtaatctctttgttgttttagataccacaaaggtacagattttcaagcaaatcacaacggtgctgtcgctatggggacaaggtcccctgttgttttagataccacaaaggtacagattttcaagcaaatcacaacataaggcttggtatgataagtattttcctgttgttttagataccacaaaggtacagattttcaagcaaatcacaacttcatagccgttataaagctcgctgcactcgttgttttagataccacaaaggtacagattttcaagcaaatcacaaccacatcttccagcgtcggtgtcgtaggctcgttgttttagataccacaaaggtacagattttcaagcaaatcacaacggctttttatcagcaatataatgtctaaatgttgttttagataccacaaaggtacagattttcaagcaaatcacaaccgatagaagagagcatattctggatatacggttgttttagataccacaaaggtacagattttcaagcaaatcacaacgccacgctaattgcgcaacataggggaattgttgttttagataccacaaaggtacagattttcaagcaaatcacaacgtgggtctttttctttcttcttttttgtcgttgttttagataccacaaaggtacagattttcaagcaaatcacaacgccccgattacgtgggtgattaataaatttgttgttttagataccacaaaggtacagattttcaagcaaatcacaactatatcagaataggttaacttctttatcggttgttttagataccacaaaggtacagattttcaagcaaatcacaacattcattactaagctctcggaggatgttctgttgttttagataccacaaaggtacagattttcaagcaaatcacaacagaaactcgcagccattggtagcgataagtgttgttttagataccacaaaggtacagattttcaagcaaatcacaacagtctgttatctctgaactcttcactggtggttgttttagataccacaaaggtacagattttcaagcaaatcacaacaatatagcgagtcttaatcttaccattctcagttgttttagataccacaaaggtacagattttcaagcaaatcacaaccctctcaaagtcgaaatttgcaattcctgcgttgttttagataccacaaaggtacagattttcaagcaaatcacaactgttttgttaatcgctgtctttgcgtaattgttgttttagataccacaaaggtacagattttcaagcaaatcacaacaaagtttcaccattataccacgaatcagtcgttgttttagataccacaaaggtacagattttcaagcaaatcacaacaataatctgtttgcgtgaacgccttgattagttgttttagataccacaaaggtacagattttcaagcaaatcacaacatataaatatctcgtaaattgcaaaagttagttgttttagataccacaaaggtacagattttcaagcaaatcacaacgaaatagttgcctcaagtttctctgaccgcgttgttttagataccacaaaggtacagattttcaagcaaatcacaacgtacgttctccaaatctgcctttgcttgtgttgttttagataccacaaaggtacagattttcaagcaaatcacaacgtgttgcctgcctgccctcctcggttgcacgttgttttagataccacaaaggtacagattttcaagcaaatcacaacgcgtacccggtgccgccgttaaaagccgtcagttgttttagataccacaaaggtacagattttcaagcaaatcacaacagggtgtagaggttgagaataacgaaagcggttgttttagataccacaaaggtacagattttcaagcaaatcacaacacggtacacctgtttactcaacatcaaatggttgttttagataccacaaaggtacagattttcaagcaaatcacaacttagtataatgttacttataaagtttgcacgttgttttagataccacaaaggtacagattttcaagcaaatcacaactctttttttgattatccaaacgagtaagaagttgttttagataccacaaaggtacagattttcaagcaaatcacaacaaagttcatcgaacacagcacggctgattagttgttttagataccacaaaggtacagattttcaagcaaatcacaactgattcaccaaactcctttaactcatcacagttgttttagataccacaaaggtacagattttcaagcaaatcacaacattgctgcattaattcattgtacaccttatgttgttttagataccacaaaggtacagattttcaagcaaatcacaaccagtttaagacaatacaacccattgatacgttgttttagataccacaaaggtacagattttcaagcaaatcacaacgatgctctaacattctgtttatcttggaagttgttttagataccacaaaggtacagatttttatcaaatacaatagagaaacatgctgataagggggtaagagaaagtagtatcattataccacaaacatggtattttttagataattagggcgtaaaaggcatgataaataggtcttttaaagcattatttgaaataaatacaatataattctttgtggtttgaagattaatatatatctttgccgacaaatccaaataatagggataaaatagattaaagaaataggataagaccaaacttaatctataaattgcgggataattccacaagcacaaattataaaatcaagacataaagtcaataaaaaacagattatgaataaagtaaaattattattagatttcgttcttaataccgcagcatcgctgaagggtacaggtattcatttgatacgtatagccatctttatcatcttcgtatggattggtggtttgaagttctggaactatgaggcagagggtattgtacctttcgttgctaacagtccgtttatgagcttcttctatacaaagaaagcacctgaatataaggactacaaactcaaagaaggtgagtttgataaggttaagcatgagtggcatgaggcaaacaatacttatacattctcacacggcttgggtattgcaatcatgtcatttggtatcttaacattattgggtatttggttcccaaagattggttttgtaggctctggattggtcattatcatgacattcggaacgctatccttccttatcacgacacctgaagtttgggttccagacttaggtagtggtgaacatggattcccgctactgacgggtgcaggtcgacttgtcatcaaggacgtatgtattttagcaggtgccgttgttgtattagcagactgtgcacagcgaatcttgaaaaataataagagataaacgattataagaaaaggggatgttacagtacattcccttttcttttatataaatacaaagaagaacacagcctttaatcatctgaaagatacacattcattataatgctttaatccaaatcaatcggtgatattgaaagactattcagcctcaacaccattggtgtttatccttagcacattatgtgcggaccgttaacaccacatgtgcggagcctcaacacctatcctattaaggacagaataatgaagaagtgaacaagtttactgtataaaaaagacaaaataacaaagtaaacaagtagataggtgaaccagttgcttgtgtaaaagataaaaaaaagacataataacaaaggacgtgaacaagttacttattaaattatcacgttacctttgttactatgtctattaccatgatacaccatcttttattacaagcaactggtaaacttgtctactccttcacttgtctactcgcctaccatatctatacatcgtatacccatcagttcctttcccatccccgacatatctaaaagaagagggaaaggcacccttgacaataagctctgtagcatactcataaccatagctgtcagcatcaacgcatattgcatgcaaaggataataaacattcttcttatccttagcataattctccatcccattggtagtttttttattcacatagaaggtcgctatatcgacatcttccataggcttaacatacttgataaggacggcagaatcacctaaggcagcatagattttatcattatgccgccaataaaaacctatacgttcgttttctttcagttgcttccaatgtcctctttccttataatcagcataaggtttgcaagccacaagaagcaatagaatgataaagatataccctattttcattcccttataaaccttttgcctcttacaattcatcttttattacaagcaactggtaaacttgtctacttgttcacttatttactaaccaagatactcatcgtcacgaacgagtattttttcaatcttaccaacatacatcgtatgaaggtcgccattaggataagcctgttcaaaaatctccttatcaataaaactactttcctttaggtctgcagcatactctttcttacaaacaagaactaacttagcctccttaaaataaacactattatcagcaaaaacctttgtcaatccagccttctctatcttattctcatcacgtcctgaaacagaaccaagataagccatttgcttcttaaaagaggcatccatcacgcaaagcgtaaagtaatcttccttatcaacaaaggtctttgtatagcgactggcacgtatatagacaacaactgttgggtcgttatggccccacatacagccaatatgtccccaactaattgtcatcgtgttacacccatcctgctcattaccagcagataacaacatccattcctttcctaaaaggttgaacggattaaactttaaatctttgtaactaacttctttcatcctaaatcatctttatatatacacattaaacatttatcaaatacaaaagtaacatttttatccgttccaacaaagcacacaagtgaaaagatgacaagtgaacaagttgcttgtaaagaagacaaagtaacataagaacacttttaatgcatacaagttaacaagtgaataaattgcttgtaaagaagacaaagtaacataagaacacttttaatgcatacaagttaacaagtgaataaattgcttgtaaagaagacaaagtaacataagaacactctttattgcatacaaattaagaagtggataagttactcattatgttattattcctccatcgttcctctgttactgtgtctttctctgagcaaactgttctcttatcaaactactatgttaccctgtctttctcacaagtaactcgttcactcgtctacttgttcactcgtctactcctacaatatctgtagtttttccaacataatatttgtcagtttttcacaaaattcgtacctttgcagtgatattttatcaatcattcgctttaattcgggtgatttgttatgattagtggaaatatatttagtataaattgataaaaaggtagacaacagtggattcagtatataacaaattaatagcattaggtattcgcccatctatacagcgtgtagcaatcatgaagtatctcgctactcaccacacccaccctacagtggaggaggttttccttgcattgaagaaacaacttccaacggtgagccgtacaactgtttataacacattgagaatgttgtcagagcacggagcagcatcaatgattaccattgatgatcatcgcgtatgctacgacggtattaccgagccacatgcacacttcttctgcaagcgttgtgagaaggtttatgactttgaggcaatggaaatgccacgctatactggcgaaattggcaagggttttagaattgatgacacacagctttactataaaggtatctgtcctcactgccttgagacaatgaacgagaaagaggaactgaactaaagtccccgtctcaaaatacactaagcgtggtgtaaccaatggtaaaaccatgaataaggttggtaagtagagctgagttatagaagaatgacagggttatccatacccatttataatacaaaaacattataaaaagacattaatcataaagatttatcaacgttacttgtgactatagctacaaagaaaagatagcctaaaacaaggcattatcagcaaagtttcaccacaagttcaatgaagataaataaagaaacata

SEQ ID NO: 626 - DNA, 24242 bp, synthetic construct
  misc_feature 1..24242: note = Synthetic
  source 1..24242: mol_type = other DNA
tcttaagatagacctcaacgccagccgcaccgagagccgtgccaaaagcatacaatatatgtacgagggagtgcccaccacgcagagcggcactttcaccatgaccactatctcactcaagggggctttcgagagtattggcaatgccggcaacggctatcgcagtaagaactttgaggagtttgtggcttcgttgccctctttccgagaccgggtggaagaccaataccgaggtttgcgctatccgcaaggcacggcctacgccggtcaggagttcgatgccgccaatggtggagtgaatacctactcgggcgacgtgatgattccggcattcctttctgcctacacgagcagcggtggcaacggcctgagcatcttccctgcgctgacgcgcctgctgcccaactggtcgctgcgctacagcggactcggaaaactcccgtggttccgcgatgtgttcaagagctttaacatcaaccatgcctacaggagcatctatgccgtgggctcctacaacagttacagcactttccaagaagtgatgaacggactcggcttcgtgaacaacacggagggaacgcccattccgagcagcatgtacaacatctctcaggtgagtgtcaacgaggctttctctcccttgctcggtgtggacatgacgtttgagaacaatctcacggccaagttggagtatcggcagacacgcgtgctcagtctgagcatgacgagcatacaggtcaatgaggccttcagcaacgactgggtagtgggcatgggctatcgcatcaacgacttcagtctggccaatctgctgggctggggcccccgtccgcgacgggccaagagcaatgccaagtcgcgaaatgccgacaaccgtaacggggtgcagaacaactcacgcaacgcttcgggcacctccaaccacaatctcaacatgcgtctcgacctgagctatcgccgacaagcggccatcacccgcgacattgcctcgctcaccagtgctgccagcagcggtaacacggccttcaaactgagtttcatggccgactacacgctctcgcgcttgctcacgatgagcttctactacgaccgtcagaccaatacgccgcttctctcctccagcagctaccccaccaccacacaagatttcgggctcagtgtgaagttcagtctcacgcggtaatggtaaaaaggggagaagtaaatactcacatatccctaaaaacagtctttgctggttgtcggatggtggcgaataatatcaacaaaaacgcatccgcagaaattttccaaccagggtgggaggtcggccttaaactatcggaaaagtcctcttcttctctcattccggctttccgaacttgcgaaagagccacacttgaacgccgaaagggccacagttgcagcgcaactgtggccctttttcaagcccgttctggccctttcatgctcgtttccggccattaatatgtgtcagtaaaattcaaacggctgattatcagcatattgaaaacatcttcaaaatcgcttgtttgcaccgagctggttgttggttgcaaatatcgcaatatgagaggccgaaaacgaataaatagtttgacatttgtcgtccggatttctcccccgccaagcaccggctgtcccctcgtctgtcttagagaaggtagacacgcctgattttccttgtctttccccgtcttttatttggtagtgtgtagaatttacactatctttgccgacatatcgtaatctcaccatttaatgctgcgagtgcagcaaacctaatatcaacaaaacaatgaacaagaacacctgtaaacttttgattgccacgttgttgcttgtggcttctccagtccatgcgaaagcacagtctttgtccccacaacggtcgtggacagccgataacggcaacggcaccttcaccaatccgcttttctacgatgaattctctgaccccgacatcctgcgcgtaggcgacgactattatctggccggaaccacgatgcacaccgtgccgggcgtgaatatactccactccaaagaccttgtgaactgggagcagtggagctattgcttcgatcgtttcgactttcccgaccccgctttctccctccgcgacggcaaggaagtctacggacagggtatttgggcaccctgcatacgttggcacaaaggcaagttttatgtgttcagcaacatcaacggcaagggacttcaggtgtatgtggccgacgatgcgcgcggcccttggaagcacatcaacatgaaaggccgcatctatgacctcggtgtgctcttcgacgacgatgacaaaatctatgcgatccatggttatggtgaggtgaagtgcgtgcagttgaaagacgacctctccgaaccgatatacgaaactgagcgcaccatcattcccgagggcacaggggtgggcgagggccatcatgtgtataagatcgatgggtggtactatctgatttccaccgactacgcccctaacggccggacgctttgcagtcgctcgcgaagcatttgggggccttacgagaccatcacgataacagccgacgaaacctatggttatcatcctgcgcccatgacccgctggcaggggcgcatcgtcaacgacggccaccccttccgcatagagccggcactgaccgatgccaccggctgcagcaacgcccatcaggggggcatcgtctccacgcccgacggacagtggtgggccctgctcatgcaggatttccactccatcggtcgcacggtggatctcatgcccgtgacgtggaaagacgggtggccgatggtagggctggagggcaacctcggacgggcaccccgcacgtgggcgaagcccgtgcagggacagcccctgtgcgcgccatacgagcgcaacgaagatttcaacgggccgcggttggggcgcatctggcagtggaaccataaccccgacgacagcgaatggcagctcacgggagggcggttgcggctccacgccctacccgccacgcaactgatgtgggctcgcaacacgctcacgcagcgtgtcataggccccgagtcgacgaccacggtggaattgcgcgtgggccgtttgaaagacggcgatgtggccggactgggcaacatcaatgtgccttgttcgtgggcgggtgtcgtgaaagacgggaaacggctcacactcagatgcttccaacaggtggacaacgacacactcgacatgcccgtgcagttgaagggcgaccggatttggctgcgcttcaacggcgatttcgacaacgaccgcggctgctatgcctattcgctcgacggcaagaccttcaccgaccttggccgggagatgacgctcagctatcaactggttacctttcagggcagccgcatgggactttttgcgttcaaccacaagggcaggaagggcggatatgccgagtttgacaacttccgtgtggacgaaccgaaggccgaccgtagccgcaacatcccctacggaaagactattcgtattgtcaatctggccacggacaaacccatggaggcaacgaagcatggcgtgctctacgacaccggagccgacaaccaaggcttgttcacccgtttccggttggtggacaagggacagggcaaggtggtcttgcagtgtgccgacggccgctacgtgatgtcggccggttggggacttcccggcgatgtgcgcatgacgaccgatgccgacaaagccgaggtgttcatgtatcaggatttcctcgaccgtgagtttatgctcttgtccgtccgtacacatctttatataggtaagagtcccactactggcagtccctattcgctcgacttcaagggggccgaccccggaaggagaaacggggccgtgctgcgctgggagccggtagaggagtgacgacaggtccggttggttgaaaatatcgtgccgttggttgaatgtttttgactgttatggctgcaaatgttaattttgtattcgtatgataaagatgtctaacgcatttaaaacgacacgatatgaaaatctatttgcaatcattcttttgggcatcggccgcccttttggccgtgtcctgctctgatacgagcgatttagacgactatgtgaacggttctaccaccacaaccacaccgactggcggaggcagttcttcctccaccacgacgcccaccacggccggcgacctaaccactttcacgatagcggtggattcgacagccttgtcggagaccgaaacgattccctccgacaatgaagactatgtggagaacaactctttcaccagcaccatcaatatcgtgtatagcggaacgacggccacggtgagcggaagtgtagatggggtgagcatctcggtaagtggtgccgatgtcacggtgacttctacggccaagggggtgaactacgtgctcagtggcacggcgagcgaaggggcgttcaaaatggccgtcggtgacagtgacaagaagtttcgactcacactcaacggtgtgagcatcaacaacagcgatggcccggccatcaacatacaagtgggcaaacgctgctatgtggtggccgctgacggcacctacaattcgttcaccgacggtacttcatacgctttgagcaccgaagaccaaaagggaactatcttcagtgaaggcgaattgctgttcagtggcaaagggcacatcaaggtgagtgccaacaccaaggccggcatcgccagcgacgactacgtgatgataaggcccaacaccaacatctatgttaaggccacgaagggcaatggcatcaagagcaaagacggattgctcatcaagggcggtgtggtgaatgtcgaaaccaccggtacggcagccaaaggactgtccaccgacggctatttccagatggatggcggtcgcgtgacggccatcactacaggcggaggcgaatatgacagcgacgacaacgatgtgagtgcggcagccggagtgaaagccgactccaccttcacgatgaatggtggggccctctactgcaagagtacgggagtcggaggcaagggcatcagcaccgaccagtcgctgaccatcaacgacggtgaggtgaaagtgatcaccaccggggccacctatacctatagcagcagcctcgactcgaaagccaaaggcatcaaggccgacggggctttggccatcaacggcggcagcgtgatggtgcgcgccaccggcggagagggcagcgagggcatcgagagcaagagcacgctgacggtcacgggcggttccgttgaggtatattcctacgacgatgcgctcaattcggccggccatctatacatcaaaggcggctacatctacgcatacgccctcggcaacgacggtatcgacgccaatggcaacctctacatacaaggcggaacgactgtggcctacggcacaagcagccccgagtgtggcattgatgccaacgaggaggagggctacagcgtgattgtcaccggcggtacgctcgtgggcatcggcggtggtacgtcctatccgtcgagccagtctacccaaccaagcattgtctatggcggaagtgtctccaatggctctacggtggcactgaacagtggttcgacgaacattctcgccttgacgatggggcgcagctataacggcaatgtctgcatcctcttcacttctcccagtttgtcgaaaggcggcagctacaccgtctacacaggagcgagtgtgagcggaaccgactggcacggactctacgtcggggccaccgtgagcagcaccggcacatcggcagccaccatctcctcactctcgtcgccttattcctcggccggtagcaccacgggcatgggaggcttcggaggaggcggtcgcccgggcgggagatagcaaagacgggcaaagccacctcttggatttaagagaagatggagaagctaaggaatatgaggacaatggttttatcgcttgagcccgacaggtgtgcccaagaaataaaaccattgcctttttcccgccacaccgcacgatgccccttctgttgagcgaggcagatatcgtttcccctccactctttcggctcctccatctctcttggaatggtctccgggggcagagtcggccaaacccacttggcttgtataatatttccacaaatcaaacgtttaaaagaaaatcatgggcctatgaagagatttttacgcctgaacagagaaaacatcacctatttgggactttggcttcttctctttctgtctccgctgttgagcatgtgcatcaaggcggagtcgggattggtcaaggcattcagttggatggaggtgtttcatgtatggaaattcttcgtcgtctatctcgtcatgttccttgtccacaactttgtccttgcccccctgttgctctacaagcatcggaagacgatgtattttgccaccacactttgtctggtgatgatgttcgccttctatcagtgcagcaaccgtccccgtcgtcccatgcaccctatggagatggaaggacgaatgcgccacagacctatgcccgaaggggacagactgcatgaaccggggcgtgacaggatgaaagaccaccgcatggggcctccgctcttcttcggcgagggcgacttggtgagcaccatcacgctggtgctgctgttgggcatgaacctcggcatcaaactctatttccgatcggagcaggaaagtgccgagatgaggctgctcgagaaagaaaacctcaaccaacagttggagtatctgaagtatcaaatcaacccccacttcttcatgaacacgctcaacaacatccatgcccttgtggacatcgacccggaaaaggccaagaccactatcgtggaattgtcgaaaatgatgcgctacctgctctatgaaggcaacaattcgttcattccgctgcatcgggaagtggaattcttgcgcaactacatcacgctgatgaagctgcgctacaccgacaaggtgaagatagataccgacattcctgtctcattgcccgacagggggctgccgccactgctgctcatcacgtttgtggaaaatgccttcaagcatggggtgagctatcgggaaccgagttttatcactatcggcatgagggtggatggcgaccgtttccacttcgagtgcgtcaacagcaagcatcgtgagagtacagccgagcatggtggggtggggttgaccaatgtgcgccgtcggctcgacctcatctatggcgacacctaccgccttgacatcgacgacgggacagatacttacacggtgaagttggagctcccgattgccacatgatcacatttctaacaccaagaccgctatgcttatgatcagagttttagccatcgacgacgaaccgctggctttgcagcagttgactgcctacatcggcaaggtgagctttttggaacttgcgggcgcgtgccagagtgcgctggaggcccgcaagctgctcgaaaaagactccgtggacgccattttctgcgacatcaacatgcccgacctcaacggcatggacttcgtgaagtcgcttgctgcgcccccgatggtggttttcaccacggcctacagcgagtatgccgtggagggctataaggtagatgctgtggactatctgctcaaacctttttcgctcgacgacttccgtcgggctgccaacaaggtgaaacggcagtatgaactggaaaacagcacccggcccgtggcatcaatacccgacggacaggccgatgatgtgctctttctcaaaaccgaacaccgtgtgttgaaggtgaatatcggcgacatacgctatattgagggcatgagcgaatatctcaaaatctatcttgaagggcagaaacctctggtggtgctgctctcgatgaagaagatggaggagcggctgcccgccatgttcatgcgcatacaccgttcctatatcatcaatctgaagaagatagccgaggtgaacaaaaaccgggtgatactcggcgaggatgcctatctgcccattggtgacctctatcgggatactttcgctaagtatcttgagacgaaattcttgggcaaataaaccatgggctcgttttttatttgtacttttgcaacatcagtaacacaacggatagcatgttgcaattagacaatttttataaagcacgctacgtgttgggcaaggttttgcgcaagacggagcttatccatgcaggcaaaatcaacgacgatgttgacgtgtaccttaaacccgaatgcctgcaaaagaccgggtcgttcaagatacgcggtgcctactacaagatttcacaactctcggaggccgaaaagcagaagggcgtgatagcctgttcggccggcaaccacgcacagggggtggcccttgccgccacggcaatgggcgtgaagagtctcatttgtctgcccgagggggctcccatcagcaaggtggaagccacgaagcgcctgggagcagaggtgaagctcgtgcccggtgtctacgacgatgcctacgccgaggccatccggctgcgcgatgagtgcggttacacctttgtccatccctttgacgacgagaatgtgatagccggacagggcaccatcgggctcgaactgctcgaccagctgcccgatgtggaggcggtcgtcatccctgtcgggggcggcgggctcatctccggggtggcctttgccctcaagagcctcaatccgcgggtgaaggtctatggtgtgcaggcagccggagcagccggtatggtggagagcatccaccaacatcggttggaaaaactggcttccgtgtcgactattgccgacggcatcgccgtgaaagagcccggacagctgaccttcgaggcttgttcaaaatatgtggatggctttgtcacagtgagtgaagacgaaatcagtgcagctatcctgcggttgatcgaaaccgagaagatggtggccgaaggagccggagcagccggtgtggcagccgtgatgtttgataaattgcctgtgaagggcaagaaaaccgtgtgcgtcgtgagcggaggcaatatcgatgtgaccatcctcaaccgcgtgatcaaccgtggactggccaaaacaggtcgcctttgcgccctcgaaatggaactcgacgacaagcccggcaaactcgttgaggtatgcacggtgatagcccggttgggcggcaatatcaccagcgtgcatcacgaccgctcggccaaccgcaagaaagtggatgcctgcatcttgcgggtgatgatggagacccgcaatcaggagcatatcgaccagatacgctgggcactcgaagagaaaggaatcacgatactgaacaattcaatccttaaaatagaacattagacttatgcaagcaattcacacagacaacgcgcctgcagctatcggaccgtatagccaggccatcgaagtaaatggttttgtatttgcctcggggcagattccattggatcctaagaccgggacttttgttgaaggaggcatcaaagagcagacccggcaggctctcaccaacgcttccagcattctgaaagctgccggaaccgaccttgcccacgtagtgaaaaccactgtctatctcgacagcatggacgatttcgccgccatgaacgaagtgtatgccgagtttttctcgcatccattcccggcccgttcggccgtagccgtgaagaagttgcccaaaggcgcactcgtggaggtggaagtgctggccgccaaataacgtgccgaaataggggatagaggacataataacttgtttacaggtacgtatggttctccttggacaaaaggagaatgatatgtacctgtaaacatatatttttataaaatgttgaccaaatcttttgtaaaacaaatcataagtcgtaattttgggcaaacaacaaaacagagcgagttgccccgctctgttttgttgtcacaacggaataatccttattgtgacttgcttgaaaatttctgatgcaaatatagcaacttaataattgatatccaaataaaaagtagaaaaaatgaaaacaattttaggattagacttgggaaccaatagcattggttgggctaaagtctctgtggatgactatggaaattacctgcatgacattaagttgggaagcagaattattccgatgagtcaggatgtacttggcaactttgacagtggggtgacggtatctcagacggcccaacgaacggagtttcgtagtaaacgcaggttggtacagcgcaatctgcaacgtcgtgaaaggttgcatagagtgttacacgtgctggactttttgcctgctcattatgatgcagccataggctgggataggacagaggctgtaacttacggaaagtttcttaatcatgccgagtctaaattggcatgggaggaacttggaaatgggaaaagaagattcttatttatggattcattccacgaaatggtagctgattttgcacgttgtcaaccggcattggtggcagatggaaagaaaattccgcttgattggactatctattaccttcgcaagaaggctcttacacaagctattacgaaagaagaattggcttggatattgcttaatttcaaccaaaagcgcggctactaccaattgcgtggcgaagaagaggaaaatccgactaaaaaggaaggcaatgtgaaacgttcgttccgtgccccgaacgaaaatgactggggactgcggaaaaaacgtacggaaaccctgttggaaatgtcgggtaaaacggtaggtgctttcatctatgaccatttgctgcaagaacctgcagacaaaatacgaggaaacttcatccgcacaatcgaacgccactactataaggctgaacttgaagccattttggcggaacaatgcaagtatcacatagagttgagggataaagagatgttggaagcctgtgcccgagagctttatctgaataaccttccccatcagcggagcctgatgaagaaggacatgacttatttgcttttgtacgacttgattttctatcaacgccctttgaaaagcaagaaagcgctaatagccaactgtccatacgaatattatgaatatgtagataaagagacgggcgagataaaacggcaaaacattaaatgtatagccaagtctaatccatactttcaagagtttcatttgtggcaatttgtacttaatcttcgtctattcgatcgtgtggaagataaggaggtgacggcaaattatctgccaaccgcggatgaccatgctcgattgtttacttatctgaatgaccgaaaggaaataaaccaagaaaccttactcaaagattacttcaaattgaagaaggtgaaaattggtaatgagaaggaataccctattcggtggaattatatagagggcaaagaaaagaaatacccctgcaacgaaacccgttacgagttgctgatggctttagatagagccggtatcgaacacaaatggttagatgacaataatttggaatatcggttatggcatctgctctattctgtggaagtgaagagcgaatcggagacagcactacgtaagttgaaaaatgatgatgcctttgttaattcgtttttgaaggtgaaaccgttcaaaaaggagtatggagcctattcggaaaaagcaatcaaaaggctgttggccgtcatgcgtaaaggctttttatggaacgagcaagacatctgtgatgaaacgcgcaagcgtattgaaatcattataaaaggagatgttgatgagaaagtcaaagaacggatggggcatgcggcatattcgtttgaccgagtttccgattttcaaggactgcctgagtggctggcttgttatgtcgtgtatggcagacattccgaagcgatggatattcaacattgggattcacccgaagggctcatggcctatattaataatttcaaacagtattcgttgcgtaatccgattgtagaacaatgtattcttgaaacattacggacagtacatgatatatggaaagaaaccgggcagatagatgagattcatgtagaattgggacgtgaaatgaaaagtacctctgaagagcgtgctcgtcggacacagaatgttcttagaaatgaaaataccaatctgcgtattaagagcttgctgatagaacttaagaatgatacggatatatgtaatgtacatccctattcgccgatgcagcaagagatattgcgtatctatgaagagggggcactacaagaattgaatagggaagacgaggattttgaggaaatttccaaaatttcgcaaatgtctcaaccttcgggaaaggagttgaacagatataagttgtggcttgagcagaaatatcgttcgccttatacgggaaaagctatctcgcttgctaaactttttacaccggcctatcaaatagaacatgttattccgcagagccgctactttgacgactcgtttacgaataaggtgatatgtgaggcagaggtaaacactttgaagtctaaccttcttggttatgagtttattaagaagcatggtggtgagattattcattgtaccacgttgggcgatgtaagaatctttagtgagagtgaatataaggcttttgtaacagagcattatgccaacaataagtcgaaaaaagataaattgctgatggaggatattccacaggaattcttgaatcggcagatgaacgatagtgggtatattagcaaggtggtaaagacgctgctttccaatattgtgcgaatggaagatgagtcggaagctacttccaagtctgtgattgtatgtaccggaggtgtaacagaccgcctcaaaaaagattggggactgaatgatgtatggaacagtattgtctattcacgctttgagcgactcaacagacttaccgggacggaggctttcggacattgggaaaataaggacggtaagcgggtgttccagacttctatgcccttggaattgcagcgtggttttaggaaaaagcgtatagatcaccgccatcatgcgatggacgcccttgtaattgcttgtgcctctcgtaacatcgtcaactatctgaacaatgagtctgccaataacccgaaaaagcgggaagatttgcgtcgtcagctgtgcgacaaaaacagagttattcgcaagccttgggaaacattcacgcaggatgcctataatgcattgagaaatgtggtggtcagctttagaaactacgtaagagttatcaataaggcgaccaatcgttatgaacactatgatgagaatggtaaaaagaggtttgtgcaacagaaggggagtgaactgtgggccattaggaaaccaatgcacaaggagacttactatggtcatgtcaatctgcgtcgtaaagaacttgtcacacttcagaaggctctcgatgatattccgtccatttgtgacaagaagttgagagactatatcagtgcgttggttgaaaagcacttcaataagcgacagatgcttgcccatttcaagagtacggattattattggcagaagcaatatgtaaataaggtgtatgtgtggacttttagtgatgatataaagcctttggttgctacaagaaaattgcttgacacttcattcgatgccaaacgaataggcactattaccgataccggtatccagaagatacttcgtaattatcttgaagcaaaaggtggcaatgcgaccttggcttttacgcctgaagggattgcggaaatgaatcagaatatctcaaagtataatgatggcaaaccgcatcagccaattttgaaagtgagaataacggagccgatgggagctaagtatcgagtagggcaaacaggaaataaaatggctaaatatgtcaaggctcaatcgggaataaatctctattttgctatctatgaagatagcgaaggtaaacgcagttataccacagttccattggatgaggtggcggagcgtctgaagcagagactttcgccggttccggagaaagatgaaaacgatgtgccattaaagttctacctgtcgcctaatgatttagtgtatgtgcctactgaagaagagttgcagctacgtgagtgcaagttgaataaagataggatatacaagatggttagctcgacaggaaacgaatgtcattttataccttattatgtcgcgaatgtgatttataacaaggtggaatttgaggcaaagaataaaataggaagggctcttacgggtgaaatgattaaagctgtctgttggaaacttgaaatagaccgtctggggaatattctaaaagttataaaataattctacaccatgatcaaaaagacactttgctttagcaatccaatttatctgagcttgcgagatgctcaattagtgttgcatttacccgaagtggaaaaagacgaagctttaccagatctgatgaaaagagatgccgagcgcaccatcccgatagaagacatcggggtggtcgtacttgacaaccgacgtatcaccgtcacatcaggtgtcttagaggctttgttggaaaataattgtgccgttatcacttgtggacagaatggtatgcctattggcttgcttctccctttatgtggtaataaaacgcaaaatgagcggtttcgtttacagttggatgcttccctccctttgcgtaaacaactctggcaacagaccataaaacagaaaatacttaatcaagcgcatgtactcagaaccagcactggcaaagaaactaattgcatgaaagtttgggccaatgaagtgcgtagcggtgatcctgacaatttggaggcaagagccgcggcttattattggcgtaatctctttcccgcacttccctcatttgtgcgtgaacgggaagggatgccacccaacaacttgttaaattacggttatgccattttgcgtgctgtcatagcaagatcattggtggggagtggtttgttgccgactttagggatccaccatcataaccgctacaatgcttattgtcttgctgatgatattatggaaccatacagaccgtatgttgatcagttggtaattggtattatgcatcgtacatctgatatatccgaaataaccaaagaacagaaaatacaacttttgggtatcccgatgttggatgtggtcgtgaatggcaagcgtagtccgttgatgatagctgctcagcagacaacatcctcacttgctaaatgcttttcaggagaggtgcggcatattagctatcccgaaatgtaacctgttatgtctggttttgacagatttagtgaatatagaattatgtggattcttgtattctttgacttgcctacggatacaaagaaggagaaaaaggcctatatcgatttccgtaaggtgctgattaaagatggattcacgatgttccagttttccatttacgtgcgccattgcgctagtatggagaatgctgaagtgcatatcaagcgtatccgcaataatcttccgaagtttggaaaggtcggaattttgtgtattacagacaagcaatttgccaacatacagttattttatggggaaaggcctacccttcctaatgctcctttccaacagctggaactattctgaacgtattgtatagaaagcgaaaatcccattcgttgcgaatgggattttgctttgcggtgtcattttatttttcttgcaataacaaagtatctatttgtaattcagtgaattatagatatcgagttgttgttgctaccgcaaaggtacaaattttcaagcaaatcacaaccggcaatggttaccttatttgcgccaaatggttgttgttgctaccgcaaaggtacaaattttcaagcaaatcacaactgcatttcatggccgaaacctgcaaactgcgttgttgttgctaccgcaaaggtacaaattttcaagcaaatcacaactcatggccgaaacctgcaaactgctctctccgttgttgttgctaccgcaaaggtacaaattttcaagcaaatcacaactttccatcagtacctttcgggccttgtgcagttgttgttgctaccgcaaaggtacaaattttcaagcaaatcacaacacctacgattatatcaagcagtgcgaccccgttgttgttgctaccgcaaaggtacaaattttcaagcaaatcacaaccgtctgttgttcctagttgttctttgtctgttgttgttgctaccgcaaaggtacaaattttcaagcaaatcacaacggcgactggtgtgtgccgcccgagaagccgttgttgttgctaccgcaaaggtacaaattttcaagcaaatcacaacgaagctgctggttataatccttatttgtagttgttgttgctaccgcaaaggtacaaattttcaagcaaatcacaacctcacgctcggagttgacattatcattgtgttgttgttgctaccgcaaaggtacaaattttcaagcaaatcacaactgtgcccgtaaacgaagtcacccgtcacacgttgttgttgctaccgcaaaggtacaaattttcaagcaaatcacaacccgaacctgaaagagtcgcagtcgtaaacggttgttgttgctaccgcaaaggtacaaattttcaagcaaatcacaaccgagcggcgaccaagggttcacgcgtgccggttgttgttgctaccgcaaaggtacaaattttcaagcaaatcacaactgctggtgtatgatccggagcgcactgtgcgttgttgttgctaccgcaaaggtacaaattttcaagcaaatcacaacagttactaaaaggtgagtgatatgagtgttgagttgttgttggctcaaaaatatacgaataattccataaatccaaatcttcgcattcatattttaagcaaaaggatggtggctgtaccgatgtattgaacttcggtacagtcacctttctatgttgtgtcggtgggtgagtcgtttgtgtgggaaggggcgtggctatatgaatgaagaagcagcacctatagccgcttagaatgtcacacccacattgaggttgaagcagcccgtgcgagtgtcgtcgaaaacgtcttggcccacattggcgaggcctatgtcgtagccaatgcctatggtgagcatctggaaactcacgtcgcaacctattttcagaccgccgtcgaagcggttgaagtagccgtcttcaaagctgctgaaggccgcacgcttgccgtagtccttgattttaccgcctacgccgcaggccagatagccaccaccgtagggctcgatactcacgttgtcggcaggaaagaacttgtatttcaccaccaatggcacttcaagatagttcaggccgtaagtgaatttgcccgaaccgtagttgctcttgccgcctttctcggtgtagaagaggcccgtctcgaagtagagtggggcagcagtggtgagccgtttgcccacaatggcccctacgttgaggcccgacttggcactgttgccgtcgagttgcggcgagtcggagctcacggtgctcacccccagtcctatgcggaacccgtagtagatgtcctgttcgggatatgtacccatggtgtaattgttgtcggagtggtggcgatggcggggcggaatggggcggccgtcgggataatactgtgccgaggctggcagaatggaggcgataacggccagtgaaaggaatagtaactttttcatattttttgtcttttaaagtgtgaaacgttgttttcgggtatgaggcttccatccgttcgccgtcttcggagaaggttgacggacaggaggagctcaatgatactggacgtgcagacaggcggaaagcatgttccgcatagtctccacgctggcaaagttaggcaaaagtttgtgaaccacctacggattttgcctatttgagcataggcatatccctaaatcaacttttttacgctaagttaaaagtatagtgaggttgtgaaaaagctttactcctcgctttggaggattccgatgaggttgccattcggctgagacgattttcccggaaaagtgacttctctttgacatccggcccaaacggtcttgcaaaacggccacacttggaagctcggtcgggccgaatgagaggctcgaagagcccctttcgcaaggccattcaggcctgaatagccccttttaggggggtgggggactgtaagtaggtgggtaatcaaaaaaagggaaacgcctatgcgcttcccttgcttatgcaaagatacgatattttgtggctttttgcaaatgtcgcataaaagatgctgacaaaaacggagtccatttactttatgtcgcccaccttgatcagatattcggctatctgcacggcattgagtgctgcgcctttgcgtatctggtcgcccgtgagccacagcgtgttgccattgtcatcggcaaggtctttgcgcacgcggcccacatacacatcgtcgtggcctgcactttccaacggcatggggtagacatagttttgcgggtcgtcgacgagtttcaccccgggagctgcctccagtgcttggcgtatccgggccacgctgagcggctgctcggtctcaaaccacacgctctcggagtggctgcggagcgaggacacgcgcacgcaggtggcacttgtgcgcacatcgctgtgcatgattttgcgcgtctcgttgaacatcttcatctcctcctttgtgtagtcggtctcggtcatcgagtcgatttgcggtatcacgttgtaggccagttggtgcgggaacttcttgatggtcttcacctctcccgtctccacgatctctttatactgctgttgcagttcggccatggccacggctccggcaccgctcgcactctggtaggacgagacatgcacttttctgatggggctcagcttgttgatgggttccagcaccactaccatcatgattgtggtgcagttggggttggcgatgatgccgcgcgggcggttgagtgcatcggccgcgttcacctccggcaccaccaagggcacgtcttcatccatgcggaaggcactcgaattgtctatcatcacagtcccgtgcttggtgatggtttcggcaaaatctttggatgtgccgccgccggcagagacaaatgcaatgtcgatatccttgaaatcatcgttatgctgcaagagtttcacttcatggtcttttcccttgaaggtgtattttcggccggcactacgctcgctgccaaacaacaccagttcgtccatcgggaaatttctctcggcgagaatgcgcaggaactcttgtcccacggcgccacttgcgccaacaatcgctactttcataatcggattttgtttaatgaaataaagtatgtcggttgcaaaattacaattttttgcgctataaaagacaataaatcgatgttttttcttttgctttgatgcaatatcggtattttggacgcctccgcaggcgactttatggcgagtgtggtgacaaaaagcggacaaaagattttgatattcagacgatttgcattaactttgcacatattctatatagaacgatccgtccaccaagcccgctatgttgtatatctcgcattatttccccatcaccgacccgacgctcatcttttttgtggtgttgatcatcatcctctttgcgccgatcatcatgggtaagttgcgcatcccccacatcataggcatggtgctggccggagtgctcgtggggcagtatggactgaacatactcaagcgcgactcctcgtttgaacttttcgggcgcgtgggcctctattacatcatgtttttggccgctctggagatggacatgcagggcgtgaagcgcaataagtatcgtatgctcgctttcggtctgttgactttctccatccctttcatcctcacctatttcatgggcacctgcctactcgactattccggttcggcttcgctgctgttggggtgcatcatggcttccaacacgctcattgcctaccccatcgtcacgcgctacgggttgcagcgcaagcccagtgtgaccctcagtgtggggtcgagtatgctctctctgctcatggccctgctcgtgctggcaggccttgtggcctcccatcagaactcgggtggggctgctttttgggtgtggtttgctttgcgtttcgtcctctattgtgccgcgatgatatggctcatcccccggctgacgcgctggtttctgcgccgctacagcgatgcggtgatgcagtttatcttcgtcatggccattcttttcatgagtgccgccctttccgacatagccggtgtggagggaatcttcggcgccttcctcgccggcctcatcctcaatcgctacattccgcatgtttcgccactgatgaatcgcattgagtttatcggcaacgcactgttcatcccctatttcctcatcggtgtggggatgattatcaatgtggggctgctcttcagtggaggccacatcttgtgggtggtgttctgcattgtgctcttcggcacgctcggcaaggcccttgccgcctacggggcttgtctgggattccgtctgcccgtgtcgtcgggacacatgatgttcggtctcacttcggcccacgccgccggcagcattgccatggtgctggtgggaatgaggctggtggtggctccggggaggtatcttgtggacgatgacatgctcaacggcgtggtgtgcatgatactctgtacgtgcatcatctcgtcgatgatgaccgactggtcggcccgtaaaatcatcctgcgcgacaacacgctgcccgcagatgacggccggcaggccgacgatgagaaaattctcgtgccggtgaagtatcccgaatatgccgacctgctcatgagtctggccatgctcatgcgcaatcctaagctcaatcgcggacttatagggctcaatgtggtctatgacgacaaggacatgcgctacaaccaagagcagggccgccgccttcttgaccattgtatgcagcttgctgctggtactgacgtaaggatgcagacccaagtgcgcattgccgccaatatcgccaatggcattaaacatgccttcagcgagtttcaggcatccgaaatcatcatcggtatgcacatgcacaaggaggtctcaaccaagttctggggagagttccatcaaagcctttttaatggtttacgccgccagataattatggcccgcctccgccagccgctcaataccatccgccgcatacaggtggctgtgccctcacgggccgagtttgaaccgggattctatcgctggctcgaacgcctgtcgcgtctggccggcaatctggagtgccgtatgcagtttcatggacgtaaggagtcgttggcccttatcaacgagtttgtgcaaaaccggcatcctgccgtgagagccgactatgctctcatggagcattggaacgaacttccgcgcctggcttccaccatagcctccgaccatctcttcgtggtggtggcggcgagaaagggtacggtgtcttacaagacggctctcgaccggctgcccgatgagctgacacaccacttttcgggtatgaacttgctcatcattttccccgatcagtatggtgaagcacccgactccatgacctttgcggagccccagcatcaggaggaagtaagtgcctacgagttgctcagttcgtgggtaaagcgccattggcggcgttgaaatctgcgtcaaaggtcgccggaaaagacggttggcggtaacaggagcggcaggaataagagtccgagcatctctattaagtaacaaaaatcacatcaaatgatagacatcaaaggtataaccaagagcttcggctcgttgcaggtgctcaaaggcattgacttgcgtatagaccaaggagaggtggtgagcatcgtcggccccagtggggcgggtaaaaccacacttttgcaaatcatcggcacactcgaccggcccgacagtgggcaggtcgtggtagacggtgtggatgtcggtaagttgtcaacgggaaagttgagcgacttccgcaatctgcatctcggttttgttttccagttccatcagctcctgcccgagttctcagcacttgaaaacgtgatgattccggcgtttatcgcgggtcggagtaggggagaggccaagcggagggcaactgaacttcttgactttatggggcttgccgaccgtgcttcccacaagcccgcccaactgtcgggaggcgaaaagcagcgtgtggccgtggcccgtgcgctggtaaacaatccgtccgtcatactggccgacgaaccttcgggcagtctcgattccaagaacaaggacgagctccaccgccttttcttcgacctgcgcgacaagttcggccagacgtttgtcatcgtgacccacgacgagggacttgctgccatcaccgaccggaccatacatctgaaagacgggcaggtggttggagactccttgggtgctgcccatcctgaacggtctgccggtgctgagccggctccaagcacgccgtccccggcagaagaaaacccggtaacagaaggaaaagaaaatgccggataatcatttaaacaaagagaagataatggaaaaagaaaatcagtataacgacccacgccagccgagacttggcgaatacaatcggttgcgcgtgaaagaagttgcccgccgcgaaggctatggcgaggtgttcggcatgtatctcgacggaggccgcgagggagacatcctcatgccccagcgctatgtgcccgaagggttgcagccgggcgacgaggtggagtgtttcatctatctcgaccaagacgaacgccccatcgccaccaccgagaaaccgctggccaaggtgggagactttgcctatctggaagtgaaatgggtgaatgaatacggagctttccttggttggggactgatgaaagacctcttttgtcctttccacgagatgaaacgaaagatggtgataggcgacagccatgtcgtgtatgtccacatcgacgaggagagttaccgcatcatggcttcggccaaggtcgacaagtttctcgacacctctcgtccgccctaccggcccggtgatgaagtggagctgcttgtgtggaagaagaccgacctcggcttcaaggtgattgtggacaaccgctttgccggcctgctctataaagaccagatatttcaatatgtgcatgcgggcgaccgcatgaaaggctacatcagccaagtgcgccccgacgggaagattgatgtggccctgcaacctgcgggccggaagcagacgaccgactttgccgaaacgctctatcagtatctcaaggacaacgacggcacgtgcgaccttggcgacaagagcgaggccgatgacatctatgcgcgtttccacgtgagcaaaaaggtgttcaagcgtgctgtgggcgatctctatcgccgtcggctcatcgaggtgagtcccatgagcatcaggctcgtttaaggtagatgaccgcttccacaacaccccttgcgaaaagataaacgatgaaggccagccacaacgcgtggttggccattgttgttttcaggcccatgtagacggcgaagaaacacacagcagccatcaccgacgacagcagcagccccttggtgtgggtgatgcccacgaagatgccgtcgaagatgaaggcggccatgcctgctgccggtatggccactgcccacggaaagtaggctcccgcggcctccacgaccgtctcatcgctcgtgagtaggtgcaggaaagcgtgtcccccacttatatataataaggtgaaagctaccgtgacgatgctccccagcacgaagagtctccttaccgtctcgtggaaggcctgccggttgcccgccccgtggtaacggccgcaaagtgcctctccggcgtaggcgaacccgtcgctgaagtaagagaatatcgtgaagagctgcatgagcagtgtgttgacggccagaatgagcaccccctgccgcgaaccggctgccgtgaacgagagaaacacggccacgagaaagagtgtgcgcaggaagatgtcgcggttgacgacgaagaaacggacaagcgcttcgcgattgaacagcccttgcaagcgggcgtggatgcgcaaccggccgtagtgccgccacactaatgagacggccatgagcagtccgccccactgggcaatgaccgttccggctgccacaccggctatgtccatccggaaaccgagcaccagcgtgaggctggtcacgatgttgatgatgttttgcgagatggaaaccaccatcggcaggcgtgtgttttgcatccccacaaaccaccccgtcagtccatacaggctcagcatggcggg

SEQ ID NO: 627 - DNA, 23132 bp, synthetic construct
  misc_feature 1..23132: note = Synthetic
  source 1..23132: mol_type = other DNA
gatcaaatcgagtttcttttctgcctctgcaagtttcccttgtttgtcaattatttttatcttcgttttttcaagatcatcaaggattcttgctcgttcaatatccccctgttccttggtaattctaccagctttgacatcttcctctaacttttcaatttcatgcaacaagtcggatttatgtcgttcaagattagctatcatggtagtaagacccttcaacctcgcctctccatgtttgatttctttttcttgttcagatagtctaactttgtttcttgagatctgctttttctgctctgcaacatcttcttttaagctatccacttctcccttcagttcctctcttttttgtgcataatattcacccattgttctatgcttacgcccagtttctgcaatactgtcaccacggtcgagagagtacttcttattaacttcagaaagctcattatgaaggttcgtcatacgctgactaaattcaaatttactcttcccagccatgaccactttccaagagaatttattctgctctgtaattggtaaaattgtgcaatggatatgtggatttgtttcatcaagatgtactataaaagctgcaatgtttttctctccaaactttctactcataaagtcgtacatatcgactgcccatttttcaatttcaggactgcgagttatatgcgaattgtcagcccctttatccaaatttacctgctgatcaccaaaggcaagatggtgcatctgttctcttgatccaccaagaatgaaattagcaattgttctatactttggttcatccagtccgacattaggatcaatgatgtttcttgcagccaaattatcttttattcgttttggaatggatagctttttatcaacaggagtaaccactccaccattacgaacttcaaaattgaggtgttcacgagtggggtcaaaagcatacgaaagtttacgcttatacgcctcctttgagaagtttcttagatgctcattactttgtgctgtggtgatgcctttagatgccatcaaatccattacttgttttgccatattgcattattttgtagtttcagggggggtggtctctgataaacttaggggtggtccctgggggggtggtcccttatataaaaattatcaaagagtggtctctcgtttttgtgagtcagggaccaccccctaatctttgatatttaggggtggtccctggccttgtaatttgttgaaattatgatatttatttattttagaaggggtggtccctggggtggtccctgagatgaaattatcaggggggtggtctctcgtttttgcgagtcagggaccacccccctaatctttgatatttaggggtggtccctgggggtggtccctgactttgtaatttgttgaaagtgtgatatttatttattttagaaggggtggtccctgaaatgaaattatcatagggtggtctctcgtcttatggggacagggaccacccccctgttttttacattgtcaaccctcggagagcctaatatagacacggcttgccgcacgtagtccccctcctcgtgaggggtgtctataccccctcacgaggatgaggggggtattaggctacctcccaatgtaaaaagtttaaaacatttttctatatcagtttgttctgcgcaagcgcaaacgatatattttttcatcatttccatttggtaattaaaattgagatgtcaaagttggaatttcgggatgcgaaaaaatgatcgcgtcatttttctacagcattttcagaacgtaaaacaataatttcattccgaaccctgaccatcttgcttgtgacgacactgaaaatttcaagtatgtttttcgactctaaaaacataacgaatttcattactgaaggacgactccatccccaagcctttgataaacgctctatatttaccgccatagcctcttttttacttttagatgcagaatagtactctatgaggttttggaacgcttgtaggcgagaaaaacgtcttttgtttttatatgaataatcaacactaagaaattcaagaagctcaaaagggattacaacatgatagtttttgttgatagaaataccatcttctataccctcttttttattactattcataagaacatttttatataaaaatcatatgtaaaaatcttgtactatttctccaacatttttatataaaaatcttggagaaaaccgttcatgcagccaccctgtttttcctattataaatagggataggtttccgacctttcggaggtaagctatcatagaaattaggatagaataaagctgccattgtaataatgagaagtacctctgaaaaaagcatgtatcgtccttcatcgaagatagaaaagaagatcataatagctgataatacaagtaaagttttcttactattatgtattattgttagtatccagtttgccattctatatgagaagaaaattagtgttaaggcaaaagatacaagatatacgattggacgagttaggaaggggtaaaggtagttactaaatttcctttgcatgaaaggagcaaccgttttcttaccactaatgctaagttcattcagtctgttttctttaaccatagtcttataagttgtagccacttcacttgacgcaaagttatctacaccctggaagagaagtagagatagtagaagtaataatgtaaagaattttcttggcttttctctacgcttcatcttatcatagaagttgataagataagtacccagtcgccaaatagccttcttcagtttcgacatttggggttgaactgccgtaaatgcattacggtatctctttatgctttctctccttggtttgataaaaaaatgatatagaaaaggaatactagtcaatacgaaaaataggactagttttaatattagtattaccatattatattagttaaaatgagacaacattttggcataagattcttgttcaaggatattcttctgaagccttgtcatacgattacgttcattaagaagatgacaatacatcgtctctaaactttcaaagataaaaacagtcatcgaatcaatgagaccatattgtgtagaagagaaatagaagaccaacatttcatcttctacaggagttgagtaggcaacaaccttatacactttaccatcctcctctctagttgcataaagaacatgaagatgtagtttttcttccatacttgttatgaaattttctaacatattttgttctttcaactgaacgacaatctccgaaaaagaagagtgctgaataacattaatttcttgttctgagaaatattcaggcaacttctttatcatttgttgatatagaagaatgatagaacgtttcactgttccttcctccaacgaattactattcaatactttttccatagattttgttgttataaagttgatgatatatatgacttcaagaaataatcagatagcgtattaaccagtttatcttcttgttcttttgtctttttttgattatccaaacgagtaagaagtgtaggtagctcctttgaaataatcatgagttcttccctttgcttttctgtaagtgcagcagtagagtactcgtctatcgatacgtatggttgaattaacatccagcgataacttaccctttgctgctggttgagtttcttattatttagaatatcctccctgcatgctattgcattttgcatgatacgtcgattaaagcgcatagttaagtataacattgttctatcattcacttcatcactctttcttccaacagaagaatagaggcgttcgaagagcctagaagtcttctctgttagttgttgcatatcatgaactggtacattactaagatgttccatcagtgaacggaagcacctatcctcttgctggataaaaacaagcagctgtgcctcctgcgtaaatggttgcgtattattaagcagactgttataaaccgacaatatctttggaagtcctttaatagtaggctcatcatctagtttggcataaaattctgaagcctttttataggtatcggacttttttattttatcacgatctgaagctgtgttaagtttcagatacattacatcttggagtgagcgttgttttgaaaaggctaatcgtgtaagctctgttctcattgaatcagagacaacaaaatatgccatagcaataggactcttcagattaatggttgagtctctagaaaaaacactataagctgaatcttgaatttcttgccattgtgctgtaaggtctgttaccttttcaatatcagcatctttgatagcctgaatttctgtcagcttatttttacacgcctctactgcttcagtagagtttttgaaagatggatgtgacgtacatgaatagaaaaaacatgtcgtcaaagctagaaaaattgatatataatttgtcttcataaaaatatgtttttattgctgcgaaagtacaaaggaagttgcaaaaacatatagcaaaaaaaataaatcttttatattaaccttttcaaaaacttttgcaatattcttacattgaaaagttagtaattaaaacgtttaataagttccaaatattaaatattcagaacttattaataaaacaaaattgatattctcaacacgcttcaaatgttaattttttcatttataaaatatttttctttatattaatattatcattataatcagctctattaaggtatgcaacaagtccccctgctaccaataatgaaagaaatgaaacaagaagagaaacctctattgcagcagcacatattatgattgctataagaataagatgagtaagcacaacttccttgtttgagaagctctcttccgttaaagaagagaagaacaagttcttggctttccaccattttgtgatgacttcagttactgaagtctccttacttttgtcaacagatatagttttcatttgaataaaattagtgttcataatcatttaatttataaattataataggtgtgattttttcagtaagatattaaactgtgtaatcgtgtgcatgaccacataatctccacacgttaccctctctgaacatttttctaagaatggtagttagcttgacctttctacattcataggaattgtatattccaagaagttctcttgcagcttcaatttttttcatatttttgttgtttatgaagttaatattaatttcgggcatcctgattctcaaccttaataggtttttggatcttcgacccgaacttttttttattccggtgtaaccgtcatctcgaaccttttatgtgcaaggtaagagtactggtgaaaaggaaagtaaggcaaataattgatcgataaatttttcaggaaaccgcaatctatttgatttcggagggtcttgaaaaaattattgtcaataggggactggtatttgccgtgtttcctggcagtactacctttgcatctaaaagtcgatagatgactacaagcggagaagagaagtgagtggccgagagcagagacaaattgaaaacttagataaaaggaaaagtaaagtagagaaagtaccgtaggtatattatataggtgcatatacgtatagacttatatacgtattgctgcatagacatcggtacataaaggaatggcactcatctttagatgcgtgcctgttccgtcaagaaaccttgcaggaaaaaaagagagacccttcttcaaggatctcccttctctaggtaaggttgtttaagccttctttttcttcttctcctctttaggaccgtcttgttttttatccctgacacaagctgtaacctttgtggcaatgttcttaagaaccgtaacgttcttgccgtccttggtgtagctctctggcttgaaaaagccctcgacagttacttctttgccttttttcagcagctccagtgtagctgtatcttctttcttgacccatgtttcaaggcttagaattgaagagacggttaccgtctcgttacctctgcgctctgaatgtttgataatgataccgaagcgagcgatggctgccttatcaaagtttttaacttctgcgtctttgcagatgtaacctgtaactgaaaaattgttcattgcgttcataactttattttttaagttgatatttattttacgtgcataaagaagcaggcaaggagaaggtgtgcaaaggcaagggatgaccgttatttttttcatctttgaccatggagtttttggatcaggagcaactgcaccccaaaaacttgaaaaaaatcacgaggcaagcccagaggcgacccttgcagaacaccgcttgcgctaactttgcaaaggaaaatgaatgtcggcttatttgaaaaatataaagaacgagatggatgatagaagtggaaggtacatgaaaagacgctaccaaaactaaaaaggcagtcactgcttcaggtgtcaagagaacatacagagtatagaggataagacaaggatgttaccaccgtcaagccaggaacacgagtcaagaaaggagtacaaataagacatctctgccgaaaaaaggatgaagtacaagagaataaaaagaaatgagaagagagccactccaagaacagcaagagatacctcaaaaagtattgccactaaagatacgctgtcagagagaaaaacaaaacgatccttataacaagacggtaaagaaaagaaagctgtacaacaatacaaaagggagacttaaagaagggtcaaccttatgaataaatgtctgcaaggctatctgcatgggcgtatgggcgtattgaagtatatataagaatatgactatacaacaatattagaatacatcaatagaagtataagtatatagagtaatagagtaatataggaaaagggaagtaaatccaaatagaacaatgggctgtgactaatagtctctgccgtaccgctttaaacatcgctttcttctgcaaagacatcgtctaaaggagaaagcgacgcaagaagaagttggataggttctatccaaaaaatagatgtggaagataaaactgcaaggggtgtggggcgacaagccccaccgaaaaaaacgcccccatataatcatatgggagcgcataaacttcataaaacaaatttccgtaagtcaaccatggaagagttgaaaacggctttttcgtaaccttcgctttttagaactgccaactcttgtcttgcaaatgagtttgcttgtgacttactcaatccgaatttacttcgcattggtctgtttgggcgcatagtatctacttgataaagttcttggtaaatagggatatacttgatacgctttataattaatactcttggatatcttatcatagttctatattttaagaattcttggatagtttatcaacgtaaacattaaagatatttgattcaatctatatatgaaattttcggtgcaagcattttgtacattccattacgtttgtgcgctgcatatctatatcttatttcaccgataacaactccattcattgtaatagtatctttatactctagcttttttgttatgtgtatgttattactctcacaaatatctaaagaagaagtacagacaaaatactttgaacacattccgtagttagctctgtctattcttccttttacaatgtcaaggattgctttcttaatttttgtctccattgcgtttattttaatgacttattgatgttttatgtatttcaatggtaaggtttttctgccttaccattgtattgttagagattagcaagtcgttcagttgcttttattattaagtcttttaattgctctttgctcagttcgggcaataggtctatcaccataaagttttctgtatcttcaatatcaatacccttattagcaaggattgtttttatgtctaaacggctaaactcattgtacaccttacttcttgtttgggtttcattttcaaaagaaatagtatcgtctatctctatcagttcgcctataccaataaaagcatctatgcggaatttacgttcctcttgcttgtcagtatcgaaataaacaaagtattgccctgtaatgtctatattatccgaaaggatgccgtgtgcgtgtcttatagagccatctgttttacgataagcgaaagcggtaacaccctctttcttcatcttctcttttagtttgacaacaagtgcaagacaaatatcatgatgctcttctattgttcctttacggagttcacctacctcgacaagattatctatgacaaacgacctccaacccttacaatcaacatcatagtaagcaagtgtatatttgcattgttggtgctttttgttgccttttattgtgtgtcctataccatacaatgttccgcaagcgtgacgctctgttccatctttctttctatagacaaaagaaacaattcctctgcgaagtctatctaccaatgtttcaaaaagattttccatactcttgttgcttttgaagttttataattatttcgggcaacctgattctcaacctttagaaggttttggatcttcgacccgaactttttttattccggtgtaaccgtcatctcgaaccttttatggtgcaaggtaagagtactggtgaaaaggaaagtaaggcaaataattgatcgataaatttttcaggaaaccgcaatctatttgatttcggagggtcttgaaaaaattattgtcaatagggaactggtatttgccgtgtttcctggcagtactacctttgcatctaaaagtcgatagatgactactggcggagaagagaagtgagtggtcgagaacagagacaaaatgaaaacttagataaaggaaaagtaaagtagagaaagtaccgaagattgcataagcgtatgtgtctataatccaattgcaatagacgattgaattataatagtgatattgtataacccttaaaatatcaaaaacataggtataaaaagggtcgtgttaaaataatttaatcaaattattatagatttatcagaaaatttttagatattgaaaaatatgtacaaacatttaacttctcaacaacgatatacaattcatactttgcttgacaaaggagaaagtagaaaacaaatagcaatgctcataggtgttgatacttccactattacacgtgaatataatcgtaatagtggaaaacatagatcatacaattgggaaacagcacagaaaaatgcagaattgaaaaagaaacgcaaaccagggaatcatgcaaaatcaaaagaaataaaagaagaggttatacgcctattagaaacagaacaatggtctccaaaacagatcagtgctgttttaagagaaagaggtataattatttctcacgaaactatatacaggatgatacgtaaagataaaaaagaaggtgggagtttatacactcactgtaggcataaattaaagcaccgttcacgtcctgtaggtgattgtcgttcaactatttctgacagaataagtataagtgagcgtcctgctgaagttgatggtgttagatttggagactttgaaatggatattattgtaggtaaaggaaacaaaggtgcgatactaactcttaaagaacttagtacaggcatgttgttcatgagaaagttaccgaaaggaaaagatgctaaagaagtatctaaaacagtagtaaggttattgatgccatataaaaaattcattaaatccataacaacagataatggattggagtttgccaatcataagtacataacaaaaaagcttggagtaacagtttactttacagatccgtattcttcgtggcaaaaaggagctatagaaaacataaatggtctgatacgccagtatattccaaagtcgacatgttttgacgacattagtcatcaatatgttgcgaaaattactgacaaaattaatcttcgaccaagagaaaaattaaatttttgtactccttttgagtgtttttacgaaaagattttataactttgcggtgtagtgcatttgcacgttgaatccgccataatcaatcttcgcctctttgacagaacaaatgataaagaaataacctctgagtatttgtcttctatggaagactacaccaaactgtttatatatctcaacgacagaaaagaaattaatcaagaaattctattgaaagatttcttcaaacaaaagaaagtcaagatgggtatggaaaaagaatttcctatccgctggaactatattgaagacaaagagaagaaatatccatgcaacgagacacgtcacgaactacttgctgcattagataaagcaggtatagatcatagttggttagatgataaagaacgattctaccgactctggcatcttctctattctgttgagtccaaggaagaagcagaaggcgctttaagaaagttgaatgataatgaagactttgtaaatgctttcttaaagataaagccatttaagaaggaatatggtgcttattcggagaaagctataaagaaactattggctgtaatgcgtataggaactctgtggaatgaggatgacatttgcgaacaaacaagaaatagaattcaaagcatcataaatggggatattgatgagaagattaaagaacgaatgggtcgcactttcagtcaattatccgattttcagggacttcctgaatggttagcttgctatgttgtatatggacgacactctgaaactacagatatacaacggtggacaaagccagaaaatctaatgtcgtatatcaaagggttcaaacagcattccctacgtaatcctatcgttgagcagtgtatccttgaaactctcagaacagttcacgatatttggaaggaagctggacacatagatgagattcatatagagctgggaaggagtatgaagagtactgccgaccagcgtgcacgtatgtctaaaagtattctacagaatgagaataccaacctgcgcattaagagtctcttaatggaactgaagaatgcaaaagagtttgagaatgtacgcccttactcacctatgcagcaggaaatcctacgaatatacgaggaaggtgccttacaggaattaactaaagaggatgaccaatatcctgagatttctaagatttcgcaaatggcacaaccttcagcaaaagaactacttaaatatagactttggctggatcagaaatactgttccccttatacaggtaaacctatttctctttcaaaactattcacatcagcttaccaaatagaacatatcattccacaaagtcgatattttgatgattcattctcaaataaggtcatctgtgaagctgaggtaaatcagctcaagagtaatatgttaggctatgaattcatcaagaaacatagtggagagattgtgcattgtacgatggtaggcgatgtaaagatacttgatgctaaggaatattataactttgtaacagagcattatgccaacaacagacgtaagaaggaaaacctcttattagaggatataccacaggaattccttaatcgtcaaatgaatgacagtagatatatcagtaaaaaggtgatggcactgctgtctaatattgtacgagaagaaggtgaacaagaagccaaatctaagtttgttatcgcatgttcaggaggcataacagaccgcctaaaacatgattggggactgaatgatgtatggaatagcatcgtttatcctcgttttgaacgccttaacaaactaaccaatacagagaactttggacgttgggagaataaagaaggaaaaaaagtattccaaacatcagtacctttggaactacaaagaggttttaacaagaagcgtatagaccatcgccaccatgctatggatgcactcgtcatagcctgtgcgtcaaataacattatcaactacctcaataatgaatctgccaagagtcaagagaagagagaagacttgagaaagaagctttgtgataagaatcgtattattcgaaaaccttgggagaccttcacgcaagatgtacgtacagctcttgaggatgtcgtagtaagctttaagaattatatccgtgtcatcaacaaggctacaaactattacgagaagtatgataaaaatggcaagaaaggaatagcagagcagaaagggcaagatatgtgggctataagaaagcctatgcataaagagactgtttttggtcaagtgaatctacgtcgtaaagttactgttaaactaaaggatgcacttgagaagattcctgctatctgcaacaaggaactacgtgactacatcaacatattagtagcgaaacagttcaataagaaacaaatacttgcacatttcaaaagcatcaactatcgtctaaatatgaaatctgtatacaaggttgacgtatggcagttcagtaacgaaaaggagcctatggtcgctacacgcaaatctgtagacacatcatttgatgctaagcgcattgctaccattaccgatactggtatccaaaagattcttcgcaactacctcgaaacaaaagacaatgatcctaacattgcctttactccagaaggaatagcagaaatgaacaagcatatcactgaatataacaatggtaagcaacaccaacctattctgaaagttagagtctcagaacctaagggagctaaataccaagtaggtgaaacgggcaataaaacgtcaaagtttgttgaagctcaaaaagggacaaacctttactttgccatctacgaagataaagaaggtaatcgttcatacagtaccatcccattaaatgaagttatagaacggttgaaacaaggattgtctcctgttccagatacgaatgaaaaaggtataccattgaagtttcatctttctccaaatgatttagtatatgtacctaaaacagacgaagaaaatgaaattaaaacaggacaaatatataagtttgtagattctagcggaacaacagcaaactttatccctcatagagtttctaacctcatttacaatgtagataaaaagattgcagaaaacttctgtaatcatgaagtaatccagaacgaatatggaataggcagtccacaatcaaagaatcagaaatcaatcactggcaaaatgattaaagctgtctgttggaaacttgaattagaccggttaggaaacatacttaagattataaagtagaattcattgcctatgataaagaaaactctatgcttcagcaatccaatctacttaagtttacgaaatgcacaattagttctgcatctaccagaagtagaaaataacaaaacattgcctgaggctataaaaaaagaagcagagcgcaccatcccgatagaagatatcggggtggtgatccttgacaacaggcgtattaccataacctctggagctatggaaactttgcttgaaaacaactgtgcagtcatcacttgtaaccaaaagagtatgcctgtaggattactcctgccactatgtggtaatactacacaaaatgaacgctttcgctctcagttagaagcgtctttacctttacggaaacagctttggcaacagacaataaaacaaaaaatccttaatcaagagtatgtgctacggacaaatacagataaggaaaccaattgtatgcgtgtatggtctaatgatgtacgtagtggagaccctgataaccttgaagcaagagctgctgcttattattggagaaacgtctttacaacatatccgaactttgtaagagacagagaaggagtccctcctaataacctcttaaattatggttatgctattcttcgtgccataatagcacgagcattagtaggaagtggtttgctgccaaccttaggaatccatcatcataataggtataacgcctattgtcttgctgatgatattatggaaccctatcgcccttatgttgatcaattagtgttagatatcattcaatgcaacttagaaatatctgatatcacacgagatttaaaaatgcaacttctcggtattccaatgttagatgtagtaataaatggtaagcgcagtcctttaatgattgcagcccaacaaactacagcctcacttgcaaaatgttttgcaggggaatgtaaacgcattagttacccagaaatgtaaacttatatgtcaggatttgagcgcttcagtgagtaccgaattatgtggattcttgtattctttgatctaccaacggaaaccaagaaagagaagaaagcctatacagatttccggaaatcccttataaaggatggattcactatgtttcagttttctatatatgtacgacattgtgcaagtatggagaatgcagaagtacacatgagacgtgttcgtgcattattacctaagataggaaaagtagggatactttgcatcactgacaaacaattcgccaacattcaactcttctatggacaaaagacacaaactccaaatgctgctggacaacaattagaactattttaaaacagcccaatatcattaaaaaagaagaaaggaaatagataattcatagtatcaaaacaatgaaattaattttgattacttttgctgtcattttaacattcgcttctaactcattgtaatcaaggaatttattcatggaggagaaatgacaagaatgacagcaaaattgattatataaaaatttgcatacttatagtgtgctaagagacacacagaaaaaaaattataaatcatagcaccctcatatttactctacaaggcttttcgttgaaacatcatttctttccatttggaaaaataatcttagctttgaaagaattgctgatacagattacgagatgactacagattatggagttgtacacgtagaaaacattctcttccataagcatacaaaggaaaaaagatatctaccataaaacaagaaaaatcacatatcagaataagaccaagaaagggaaaatcagattatatatctctgctgaccaatgattatcagatggcggcagaagatataatagctatctataagaaacgatggctaatagagaacttatttaagcaattaaaacagaattttcctctaagatacttctatggagagagggcgaatgctataaaaatacaaatatggattacacttatagccaatctgtttataacacttgtgaagaataaaataaagagaccctggagcttctcaggcttggctacaatgataagaattctacttatgagttatgtatcaatacaaagtttctttgagcagcaacatagagattgggaaagattgattacccaggtaaaagccccgccagaagagctgtcattggtctaggggggggtatttgaaattagaactaatcatgagtatttcagcagggttgggagagaatattgcagcatatagtggttttatcggacagcaatatattacaatacagtcgctttaatcaatatacaatacaaaaaatcccattcaaaaggaatgggattttgagttgtggatcaaaatttatttttacaacaactttatatgtcgctaacacacaatgctttaccacatatcagttgttattgataccacaaaggtaagacttttcaagcaaatcacaacatgtctggccgtcctctgccgaacgacattgttgttattgataccacaaaggtaagacttttcaagcaaatcacaactttcacaaaaagagtcccaccgatagcagggttgttattgataccacaaaggtaagacttttcaagcaaatcacaacttacatcttcctcggtggtgttatcagtccgttgttattgataccacaaaggtaagacttttcaagcaaatcacaacaatgaggacaataccgttcagactactcctgttgttattgataccacaaaggtaagacttttcaagcaaatcacaacagtttgtgcaagaaaaaagcgtattatttgttgttattgataccacaaaggtaagacttttcaagcaaatcacaacagaaccttaatattgaaaaaacgtagttcgttgttattgataccacaaaggtaagacttttcaagcaaatcacaactaatattgttactacattccagtctgttatgttgttattgataccacaaaggtaagacttttcaagcaaatcacaacccatagcgatagcaccttaaagcgtagcgggttgttattgataccacaaaggtaagacttttcaagcaaatcacaacggtttttggatcttcgacccgaacttttttgttgttattgataccacaaaggtaagacttttcaagcaaatcacaacgtgtttttcaggcatataaattctttatctgttgttattgataccacaaaggtaagacttttcaagcaaatcacaacagcgatcttagtacattcaatcgcttcatgttgttattgataccacaaaggtaagacttttcaagcaaatcacaacctaaaaaacattccttatttgttatatctagttgttattgataccacaaaggtaagacttttcaagcaaatcacaactcgcatgtgcataaatggtatttactgtaagttgttattgataccacaaaggtaagacttttcaagcaaatcacaaccagctctctgtgactgctggtatacttatagttgttattgataccacaaaggtaagacttttcaagcaaatcacaacatttccttgcgaagcataacaaggggtatagttgttattgataccacaaaggtaagacttttcaagcaaatcacaacagaggtactggtcaagctctcggctctcgtgttgttattgataccacaaaggtaagacttttcaagcaaatcacaacgcatgacagctatctatgcagatagcagcgttgttattgataccacaaaggtaagacttttcaagcaaatcacaaccatgctattaagtcacccattgctaggctagttgttattgataccacaaaggtaagacttttcaagcaaatcacaacacaatcagagacataatacagggaatttaagttgttattgataccacaaaggtaagacttttcaagcaaatcacaacgcatactcagcctgtatgtttgatattgcagttgttattgataccacaaaggtaagacttttcaagcaaatcacaaccgctttgtaactcatcctactctaagatttgttgttattgataccacaaaggtaagacttttcaagcaaatcacaacaaaacatctttgggtacaaaaagagaaagtgttgttattgataccacaaaggtaagacttttcaagcaaatcacaaccaattagtcaagatacatttaggggattctgttgttattgataccacaaaggtaagacttttcaagcaaatcacaactatggatgatttccgtcaactcgtccgaaagttgttattgataccacaaaggtaagacttttcaagcaaatcacaacacttgtgcatggcctgtatgagcaagattagttgttattgataccacaaaggtaagacttttcaagcaaatcacaacatggcttgtatgaagatgacttccatgctagttgttattgataccacaaaggtaagacttttcaagcaaatcacaacagtctatgactaagggtgagagtgttgtagttgttattgataccacaaaggtaagacttttcaagcaaatcacaacttgccaagattggcggattgataattgacggttgttattgataccacaaaggtaagacttttcaagcaaatcacaactaagtcaaagtaacaaataaagagtaacgagttgttattgataccacaaaggtaagacttttcaagcaaatcacaactacttttgcttgacatgaaaacaatagattgttgttattgataccacaaaggtaagacttttcaagcaaatcacaactcacgagaagaaacactaccatctgttaaggttgttattgataccacaaaggtaagacttttcaagcaaatcacaactcgatagaagtgagagttttaagagtagaggttgttattgataccacaaaggtaagacttttcaagcaaatcacaactatcgcaaagtagtttcacgctgttttgcagttgttattgataccacaaaggtaagacttttcaagcaaatcacaacaagcattcgctactgatgcttctgtacgtgttgttattgataccacaaaggtaagacttttcaagcaaatcacaacaagggtcttcttcgcaagtgcatccttcaagttgttattgataccacaaaggtaagacttttcaagcaaatcacaacattctgaaagaagattagataaacaaccaggttgttattgataccacaaaggtaagacttttcaagcaaatcacaacactctggtgctaaagtagctgctaatagtgttgttattgataccacaaaggtaagacttttcaagcaaatcacaacctgctgacgctcaagatgacttcatgagtgttgttattgataccacaaaggtaagacttttcaagcaaatcacaacaacggcacaggtcaagcacttggttctcgtgttgttattgataccacaaaggtaagacttttcaagcaaatcacaacaaattcctgttctgtttgagtatcaccgcagttgttattgataccacaaaggtaagacttttcaagcaaatcacaacaaattcctgttctgtttgagtatcaccgcagttgttattgataccacaaaggtaagacttttcaagcaaatcacaactcttcgtcgtcgtcagctaactgttgtcccgttgttattgataccacaaaggtaaaacttttcaagcaaatcacaacttatcatttattatactttctcgtcacaatggggattgctattaataccacaaaaatggtatttttcgataaaaaggactatttataatagtttttgtaataattacaagggatattctttgccgtttacggggaattatatatctttgccgacgatttcaaaatgaggagtggaagactactgttaacgaagttctaaagacaaaaggacaaggggattaatggataacattctgagtgagaaaacgagttcattattagggtaatagtgagcctatcatagggtaagaccatatccaggatggaagaaatttaaaatcatcgtagagtaaaacctgctcacagtaattagaaagcctaattagagtgatcaaaaggcctactcataatagatggggagtctaattagagtaagtgaagggcctacttatcgtaaaaaagaggcttaattagggtaagtggaaggcttaaacatagcagatgggaaataaaaaaatagtggacaaaaagctaagaactggcagagagaaatataaaagagtgtttattaaattcatgatataaatcagtaacagattatgagtaaagttaatttattattagacttcgttctaaataccgcagcatcgctgaaaggtacaggtattcatttaatacgtatagcaatcttcatcatctttgtatggattggtgggttgaagttttggaactatgaggcagagggtattgtgccattcgtggcaaacagtccgtttatgagcttcttctacacaaagaaggcaccagagtataaggactacaagctcaaagaaggcgagtttgacaaggtcaaacacgactggcatgaagccaacaacacctacaccttctctcatggtttaggtattgccattatgtcatttggcattttgaccttattaggtatctggtttccaaagattggtttcgttggttcaggacttgtcattctcatgacgtttggcacgttgtccttccttgtcacgactcccgaagtatgggtacccgacttaggaagtggcgagcacgggttcccgttacttacaggtgcgggtcgtctggtcatcaaggatgtatgtattctggccggagcggtcgttgtcttggccgattgtgcacaacggattcttaaaaagaacaagagataaaacgattaaaacgacgagggggatgtggcgacacatccccttttttcgtctctctcgttaaacacgtcggctactgttcagtaacttttatcgcagaaaaaacattacacattatatcgtcttaccatgatatacactattaatgtatccgtctttctcccttccccgacctacgcatataacagaaagaacgtttcccctgcccataaactgaatatttacaccacgacaagagggtcagtctttcgcaagatggtcctaaaataatcctttcgtaaccccctttctctatcatacggagcctcaacatcatgtgtacaaatcctctacacaacatttgaaagcggtaaaaaacactcacagataagcctttcaagggtccatccaaccattcgaataatgtttcaagcatcccattacacatctcggagaacaccaataaaaccatgaaaaaacgttacataacaccgagttaaacaccctctacgcaagggtataacctcccctatcaccgatatcataacctacaagtaatcaacacattacagacagcattcgagaagatgcccttcttgcctcaagaagggccttctctgcatgcaagaagggcatgttctcgaacgtagaagggcctcttctgccaccttaaagagcatgtactatgaataagaggggcgaaaaatgttgacaaggggagaaggtggatgtggggacctcccccaacccctccgaaggaggggagcccaaccctgccatgagaaagtacacgatatttgtttttgtgggtatgaaatatgctgttacttacaagctgctttaagactcaatactaaacaacttgtatccacataacctttttatcaacacctaacattaaacacctaacacctacgaaagctcttcatcaacacctaacattaaacatttaacacccacaaaagcacttcatcaacacctaacattaaacatttaacacccacaaaagcacttcatcaacacctaacattaaacacctaacacccaacacatcaacatctaacacccaccccatcatcacctaccatccaagaaaacatccaataacactctctcagacgccacttttcttcaaacaatatatgataacagcatctattctcagagtaattcgctatctttgcagacaaagttgaatccaatgactacggaatacaatatacaggcaaaggtgcatcttcttgtcagttggctctgtttgatactactattcgttatcacaggctgcaaggagacagccccttcacggtcgttatcagagcgggagttccactatgccgaccgtttgtctgcattgtctatagacaagactggctattggattggcggagagacgggtgttatatggcatatcaatggagacgaaaggaaacgttattacacagggctcgaccgcatctatgacgtagcacgcgacccttcgcatcctaatcagatttggattgcatcacgtaatgccggtctgcagttatggaatatagcaaccgacacactcctccatcagcttgcctacgacattcctggcaagggtagccgttattctccctacgatataacgataacagccaagcacctctatgtcgctacgtcacaaggtcttttctccatgcctatcagtcagccgcagcaaggactgaccctactctatcctatcaaagcggcgtcagcaacccagtgttgcgaacccttcttggtcaacaatctctgccccattgatgacaagtggctctttgctgccacacaggccggagtaataagcataaacctacacacgcagaagacagaactacgtcataaaggtgagaatatacgcaaggtagccttctatgacggtcacctctgtattctttctgacaatcaactaacgatagaaaacatcaacggagctgacagcaagcactttccactgccccagtcggtgctatccttttataaagcaggctcgacctactatttcattacatcatcgagaatactcttatccgacaatttagagcgttttgtcagtattcctctccgcaataatgtacccgacaatccacatcggatagccattgccgacgatggaaacggcttctccatcctccttacaaagaacgctctatggcgcatccctcaccatcttggcatcttcaacgccaaccctccagttgttgcagcatgtaggatgggtaatgacctcatctatgtaaacaaccaacacgagctgtttcgccagaaagccgacgaactcatagccaagaaggtatatgactttgaagacgacgagttgccaaaagagatgtttgccgatggcgaagacatctattactatacggctaataatcaggtgttcaggctcaacattggcgaacaataccttatcaaccagctcttcaagcgtccacaactactgacacaaccaaggacacgtatcacctcgatggcccttctatcccatgaaaacaaactactactcggtgtgcaagactatctgctgtcagtagactgccgtaatgggaagacagacacggtgaagtcgatgaataacaggtatattacagccttccatcaaagccaagaaagtggcaagatatacatctcgacccttaatcatggtgtgtttgtcagcaagggaaagcaggtggaacgcatcgcaggaaccgagcacatggtgtttgtcaatagtctctgcacctacaattcgccacgccctcgcctactcctcctcaccaatcactatcttcaaatacaaggagctgactccattcggaccgatggaagcaatcaaatcttttgtatcaatgacagtattgtctatacgataccagagatggggatacataaatacaagataaaaaacaaccgactctacgattgtggtagtttctttgatgacatacacttcaatgctcaggccgctttcagccttaacaacacgctctacattggttctgaccttggcgtgatactgttgactccaggcaaagaggaggctgccaagtgggttacctttgataataaagcccccagcctacaacttattggtatcatcctcttcacgatgatgagcataataggtatcattctcttcagctatcgtaggcacaagacactgacttacaggcaactccagctaagcaaggacgaccttcgccatcgcttagaagcgttggcaggcct

SEQ ID NO: 628 - DNA, 21154 bp, synthetic construct
  misc_feature 1..21154: note = Synthetic
  variation 13034..13133: note = n is a, c, g, or t
  source 1..21154: mol_type = other DNA
gagggcttgcaactggattttaggactgacccctaaaaaggtaatcctactgcaaaatgaaaggttagatctctttttaatatagggtgccaaagagcataatgttctgataatgtgttgtaagcagggttaatagctttcatacctgcatctaagcgaagaataaaaaaattgaaattaaaacgtatgcctagcccatagctaacagctatttgtttgtaaaatttattaatttcaaattgtcccccattttgttctttataatttctgatagtccatatatttcctgcgtcaatgaatgcagcaccatctaatttccataataagtgtgtgcgatattcggcattaaggtctaattttatgtctcctgtctgattgatgaagtcaatacgcccatctgattttttaaagtttcctggtcctaattctctcacgctccatccacgcacagagtttgcacctcctgcaaaataacgtttttcaaaaggtagtattttactattactatatggataagcaataccaagatcagcatgtaatgctaaagaattgtttttatcaaataaataaaggtaagtatagtcaaggtcgaactttacatattgtgcatacgctatttttataaatttcttttgtccatcattgttacgttggaaattgaatataccgcttacagcgtctaacaggttgcctgccgtttctattctcgcttttaaagaatgtatcagtgttttataatttatatctattcctgagctcattataaataaatctctataattatattttaagatagcattacgattagaaatattatagagatagtcttgtttgaaagttttgctaatccacggcatatatacatagctcaacttaaagacgtcaaggttgtaagatagttgttttgtaatggtagaccagttatattttaatcctgatgaaaatactcgacgatgaaattctggacggttctgaaaatcccagcttataataaactctgtagttgcactactttttcgtcgaaagctcttacttgtaaaaggagctaataggcgagggaaaagcatacttcctttaatgctgtaatcttcatagtttttatcagaatagccctctaatcctttaatagcttcaaaagcaccacgcaattctatttcaagcttttcgctacctttaaacaagtttctgttttggtatgataatgtagcagcagctcctaagtcgcccgcagtatttgtaccttcaggttggagagaaatagtattaggcttgttatttaatatttgtatatcagcgtctaagtagcgaatgttagatgttttatataaaaactttttgcctataactaaactatcaatatgtggactttctttaaaatttatatttgtatatcgtatagagccaagacgggcaaaattattatatgtcttttgtaaatcagaagcagaaaaatatttacctttttcaaacagaatattatccgcaagtacacctcttcgcaaattaatcccattagaatctgctggaataatattaatattattaataatataacgtgggtgtattgatgtttttttatagttattatcgtaatatggcattagatgaagggttatgttaataagttttgttttacttatagagtcggcagtgtagtaaataaattctttatgaaaatggtaaaacccagagtcgtttaatatttgtgttagccttttacgttccgcatcaagcgaagatactgtaaaaggcatctgattgtttttataaaagcttttatttaagtgagatgataatattttagctattatagagtcttgaatgtcgtaagaaaagttatttatcatataaggctctcccggtgataagttgtaaatggcagtgagctttttacctcttatatgcttgttaaaagttactttagcatttatgtagcccatgttttgcatagcctttataaggtccttaatagataattttgcttgaagcgaatcgtataaaacaggtttttctcctatcttctttaaagtacggttaatccattttgtagtatctttacctgataaagaataggtttttaaaggcactttaaataaagaaaaccatttagaattgcctttttgcctgatatattgttctaacaagctcgtgtcaagtgttttaacatctgactttagcctaaccttttctaataaatattcattgtttggtacaaacttatctgaagagcaaccttctaagaaaaaagttattaagacagcaaagattagatgaagtttgctgcatttatttactgtcaacattatatatctatacataatttgcacaaagatagtaaaaaaacaagatgtattttaagcaagcggatatttttttgtatatttgccatgtggtttcaaaaaataaaataaagatttatagttcgcttggaactaagaaaggacgagaaaaatcatgtctttttatagctgaaggtccaaagatagtagacgatttgttacaagcaggatttgaagctgaagatatttttgaagatattgaggatataaaaaaaatatcatttttacagcatcctcaatcaaagttaggcgtttttaagttgaggcagaatcattattctttaaatgatgtgttaggcttgttctctacacaaaaattgtctttggctttagatggtattcaagatcccggtaatatgggaacaattattcgtatagccgattggtttggtatagaaaacatttattgttctatagatactgtcgattgttggagcccaaaggtggtgcaagctacaatgggaagtatagcacgggtaaatatttattatattaacttgcctgcttttatcgataaagtgcctaatgattgccctatttacactaccctgcttacaggctgtaatatttataatcaaaagctttcacaaaacggaatcatagtaatggggaacgagggtaaaggtatatcagaggagttaaggcaaaaagtgaataagagcctttatattccgaattattctttaaaggaatcttcagcagaatcgcttaacgttgctgttgctactgctattatatgtgcagaatttagacgcaatagaaattaaacactttaaaaggtttataataatgaaacaattgcaggaaatcgttcgcacgcatatattgaaacttagaagcgaaataacgcctctatataatcatcttttaggacattctaaacatattcttctcaattctaatgaaagtccttacaataagccatataatcgttatcctgaccctttacaagcaagattaaaagctgaaatatcaaagataaaagcagtcccggtagaaaaaatattacttacaaacggagaagatgaggccatagatctgtgttatcgtcttttttgtgagccaaatatagataatgttgtttcaatagctcctacatatattatgtataaagagcgtgcagctataaacaatgtagaatatagagcagtgccgcttgaaaataattacctattatctgctaataagttattgaaagtatgcgataaaaacacaaaaattatttggttatgttctcctaataatcccacaggtaataatctgataatagaggagatagaacagctcttggctgtgtttaagggcattgttgttattgatgaggcttactctgatttttctaaacacccagtgttcagacataggttagaagagtacccaaacttgatagttttaaatacgttttctaacgtatggggctgtgcaggtataagtttaggtatggcgttcgctaatgagaacataataagtttgtttaataagataaagttgccatacaatataagtatgttaacgcagaataaggcgttggaaattctatctcgtcgttttgatattgaagattggttaaaaatattacttttagagcgtaatagggtgatgagatcttttgcagagttgcctttttgcgagagagtatatccttctgatgcgaatttctttttagcaaaggttgataatgcagagtctgtctatagttttcttctttctaaaggtatagttgtatatatggaaaagcaatgtactaactctttacgtataactataggaactaagagcgaaaataatgagcttataggagctttaagacaatttaaatgattttgaaaaataggtaaactttaaaaaatttatttctaataaaaacataaaaaacaatgaataataaaaacattaatatagtagcattagattgttttactgtcaatcctggcgatttgtcatgggaagagataaaacagtttggtaacttaaccatttatcagcgttctacaccaaaagaagttatatgtagagcaaaagatgctgatataatattaactaataaagtaagtattaatagagaggttatagcttcgctcccaaatcttaaatatataggagagatggctactggctacaataatatagatatagaagcatgcaaggagcgaggcattaccgtttgtaacattcctgcttatagtacagacagtgtagcacagatggtatttgctcatttacttaacatagcaatgatgccagattattattcttctgaaacaaggcttggaaagtggagtagtaaaaaggacttttgttattgggacactcctcttatggagctttctaataagactttaggtattgttggtttaggaaatattggtaaaaaagtggctgaaatagcacatgcgtttggtatggacgttaatgcgtttacaagcaagccaagcagtctgctgcctgataacattcgtaagaccacattagaaggactgtttgctacgtccgatgtcgttacgcttcattgtccattaaacgattctacttataagatgataaatgccgaaactcttgcaatgatgcatcaaggtactattcttataaacactggcagaggcggacttatagacgaagatgctgtagctaatgcgcttgaaagccagcatcttagagcttattgtgcagatgttatgacacaagagcccccagaggctaataacaggttaataaaagccccacacgcttatataacgccacatatagcatgggctactttagaagctcgcagccgccttatgaaaatagctgtagaaaatataagaaaatatcttgaaggaaaacctcaaaatataattaacaagtaagtgtaacatatcttcttaaaatcatgataatatacaacgatcagcacttggtagccactctacaacatttattagagtttttaggtacttttgcgttcgctatatcaggaatacgtcatgctgctgcaaaacattttgattggtttgggggttatgtttgtggagtagctgttgccataggtggtggaactatacgcgatttgatgttaggggtaacaccgttttggatgcagaatgaagagtatcttctatgtacggggcttgcccttgtgtttgttattctttttcatcgcttgattcatcgtcttaacaatgcatggtttgtgttcgatacgttagggcttgcgctttttactttggctggtatgcaaaaaacgttagctatgggataccctttttgggttgcaatcacaatggggtgtatgacaggcgttgcaggtggtgttattcgtgatgttctgcttaataacttaccagtgatttttcgaaaagaaatatatgctatggcaagtgttgcaggagggtgtatatattggctactttatgaaataggtgttaatttggctgttactacaattatagctttcgtgtctatatgtataattcgtttcgtagcagtgttttacggagtttcattgcccacgctaacaagtgaggaggaaaaaaaataagaaaaaagtttggcagtcttgtaaaaaagctatacctttgcaagcgaaataaagaaataacgtgtttttcttttgtttcttaagtaggttctgtagctcaactgaatagagcacttgactacggatcaagaggttgtgggtttgaatcccgccagaatcactttcttttttaacgcttaggagcgatataaacacatgtaacacctaagtggtatcatacaaggcttttaattattaaaagccttttttgttttatacgctgattttctaaactacattaagtgatagaatactgatgccaaagttatcttttttcatcttatatatccactattctgtaaagaaaggataactctcacacgcaaaaatagattattttttatccatttttaggttatttttcaagtaaaaataacctaaaaacaatacatacacatatcatttctcattataaacattagttttttatggttcaataggttaaagatgattgttgcatacatatagcttagcatcttatatggcggaagatagcatggctttttgttttacatgcaaaaatgtttgttttaattatttatttgcatatttatttttaaataaaatataaaatgcttacatttgcctttaataacaattaagagtatatgtatggttgtgaaaatatgtcatataaaatatagcaataaagcataaaaaaggtgagaattacaagaattcccacctaaaatgttttcacaacggaataatccttattgtgatttgcttaaaatatcttgttgcaaatgtagaaataaaaatctaaataaacaaataaaacagtaataaaatatgaaaaatgttttaggattagatcttggctctaacagtgtaggctgggctttagtaaagacagaagataatggaaaccctattggaagcatcaaaatgggtagtagaataatacctatgagccaagatatattaggaagttttgagaaaggtgatactgtctcccaaacggcacaacgcacattgtatagaggcaaaagacgtcttacagaacggcatgtgttacgtcgtgaacgtttgtgcagagtattacatataatgaactttttacctgatcattttgataagttactgggctgggataagactgacaataaaacatatggaaagtttatagatgacagcgaaccaaaattggcatggaggcagaataaaaacgaaaaggagaagatggaatttgtctttatggactcatttcatgaaatgttatccgactttgccaagcatcaacctcagttaatagctaatggaaagaaagtgcctttagactggaccatttattatctgcgtaaaaaggctcttacacagcttattagtaaagaagaattggcatggatattactcaattttaataaaaaacgaggttattaccaattgcgtggcgaggaagaagaagagcagcctactaagaaagaggaatacaaagtattaaaggtgataagtgtagatgctgacgaaggacaaaagggtaatggcatttggtacaacatacatttagaagatggcggtatatataaaaggaagagtgatatacctttatatgattgggtaggcaaaacattacaacttatagttgtaactatctacgaaaaagatggtaaaacaccaaagatttttgatagtggcaagcaaaatccgtcatacagactacccaaagaggacgattggggattaataaaaaaacgcacagaaagccaaatacaatcatcgggcaagacagtgggcgcatttatttacgacaatatacttagtaagcctgccgataagatacggggaaacttagtaagaactatagaacgtaagtattacaaaaaagagctaatagagatattgcagcagcaagctaaatatcatgatgagttgcataatcagcatttgcttgagagttgtgcaaaagagctatatgctcataacgatgtacgctacaatgaagtggtaaagagcaacatgatacatctgttagtagatgatataattttctaccaacgcccacttaagagcaaaaagtcgcttatagataactgtaaatatgagagctatgaatatgtagataaagaaactggtgaggtaaaagaaatgcctattaagtgtatagctaaatcgaatccgtattatcaagagtttaggttatggcaatttattcacaatctacgattatctgatgtcgttacaagagaagatgtaacggcgcaatatctatcaacaccacaagattattgtaacctctttacatatcttaatgatagaaaggagataaagcaagacatcttgttaaaggatttttttcaaataaagaaagtacagatagataaagaaaaagtattccctatagagtggaattatattaaagacgccactaaaacatatccttgcaacgaaaccaaatatgaattgttatcggctctaaagcgtgctggtatggataagcaatggttagatgacacacctaacatgcaatatcgactttggcatttgctgtattctgtagaagaaaaagaggagtcggctaaggctttacgtaaattgtatgatgatgacaactttgtatcgtcattcctaaaaatcaagccttttgagaagtgttatggtgcatactctgaaaaagctataaaaagacttttaacgttgatgcgtatgggtaaggcttgggacgaacaagccattgatgctaaaacactgaaatgtattcaacaaatcataactggtaatattgatagcaagctaaaagagaagatagatgatagcagatatgttttacaccatgtatccgactttcaagggttgcccacttacttagcttcttacgtaatatatggacgccattcagaagttacggacatacgatgttgggatactccaaaagatttattaaaatttatttgcggctttccgcagcattctttgcgtaatcctattgtagaacaagtaattttagaaacgcttagggtggtatatgatatttggaaagcagaaaagcatattgatgagatacacgtagaggtggcacgtgaaatgaagctaactgcacagcaacgtaatgaggctaatcttagaaatcttaataacgaagctactaacttacgaataaagtatctcttagaagaattgaagaacgatacttttatcaaagatgtcagacctttatctcctatgcatcaagagaaaatgcgcatttatgagcaggctgtattaggtaacctcaataagcaagataaggactatgacgatattattaaaatatcaaagaaagaacgccctaccagtgcagaactaataagatataaattgtggctcgaacaaaaatattgttcgccttatacaggtaaagctatctcgctaagcaagctctttacaacagcataccaaatagaacatgttattccacaaagcagatactttgataattcttttaataacaaggttatctgcgaatcagaagtaaacaaagaaaaggataaaatgttgggctatgagtttattaaaggcagaggtggagacaggatttattgtacagcacatggcaaagaggtaacaatactaaaagaagaagagtataagcagtttgttaacgagcattatgcacataacaagcgtaagcgtgataacttgttagctgaaaatatacctgagagctttagcagtaggcagcttaatgatacgcgttatattactaaaacaattatgtctttactttctaatgtagtaagacagcaaggcgaagaagaggctacggctaagaacttattaccttcatctggtgctgttactgataagctgaaaaacgattgggggcttaaagatgtatggaacacgatagttacgccaaggtttgaaaggcttaacaagttgtctggaacaaacgattttggagagatgaaagaagagaatggcaacagatattttcaaaccaatgtgccctcagaatatgaaaagggatttaaaaagaagcgtatcgaccataggcaccatgctatggacgccctcgttatagcctgcactacgcgaaacatggtaaactatattagcaatgtaaatgctaatagccctaagcaaagagaagacttacgacaattgttatgtgataaaaacaggattattaacaagccatggaacacctttacacaagatgccttaaaagcactaaacgatattgttgttagttttaaaaacaatgtaagaataattaatagggctactaataggtatcaacgctatgataagaatggaaagaaaatgatatgtagtcagaaaggcaatgatatgtgggctatacgcaaatctatgcataaagaaacagtgtttggaagagtaaatcttattaggaaagaagctttacccattgctaaagccttagataacatatctgctatatgcaacgcacagttaagagcttatgtcaacgatttggttgataagcattttaacaaaaaacagttagttgctcattttaagagtttggattataaatggaaccgacaagatgtgtcaaaagttgaagtatggataagtagtgatgacaaaactcctatggtagctgtacgcaaaccgttagatacatcatttgacaaaaagaaaattgcatctattactgatacaggtatacaagctattttgcttaactacttagaaagtaaagggggagatgctttagtagcttttgctcctgaaggtatacaagagatgaatagcaacatcgagctatataataatggtaaagctcacaaacctattaagaatgtgcgactgtctgaaacgctcggtgctaaatatcaagtgggtgaaagaggagctaaaactaagaagtatgtagtagctgataaaggtactaatctcttttttgctatttatgaagatgaagaaggtaagaggtattattattccgtaccgttaagagaagctatagaacggcagaagcaaaagctttcacccgttcctgaatataacgaaaaaggtgttgcgctgaagttttatctatcgccaaacgatttagtttacgtccccactgaagaagaacggacaatgggaacatgccacattgataaaacaaggatttataaaatggttagttctagtgaaaatagatgttgtttcgttccatctactattgctaaagtgatagctgataaggtagaacttctatctcataacaaaatagaaaaagctataacaggtgaaagcattaaagaggtatgctggaaattgaaggtagacagactgggtaatatcttaaatgtaataaagtaaatgtatgataaagaaaacgctttgctttgacaatgcggcttaccttagcttgcgaaacgagcaattgcttatccatgtaccagaggttgtaagccaaaaagatttgccaaagccattattacaagaagctgagcgcactattccaatagaagatattggagtagtggtgctcaatagcttacgcattaccattaccacaggtgccatgcaagctcttttggctaacaatgtggctgttataacgtgcgacgcaaaaggcttgccagtggggttgcaattgcctttgtctggtaatacgctgcaaaacgaacgttttagacatcagttaaacgcttcgttgccattgcgtaaacaattatggcagcaaactacaaaacaaaaaatccttaaccaagaggcaatacttcagcgttataccgaagcagaaactaaatgtatgcgggtttgggctaacaatgtgcgaagtggcgatcctgataaccttgaggcaagagcagccgcttattattggaaaaatatctttccctctcttccgctattcacaagagaaagagaaggcattcctcctaacaacttgctcaattatggttatgccatattaagagctgttatagcaagagctttggtaggtagcggacttttacctaccttaggcattcatcaccataataagtataatgcttattgcttagccgatgatataatggagccttatcgtccgtatgtagacaatatggtaatagacattatgcaccaagaagatagtattgatcagcttacaaaagatattaagtttagattgttaggcattcctgtgattgatgttattattaaaggtaagcgtagcccacttatgattgctgcacaacaaactacggcatcgctttacaagtgcttttcaggggaggataaaactatattatacccagagcttacataattacttttttcatatcatcatctattatgcctttagatagacttagcgaatatcgtgttatgtggatacttgtattcttcgatttgcctaccgaaacgaaaaaggaaaagaaagcctatatcgattttagaaaatttcttataaaagatggctttacaatgtttcagttttctatctatgttcgccattgctcaagtatggaaaatgccgaagttcacaaaaagcgtattcataacaatcttcctaacacaggaaaagttggcttgttgtgcataaccgataagcaatttgccgctattgagttgttttattgcaaaaagcagaaggctcctaacgctccttaccagcagttagagttattttaatagcttataggctttttctttatcatagcaatcaagtagagaggcaaatactaatcattggtatttttagtccttacttttatatttaccgccctttcatatcactgtatgcatacggcttagtacacgaaaaaatcccattctgcatgaatgggatttatttttgcagtgcatttttatttttctctaatttccctacaatggcctgataaacagccttttgtagaacccgagttgtttatacacctacaaaagtaaaaaattttaagcaaatcacaactggtaccacgtcacacctacataaaatcggttgtttatacacctacaaaagtaaaaaattttaagcaaatcacaaccatatctttcgtatatgttgttaccatttagttgtttatacacctacaaaagtaaaaaattttaagcaaatcacaacccatattaatagttattttatacacaaattgttgtttatacacctacaaaggtaaaaaattttaagcaaatcacaacttcaagtccgccattaccacgagaaggttagttgtttatacacctacaaaggtaaaaaattttannnnnnnnnnnnnnnnnnnnnnnnnnnnnnnnnnnnnnnnnnnnnnnnnnnnnnnnnnnnnnnnnnnnnnnnnnnnnnnnnnnnnnnnnnnnnnnnnnnntacaaaggtaaaaaattttaagcaaatcacaacattatggtaatgattatatagcacccgatgttgtttatacacctacaaaggtaaaaaattttaagcaaatcacaacacaccgtaaaggggaggttagggcgttttagttgtttatacacctacaaagataagaaattttaagcaaatcacaacgcattatcatttcatcatttggtacgattcgttgtttatacacctacaaaggtaagaaattttaagcaaatcgcacttaaactttaaagatgtgcttccttgtatcattaaaccctccattgtattccctataagagagaagaaactttaattagctataaagatacaaaatatttaagacgccaccttattccttatttacttttttacatcttcttatcccgaattgaggtttaatttttaaaaacttagttgcattttttttatagactcttcctaaacgctttctaaagtttaattaacctagaaccatcgtcctcttcttctataacaacttttacaacattatccggtaaaagatcttctataagctctggccactctaagaaacaaagattaccactatcaaaataatcagaataccccatatcataaacctcttcaagcttctttattctataaaaatcgaaatgatatataggtaatcccttcccatcagtatattcattaactatcgcaaaagtgggcgatgttataacatcttttaccccaagctcttcacaaacagctttaataaaggtagtctttcctgcccccattctaccataaaaagcaaaaacattattgctgccaatagtattaataaatttctttgcagcttcattaatctcttctaaactattaacttttatttccattttcttttctataatttattacattttcttactataaatagtgatattccatacagattaattaacccataaccttactacttttacattatactaattatatatatattattactttaatcattcatcaataagtgctataagttcatcttttatttgatctggcacattaatacctcgtatcattaagctcctactccaccccttaacctcataaggcttcattgtatataagacataagcaaactcatctgcctcatcagaggtataactgtcagaagacctccctataaacctgtccagctcttcatcttcataatattcagcctcatttatagcagccttcatgacgcatacttgttcacaactaccatctgtagccatacatgtagagcagtcatttggaatattacgtataactttatgctcactaccatacttattagcaatacgtgtaaatataccagctattaagcccaatactattaaagacactatacctattattactatattcatcttaacatctttcttctactttaaaacccacttctttaagatctttccaaaacaacggatatgatttcgtaacaacattaggatcgttaatagttattcttcctaacctcaatgctaatggtgcaaaagccatagcaatacgatgatctccataagtatttattataggttcagattctataccacagcgtttaccgtcccatcgcaattcatcatcgttattattatataaaacatatcctaattttcgcatttcacacttcatagcctctatacgatcagtctcttttatctttaagctcgctaaacctgtaaaatgaaaggacatattcaacaatgggcacaaggctataaaagtaggagcaatatctggctgatttataaaattatagtctaaatgctttaacatacaggtatgtttagacaattttactacaggaagtgaatcgtttttctttctttcaaaaaaagtcttaactcctaataacgaaaaaatataacgtaatgcagaatcgccctgccgcgaacaatccatcagacctggcaataatagctctacattgttacttttatgcaaagcaatcatctcataccaatagcttgatgcgctccaatcattttccacataataatgtcgtgccttatactgctgaactggcactgttatagtatcgacatctgtccactctgccttaacaccatattcatgcataacatgtaatgttaagtctatataaggtctggatatgatattattttttaaatgcaactccaacccttcttcaaaaactggagccaccattaacaaagcagatatatattgtgaacttatattccctgccatttcaatgtgtcctccttttaattttttacctattatacgaagtggaggaaatccttcttcttcttcataagtaatattagctccaatacttctcaaagcatctacaagaactcctattggtctatgtttcattctctcatttccagttataacatgttccccttcagtaacacttaataaagccgtcataaagcgcatagctgtacctgcggcatctacatttatctgatatggcatattttttaaagcatcaattataaccttcgtgtcatcacaatcagaaagattgtctggaattattatgctttttgataatgcattgataataagagaacgattacttacactcttagatgctggcaaataaatgcaagcatttataggatttgctggagaagtgatagtatatagcattattatatcttactttttaaaagttttttacttatcctataatattataaaatcatattaaacgtcctctttatagaggtatacaaaagtaatatttatatttgagcctaagtaaaaacgaaacaaaaaaatttgctaatctcaccttttatctttaattttgtaacgcaaaataatcaacgggatgtagttcagtaggtttagaatgctggtctgggggaccagtggtcgcaagttcgagtcttgtcatcccgacagctcataataaaaggggattgattttcaaccccctttttacattttacaaataaaaacgctttttataaataagcataccttctattacaactggctaaacagaacattttacattgcttacttatacctacatgtacaaaaaaatatatattcctaatgcttacccttactacgatttgtttttactgaagaagcctttttactattaggagtggttgtaatgttattcttagccattgtgtaatatttcattgcctctggcatccacttcttaatatcttctatacgatgcttatcagagggatgatcactgagaaactctgaaatcttcccttgcgttgcagctgacatccgctcccaaaaatcaatagcattacgtggatcatagccagccattgctgcaaatatcaaccccatataatctgcctcactttcattagcacgactatactttaaattacgaaaaagaaaatatccattagctgcttgcgcagcaatatctccgacaccagagccaaccgtagaatttaagactgaacttaaaacacttgtgcctatagattgagcttgtttctttgttatctgctctgccccatgctttgctacagcatgagctatctcatgacctaagacaatggcaagacttgattcattctttgtataaggcagtaagccttcatatacaacaatcttaccccctggcatacaaaaagcattagcctgattattctgaatgagattaaactcccatgacagattttgtatttctttcgaataaccattgtcaagaagatatttttctactgctgaagataaacgatgacctacacgttctaccatttgagtatttactttacttacagattttgtagcagaagtcataaacatagaatattctttattactcaaactcaacatctgagcatcagaaatccctatacgatgcactcttcccgttaaaggcactttctctgtaataccacatgatgctaatgtaacaaacataacaccaaataaaaaacacttaattttattcatcatatatgataattattattatactgtaaaattattctttttctattatatttacaactatctacttaataaagcagactcttttattaatttttaaaaacctctatttttcgtaatctcacaaacttcttaaacatattatctgtttcgctattaatagaaattatctttacactaaaaagaggtataattcctaaaaatgatataaatataaatatctgctgataactaaaatattctgttaacatacctataaacatactagaagaaaaaaaagatatccctaatattgatgctcctatcgaataaaagaaagtgggatgcttgccatgtgtaaaaaaaagtaacaacaacacatacataacaacagagtatcctgcaaacaaataatctaaaaacacaaataaagatactataagaagtgaagaattaaaagaaaaactaagataaagaaacaacaacttagataaaactattgcaaacgccatcgaccaacgtaaagtaataacaccacacttgccaactgcccaaaagcctacagctgctcctaagagaatagctacataaccaattgcaccatgtataaatcccacctcctgaggagaaaatcctaatccgccaccactaccagtatcaaaaagaaagaaaattataatacgtaaaaaaataaattctggaaataaatataaaaaaataaacaacaaatgataaatataaccattacgtgccattatcatttgcacaatatctaaaaaccatctttttgttacacctacacaaaaaggaagttttgcgcgaatataagctttcggtaacactatgaaatggtaaagacaacatattaaacttacactacctaaactataaaaaattgttatccatggtgtttttactaaacgtgaaactacttcaaaatagcctactgccaatagtgggaaagtaaaacctataacaatagcacacatataaaaaatagtacgtattcccataaaagcagaacgacgcctataattagcattcctcttataaaaatgctctattgcaatatcgtgaatagatgcagcaatagctataacaaaaagaaatacaaatgataaactaaaattatatctattcggaacagaaagggctattcctataaaacttaatcctataataaattcactaagcaaaatccaataacgcttactatcaaagcttaatactaccctgctaagaaatggacgaaaaataaaaggaagtataagccatgtgttagatattataatatcactattatctattcctaactgactgaaaaatactaatgatgtcataaacaacaccacataaggtaaacctctcatcatataaagtgaaggcaaccataaccaatggttgtgccaaacatttactattggtattccactaataacgtcgctatctttcttcatatatttacttttaatgatacaagcgtgttaatacagaatctgaataataatgagaaagtatttgtttgtaatcataaccttgagcccccataactgctgcacctatctgacaaagacctacaccatgtccccagcctgctcctactattttgaaaagttgtggtacaccttctaataaatctttcttttctactacaaaagccgaactgtaaagatggcttttacttaaaacgcgtcgtatctcaagttctttccccaatattatagagcgttctgttccttctatctccatctcatataatctcccactcttaccacgttttaaaggattaagagaaagtatctgcccaaacttaatacctaatttttcttctaataaagaactaagctcagtttgtgtataagatatttcccagcgataaaaatctgtagtttcttgatcgtaatcattaagcacctgacgaaggactaacttatctttagtattacaaaatgcttttgggcttgtttttatccattcctctgctatagcctctttcgtaagatctggtaaaaaacttcttttatctatacttgtatctacaatggattttagataaggatactttatattatcccaacaatactcaaaattctcagtaacacctccacaacacttagaaaaccgcgcatcacataattctccattatatgttaacacctctccacgcgttgcatcaatggcttgttttgcaaatacacttattgcacgcccaagcccctgataacgttgacaatgatcatcagcacacacatcaaaaagagtatgttccgaacgctcataccaccgaataatcttttgagaattttcaataaaatcatgttgtgagctgttttccttgactttctttctatttataatctgcgataacaaccaactacgagaaataactgcatgagccttaagcaattcaagtgacgacgtagcacgcatttcactagatataacactataaagataattttccacttttatttcatttatagcatatatactgctattatccactaccaaacgcaaactacctttaaaagtttgatcttctttacgctgccaatgaaaattcagtcctattactacatcttgcaatgtaaatatagaactttctttaattggtacgaataataattctgaataaaaaacatcttctaaacaaattttatcatctacaagctctgcaacataagtaccagaaacctttttacttccatttagcaaaaaatcattagttaaggaaaaagtaatagtcttattactcaatataccaacagttacaataggttcttctgaatatatcataatcgctatataattatttttttagttgactaagtactttttctacatcttctgatgttaaagttacttccttaagaatagaagttgcttgtaaaggggtaatggtctcaaaatcttccctacgtggcaaaattataagtcctcccatatctatagcacctggactcactaaacattgttctgtatattttccataataacaatctggtcgatgtttaagacgagggaatatcaaatttacaaaaagatccttctccttccaagaaataacattcatcattggctctacattgccttctggtaaaggaagctctttatatatcttattaaacaaaaaaacaatactatttatattcaaacctgttatagctataagtgggcaaacataatcattcacatacaacactttcgcatcttctctaaaaagaacttcttctgaagttttagccaatgctttccaattttcatacacaggtaacattatcttaggcactgcttgaaaatgtaagtgatcaggagcactcgccccacaaaatggaccattataaaaaacaatttcttcagcatattcttctacaaatagaagcatttctataaaattattctttatttgttgtggctcatgtcttatagaaggtattgtaaaatgttttggaagaataggaaaaggattaatcaaaatatcaaaatgactattaaaagactttactatttgctctttaggtctatttacagcacacaagaagcaaggtcgtttttctataataaacctatcaattttagcacctgtacttatcatacgagaaggattaaattgtgcttttaattttcctaaagaccttatctttatatgctgtaaatcatcaaaacgttgtttaacatcttgccataaaactaattgtgcttcataaaaacaagttaaatcactcataaatattacttttcctccatattttttaataaacgagcctttaattctatagtacgaatacgatccttataaagattattaacattctgtttatcaatacttaatgaggaatcactattacctatccaacgacgacaaagatataattcttcgtatatacgtgcaatacgatattcacgactaatagctaattccatagcataatcttcgccataactagtattagggaattttagtttacgtgcaataggagtaaaaaacgcacgaggtgcacctaacccatttatacgtaaagcattattacatccattgttttctgtccattctctatgatcaattaaccctggaggtatagtattaa
